United States Patent Application Publication US 2022/0290142 A1 - sequence listing, part 20

SEQ ID NO: 15576 - DNA, 173796 bp, Homo sapiens
acacaaaaagccttacaaatggaagaactaaggtggtacttaaaaacagcaccttaggatctagttccatcctatcttttcccttaaatgccatgacaaaagttaaaacgggccctgtcccttctgaatgctgggcttctcatctaaatttaaataaaaacctttgaagatgggaatgtgttggaagaaaagaagggcagaaaaaaagtgtgttggaagagtctgtgtgagtatgtacatgtgtgggtgtgggcatgtgcggcctgtgcgtatgtgtgtgcccccgtgtgtgtgtggagcatgcgtgagaatgcatgcacatgtgtggggtgggtcactatgtgtgcatgcatgtgaaggcatttgcctgtgtatgtgtctgtgtgtggtgattgtgtgtctatcgtgtttgtatgtgtgcctgtgtgtgtacctctgtgagtgggtgtgtctgtatgtgactgtgtgcccatttgtgaatgtgtgtgtgcctgtgtctgagtgtgtgtgtgcctgtgtgctgcaggcgggagaggctgctctggctcggcgagtggcggagcagttagtacaaaactagtagtgagaaaggaagctgggaagagactgggaagaggcaaccgacctcattaacaaaagctcagttttgtccctgcggacccaaccagcagaaggcacggggctagcggtggctgtccgccagggaggtcgggctctgtgtaaacagtagaaggcatctttatcatgcccttctcacagggagtcctgaggcttggcgctcaggaagtttgcaaagctgcagcagctgccttggagaagaccagcaaagaaagtggagtgtgtatgtgaacttcaattctgtattttctgtgaggtgggttaatggatttttagtaaaaagaaatctcaaacacagctgacctgaaagactggaatttcagctctcttccttcccggggttctttttcctcccccttcctctcaaagccctttaaaccagattgctgtgtcagtgactcttatcctgcccgccagttccaagggtttctaactttttgtcttggaaaggaaaaccactacctgtaagtatctgttttatgtgtttcttttcattgtgactgtgaatgttctgttagcagaatgccccagagattgtttgtgtgatatcattaatgccaagtaacaatgcaaagcatctgcaagagtaggcttgcaaaagtttaactctcctgttaactcagaagatggcaacttgcagtgttaacaaaccaaatgccaaaactgagattctttttattacgtgacacaaatttctaactcttctcagtccatccgtgctggcacttgccaatgaaataaccattttttaactgtgtaattgtttcctctgaaattagaatgtttcttctcagctaaatgaaatggcaaagggaaaagacacaaaaatgaacagaacagataatatcctcatggtacaaacatagagaaatttggatgagataatgtctggatacctttgcttaagtttagttatatttggagacatattttcaaaaacatgatttctgtttcattgtggggaagagagatagtgctggggaggcaaagaaatggccttgttctgaagtttttggactgatttttaggctctctctgctcagtactgagatttggtccagagactttggtgctgttgtaaagagtttcttttcattttattttgaaatccaggaaacaatttttggcttatggaaattgtttattgtttttaaggtatttaattttagtttctgatttttttttaaactattgcacccagtcttgttgcttggtgtgcattacaaagcttaaaaagagcatttctgggagccaattggtgtttatagcctgggaatcttactggagagattaacctctgtggtgctgcttcacagaacagagctagtgattcgaatgctcttcaggtttctgctctggaaaactgacacccgctgttcctgactctaggtaaagcttgaagagctgtgcctcagccccctgcttacatttgataaaggtgccttcagtgcagctctaggaaactttgctgtttctctccatcaggcattctcaaaactgactgtgtgtaagaacccccatttgcttggtgaaaggcaggttctcagttcccaggcccaaaggattttagacctggagtggtgccaggaatcttcccaggtgattctgaagcaggtgggtcacacttgggtaaacattgctctacattgtccttgacatgaaattcttgtcatgtacttggttaatattaaaccttatatctaaataagaaacctgagtttgagctgttgttgagcataacttaatgtgcaacatggttttgcatgcttggctggcaaaccagggctttttaatcagttttccaccaacctcatcttttttttttcttgcttcccttttcatctctgccttttcattcccacgagggaaaaaaggagttgggcaaagggacctgactaccatgttccctgctttcacatgttgggctatatggcctgatctgcccccgcatggctaagcaatgtttgttttggaaactttaaacccaggactgttcttaattctttcccagcctcctggggctgctgggctgtaggggttgggcgaggctgagtttgggtaaactgagcttgatttcatggaatggttcaggagcctcattcctagaaaatgatttttggattggaccatcccacagggatgagaagaaacagaaaatgattcttccatggtgttaaaattctcatttcacaatatgtgaaagtcagagctcagcttccatccccatccttgcattttctggcgtttaatatttatattaaaaagaaaactggacatggccatcagagccccttgctttcttttctttcctcattccaaacatttaggtgcacctgctacatgccaggctctgtgatagtttttaaggatttcagaatgcccactggggatggcatgcacaggcagggtccttgtcctcatggtgtttcaaatcttagttgttgctaaccagccttggaagagccatctaacccctcaaagcttcacttcctcatcagtaaaataagttgaattaaatgagttttggtatcttcctagctctgatattctgacattgatggatatgactcagtcttctaaacacagatatgggctatgagagcttttcagcatttactctgagaataggcctaaagatttcgctaattgcttttcttcaaaaattttcagatgtatttttttctctcacaaagcaccatgaccacaggaatattgagttagacaagtgtaatcttttcagggcatgtagccattccttacaatgggatcccgtaactccctggaaaggctgtttccctgcgccaggttacataggagggcagcctcttatcttgtctgaatctgatgtcgctactcctttggagagctgggtggtctgaacagggcttgacagcttccacacatgcacagcttgcaacctgaccctttcattcaagtgattcaacagcttttgtgctaccaggtgagaggcttaaacagacatctttgaggggccgagcgaaacaaaaaacaaagcaaaacccactccctaatgaaatactgtctatactatattttgtctgtaatgcagcttctctcactgcagtgactggggcaccatttcaaagggctctaaaacttggccatcaagataagaaattataggtgtgatttatgtgctttttgacaacatagcctctagctgtctgaagataatatgtttgagtggaaaactattgactggaggacagggatcttgctaagttagaatatttttaaacaaatgttctttgcctctcatgggtaagtttttacagaagccaaaaatagtttttggtttctcccttaaacctgcctatttatggaggtgatgatatttggggaaaatgtgtattaaaaaatgatgcccaaaatgctctttttgtgcatcatccaaaggctgctaagattgcatgtcacttttcactctcaggtttatccttgaaactttcttatctggctccccagcaacaaaggacagataaatgcccagggagcgactgagcctcaagtcctttactgggtgttctgctttcctggaactcttccctgctttctatcaaacattatcagctgcttagtacttacagatgctctgtgcactcttctcttaaaatatgtgagccacaactttgcctcattagcccacacccactgccatgctaccttcattctaaggcctacgtttcttgttagcataaaaatgatttatttggtaaattacaaactcaaaccacagtaaagttaggaagattgcagaaaggatagataccgcagatgaaaattcacccaaatatttaaaatttgttaggcgtttcctatcaaatctctttcatagtacagattttttcttttttgttaaagtgatcctacaccttagaaagacaacagagcaacaacacaacagcaatactttaattctgttttacataaatgtccctttttattatcacatggtaggatggttctatattacccaataagcattagtgattgttttaaaaccagaaggcagtattgacgcaagggccggaatgttaaatcagagaggtgcagtaggaaaaaataatggcctttgaaaaaatttcacctgggttctaatcataggctacaatgttctttggctctgtaatgttggccaagttactcagccagtttcctcaggggtaaaatgaggtcattgatacttacctcactagatgttcgtttatgaagcatgatgtacaagtgtttaataaatatttcttctttgggagacggctaatacaagtataatgtctgaaaagaaaacaaacatggcaagcgacttaatttatagatgaaaagaaaagagaaacaggaaataaagttacattccagatcccaatgtctggggagaacagatctcaacccaccactcccgtggcctttaactctgatcagcagcctggttctcactttattctttttttttttctttttttaaatttgagacagagtcttgctctattgcccatgctgcagtgcagtggcgtgatcttggctcactgcaacctctgcctccctggttcaagccattctcctgcctcagcctcccgagtagctgggactacaggcgtgcactgccatgaccggctaatttttttgtatttttagtagagacagggttttgccatgttggccaggctgctcttgaactcctgacctcaggtgatccgccagcctcggcctcccaaagtgctagggttataggcgtgagccactgcccccgaccctcacttgattcttatagaccaaaagcctgacacagatccgtgagctcaagactatgaaattgtttggtattgagaaatcaagggcaatgtgaaaatcattctgtcttcattttttactgattctcctcatataggtgttttagataaatgcataaggagatgcatcattttgtttttctcaagattttgctccattgtagcaaggggcccctcaggggtaatgtttatttgagaatttgaaactctgggcttgcactgtagtgagcctgcgaaccatcaccaaaggaaggacatattcattcaaacatgtggaggagtgtgcactctctctctctctcaccattttaaaaaataggtctggtatttgcatttagtcactcaactgatatttattgagcttctctgtgaaagattcaatgatcagcactaaaagaacttgggtgaacagaacagtcatggttattatcttcaaggtgtttatagaccaggagaaacagcagacttttttttttaatggctgcgaataatgacaaaatgcttatagatatgcaacatgtggcaaagtgtatttcaggattccatgtgagcagataaaactggtttgggagattgaggcctgaaggatgagtagaatttagccaggtaaatgaggtggttgatggcagtggggaagggcattcatggcagatggaacagaatggacaaaacctgcaaaggcttggaagctggggttggcaatatggtgagtttaaggatgggaagaagtccagtttgaccagcatgtcagtggcaaggaggagagtcatgcaagaagaggttggagaggtgtgcaggggacagtcggacacagttaaaagtgatcccggaaagtacctaatccacactccctctctgaaacaaacaaccctgttctgtgtctgtacctcagctcttgccattattggacagcactgagggaaagtcctttctgaaagttgagactttcacacattctccctggttctgcaccctggaaccatcaagtcactccccttcaaacatctgaagacagactattttaaaaaataaagtgctgcgaaagcagatctgctcttttccatacatatgcacttgtttttgggaaatgtagagttacacaattttgcttattggaagctaacttactggctcagtgcatcattccaggctctgattatcaaagctgtggatcttgattgtgtcctcagtgataacagttaaccctcttggatttgtgctttctgtgaattggataaagcttgtcttctatatctttgtttaaagatttagaaaaatgtttaaccagagagaaccaaaaacgagctataaggcacaactctaaatatttctaatgagaaaatgatgtccctaacctctcttttttgttcccttttaaggaggaaactagtcactagtctctataacccagaatcacagaaatgtctaagtgtttttttttttttttttttttttgagacggagtcttgctctgtcacccaggctggaggcgcgatcttggctcactgcaagctccgcctcccaggttcacgccattctcctgcctcagcctcccaagcagctgggactacaggcgcctgccaccacgcccagctaatttttttgtatttttagtagagacgcggtttcactgtgttagccaggatggtcttgatctcctgacctcgtgatccgcccgcctcggccttccaaagtgctgggattacaggcttgagccaccgcacccggccagaaatgtctaagttttaatagaaagagctcaaagatatcaatgtgtgttggtgttcttgttttttatgagactgcttaaggcacaataattgctaatttcatttatttatacaaaagttgaactcatattacatgcagcggacagtgttgtccttctgccttcaaaacacataggcatatacactaccaggtaggatgtgataactgccctgtgatgggtttaaataaaatatgattctcctgcaatcggaggaaggaagtctttccagatgaaatgatgaggtcttacggaatcctgaatgaggcatttcttgaggggttaataaatgggaaggatctcaataaggatggaagcaaagacattccaggcaatataaaatagccccttttaacatgaatccattgtcatttaatgtactgtgatataatgacccactctttcccagcagtcaagccatcaaccatccatttcaaattatagacacatgccttttgctttcctcatcagtcattcttcataattttctttccttttaatattttcttcatcttaagaatatcaggttcctgctgaccacatgtcatggctcagtaactttggtctcatgaatgactgtggcctctgctacctactttcacacattagatctaaatgagaccacacagcattttataaaaatgactttacttaaattttgaaaaatagtctatgtctcaagctcttagaaattttggaacaatcaaaaaaagctgctgctggaggtgctgattggtgattaaaatgtcactcgagggtgatttatcagtgagagaagaataggagttaaatggccatttgattacattaaatagtacccaaagagtttaacactgcaatttatatcctattcataatcctgtttaccatgtaattctgttaagacttcctcctggtgtcagtaagctggtcttccaaattcttaagacattactacagcaaaaggaagtaaaataaaatatgtagccacataaacccccatttaaaaatcagtttgtaatatactctggacttagagtttggcagcaggatggggtgacaaaattcctcagacaggactaaaggactagctttgcacttttacagaatctttcaaaaacctcagatggaaccaattttgtctttctcatttgtccgtagagcctctgtggtgctgatttgactgttcaagctaggaggtggcagtgcactgggtgtaccatttagcattcaagatactatgtggcctcaccatcactcatggattgttgctgaattgctttactggaaaatattggtcttcatttacccccagtagagacatttcctgatctgtggctttgtaagttgcttttgtgccagtcccttgatagcgcatggaaatcacaggctatgggattcactgatgggaaaactctggggtccttgcatatcccttcccccactttagtttttttctatgttaagaatggcaaatgatatcaaccatgtgagataatggagacacggtcagagatcatatagtgtttcacagcaggcttgaatattcacagcagtgctcagaggcatcaagtctgaattgttagctctgtggccagagagatctggcattaagactttaagagctaagacttgtccaggagtgatggaagttgaaattccatattaattaacaacagccaagtgtggtggctcatgcctgtaatcctagcacttcgggaggccaaggcaggcagatagtttgagcccaggagtttgagaccagcctgagaaacatagtgagatctgatctcttaaaaaaaaaaaaaaaccaggcatggcgacagatgcctgtagtcccagctactcaggagacaggtgggaggatcacttgagacccagtggtcaaggctgcagtgatccgtgatcaagccactacatttcagcctgggctacagcgtgagaccccatctcttaaaaaaaatacataaaaactatcttcacaaccccataaagtcaatattatgaatccccactgtaagatgatgaattcaaggctgagaaatttttaacaaatttaattatattgtagattgagcttctttctgcagacactaaagtgttcaaaaagtgagtcgttaaagtgtttatctttagttcagatgattaaatgaggtcttcctacaataagacatgtgaactaaaggtgacctgtgtcatgcattactatcatactgtccctttatataaaaaatccattttattttttaaaaaggagtcacttcctttttcccctcaaaaaattgatttttattttttgttattgagtagaaaaagccagactgtttatcccatggagaaagctggaggcagtaatatgggctgaaacgaacaagattgaggtccatgaacatgtcaaagaatgttataaggagtatgggataagggccattgtttcactgaaaaattaacagaagtaattgacacattaggaacacagaggggaattacacttatagaatgatttgagagacttttaatttacagatcagaaggtttaaatttttcttctttacagcagatgattaagcagatagccccaaatctccttctaatgtgctcaataatgattttgcattttatggttttagagagatctattacatactgcctaaacctaaatatccacttctaccttgtcttaaaacaagcatgaaaaactttagccttatgaataataaaatttattgttataatatatagacttatctttgtctttaaagagtcgcagcaaggaacaaagttaaaatgcaacagaaattagtggtagcacaaaattttagtagctaaactttatgttaatttctttcattttaggctttgcttcctttctgacaattttgctaatttagcaaagatttttctcaacataggaaaaaactaaagttggggaagggatgtgcaaggaccccagagtcctcctaccaaagaatcccatagcctgtgatttccatgcactataaggggactggcgccaaagcaacttacaaagccacagatcaggaaatgtctctgtgccactgacttgtgtacttacatctcacacatgggactggctttccagggatggccatcccagctaggctgccaatgaaacgtttgctcatgatgcctcccttggagcgtcctgtctttctttaccttgtgtcagactctgtctatctaggaccatcctatcttcctctcctcttcccagccctcccccaaccaaccaccaccacactgggtcttgcttttgggctcttcctagtgctgttcttggaggcggcatccccagccctagtcctaccgctgcgttccaccctgactaagagacttactgagtctgagggttgttttagacatgccaaagatcctaacttcagtctttggacaccaaagctccttttacctcttgtcatacttagaggagaataagataaaatgcagttattaatgcagttaatatttgcagcagtggttctccatcctggttgctcattagaatcacctggagtacttttaaattcagatgcctgggccccactcagacaaattaaatcagaaactctgggagtggtgactgggtgatggtaatatgaagctgaagagggggtcctctagatgaaggaggcaactcatcttggtgtgtttcccgttctcattaatagcgcagacccagtaatccctcataagaatggtttgcttctttctaggacagaggagtaggtctgaagccatgagtgtgaagtttatttgcagccagtgctttttcccaggccatgggactcagcccccacattgcacaactccaggaacaccgttcacgttatggtctgtataaacagcataaatggtgccctggaatttggtgtgctgaactgagcaaaaccaagtaaaggagtctcatcacctttggccaacacagtaaaggacagataagttagtatgtttttccacagaaataccttccaccatgatgagtttttgccgtgctcagggacatcacagtttgaactgtatttgtcagcctatctggatattgcgcctacagtaaatacgtttctacctctagacaaatttcttgcaaaccaatattttgaatatagcctatttgtgtcttggagactctaagaaggtattttagccaagactgcttgtgtgttccatactggtttcacttttaaaatgtttctctgacttactggtgtttgcagttcttatacgatgtaattttctacattgctgtatcctcctgcacatattttttcaacaaatgagacatctaatcagacattcagatactttatttgcagcctgtgatgtttatggagattttgtttttgaaccagtacttgaagcacgtttaatcccactgcctgagaacaccctcccacctgcattctccacaggccacccccaaattctgccaaagtgagcagatcaagtttggcttttcttaatgccattaagctcagtgagcaacactgcatcagagactccagcatgtgcagcagaatggacactggcacactggcatgggtgtgcagccacatgtggtgtctcactgtggggacatggcctgtgagccaccagggtggcccttgagtagctgtgggtcaggagatccccagaagagacagtcctcaaaagcccggaagcatgatgaacaaaaactctctgtgatttgccttgttcctttttgttactgatggccctccactactctagagaaaactctttagctgtgtgtgggtgtcacaggagagtcaattcagcctgaaccatgaggcatgtcaaaagatggctcaactcacaactttttataaattagtagactttaatttttgtgatgttttaggtttatagaaaaattgagcagaaagttcagagttcctatataccttctcacttcccaacccctactttccactattattaatgttttgcattagtgtcgtgcatttgttacaatggatgagcaattattattatctaaagcatatattttacaatagggttcactctttgtgttgtacattctatgttttgtttttgttttgttttgagacagagtctctgtcgcccaggctggaatgtagtggcgtgatcttggcccactgcaacctccgcctcttgggttcaagcgattctcctgcctcagcctcctgagtagttgggattacaggtgcctgccaccatgcctggctgatttttgtatttttggtagtgacgaggtttcgccatgttggccaggctggtctcgaactcctgacctcaagtgatctgcccacctcagcctcccaaaatgctggaattgcatgtgtgagccaccacacccggctgcattctatgggttctgacaaatgtttaatgacatatatccaccatcacagtggtagcttttaaaataaattttagaaaaatttttcttcaatagatctggaatagaaaggggcaggaagggaactaactttggctgagccttgctctatgtgtgtgctggcaactttgatttacattgacagatagtatcacatgtaactagtgtaacaaccctgaaaggtgtcaattattgtcttcattttgtagatgaggaaacagagcccaaggaagaataggaaccttgctcaaagaaattatggaaccaagataggtgcacaggtctggtagagctgattaacaggctggcctctgattttctatcacttcctctccaaacctgcatcaaagaattaaactctctcatcctccttttttagcactactgaatcataacattatttacaaagttatttgtaagaaagaaaaattatgaaaaatgaagtgtgtgtaagtcatagctgaagacctcaaaattgtgctaagatcctcaacaggaaagagcattaagactcttattagactccttggctaggcttgatggctcatgcctataatcccagcactttgggaggctaaagcaggagtatcacttaaggacaggagttcgagaccagcctgggcaacatactgagaccctgtttctacaaaaaaatttttttaaattagtcaggcatggtggcgagtgcctgtagtcctagctactcaggaagctgaggtgggaggattgcttgtgcccaggagtttgaggtggcagtgagccttgatgaaggaactgtactccagcctgggcaaaagagcaagactccgtctcttaaaaaaaaaaaaaaaattatcattacagttcgattaagcctctttgttggttttaggtgttgcgctttttttttctttactacatctcagtatatgatactatgctttacattccccactttgcttgcatcagtgggtaaagcaacaaccaattgtctaacctttgacaaatcacttagcctctttgggcccccgtttcctcatcttgatcaccctatggtagagcaaggaacatggtttcaggcacctgggctccccaagctgtcttctgggattggaatatgaggtactttagttaagagaatttgccttagacaaattatttatctatttccttagctgtaatataggaataataatagacttgagttcatacattgtagtgaaggttaaatgagttacaacagtgccaggtacaaagtgagtgcataatacatgcttattattgttattttacgtaaaatttggataagctccttctaattctagaattgtatgatttttcatatactgtaacttaggctccaataacatggcactttttgtcatttaccataaaatttcttaggtcatcgaaagcagatctttacatcagacctctttacaaaaatattcatggtggttgatctgttttctgctgcagacatctgtgagtttgagttttaatcttgagcaaggaatgcagatgagatgatcaaggttacctcacagcttgaggagcaatgctgaatagttttctgaatgtctgagcagcccttttcacaatgaagtgtttcaccctgaatagtggaagtttctttaagtgtatactggtgagtttgatgaaatcattagagcattttgctcctatgctatcacagcgaataccattctggtttttgttgttgttgttgttttaagccaaagcaagtttattaagaaagtaaaggaataaaagaatggctgctccatagacagagcagcactgagagctgctggttgcccatttttatggttatttcttagttatatgctaaacaaggggtggattattcatgcttctttttttttttttttttttttgagatggagtctcgctctgtggcccaggctggagtgcagtggtgcgatctcagctaactgcaacctctgtctcccccagtttaagcaattctcctgcctcagcctcctgagtagctgggattacaggtgcacaccaccactcccagctaatttttgtatttttagtagagatggagtttcaccatggtggtcaggctggtctcgaactcctgacctcgtgatctgcccacctcggcctcccaaagtgttgggattacaggcatgagccacggggcccagcccatgcttcccctttttagaccatatagggtaacttcctgacattgtgatggcatttgtaaacagtcatggtgctggtgggagtgggagggtagcagtgaggacgatcagaggtcacttttatccccatcttgattttggtgagttttggccagcttctttactgcaaactgtttcatcagcaaggtctttatgacctgtatcttgtgctgacctcctctctcatcctatgagtaagaatgcttaaccatctaggaatgcagcccagtaggtttcagattcattttacccagctcctattcaagttggagttactctggttcaaatgcctctgacatttcccccctcccttttataagagaatccttaatcttaagagttgtagagggatgaagatctgtattctgtaacttcttcaggctgaataggggtgatgatattcctgcctaactatgaggatctcttgtatttgggtagagaggagctcagtcagaaagcgtcagtatgtcaagggccactcataactctggagttccaacaaaaggtgatatctagaagattaataaatgtttaagaaaacatctagtaggcttattctgcatttctacacaaagagtacaacagcaatatattccacaacagtaaggcaaaataagtaaattatcccaagtaaactaaattagaagatttttcatgagctgggcaactgttggaaccaagcagatatggagttgttagctgattccaatatgtgcccagaattagaatattgatccagatttttacattacccatccttcttgtttcttctgagcagcagccaaagatcactggttggttcacaggaataagcagtcagtctaaattgcagaaaaatactcaaaaaacaactgatgagactagaatctaatcaggtgtaccatagtttttgaaacataatttctctctccagtttcccattttcactaaagacaagtcatggtaagaccgatttgctttattatacttggcctgattatttgtatgaagtgcagcaggaataattatttttcacataggcttttaaaattgactttaatggaactctgttccgtaaggaatctcaaataagacttttttaaagctgagaccggccatgggtttgtaccctcaaatacctgtgagttgggtaaattcctctcctcctgaggtcccaagataacctggagctcctgggcctgtcagaaagtgacattctttgtttaccaccaggtcaggaaccctgtacagaaactgtgtagacaaggtatgaggccatttttcccaaagggcttttattggctttaccagtcaagtttaattccttaaaggaaagcgcaccattccagtcaaagccttggtaaaataaccaatttctccaactgtgtcctgttacaaaagaaaacagattcttattgcacttatgcaaataactatattgccataagttaagaatactcacaactagtttccaaattctggcaaaatcaggtagagagaaacaaacatgctccaaattctgttcataggagtatactttactcaattgttaaaagctgtaaatagcttaatagaaaagttttcttggttctaaaaaaacaaaacaaaggattagcaccgttttaagcaaaaagtaaaaaaatcacttcagtcttctattagttcagtccatgcagttaactcctgtcctgcttgatatttgtgaacatttcagctttccatgagagtcctgaaagttgctttcctctattctaatgtgacaattgccaaagttattagaaacctgcatttaagaacacctgtcaaagtcctatagctgattataagctaccttttgaagaggattaaaacaagacaacaattgtcagtggatgataaaatgccttagggcagccactattaaagccacaattggcaaggaaattttgtttacttctgtggcatacaacaattttacataacaattatagccattaataacatatgctgagtcatattagaattataggaatttttccattattttggaacacataccagtaacatatttatataaatacagccctaagaaagccaacattgttttatatttgacaatgctttctgtattatttttataccaaataagccaaatgtcactgttgtattagtgtactattaatgttaaatccaattcttaataaaaccttatagacaatgtatttaatcttaatcagtttgaaccataaggtaagattctcataaatttttataaccctttaaaatatttgtgaaagagaagatcagtgctctaagaaaaacctgttgtgcttttatttcaatgttcaatttatagaaaaactgattaatacccctttagctttagccaatatgttcacacacacaatctcttttacaattaattttttacaaaccttccacaacttgcttaaagctttatcctatctaacttaaaacaaccctttaaccttttaatctaggcaaaaaaatccacatttccatgacttcttatagtcttttaccaaaaacacattttactttctttacacagcttacatgtcaaactgtttttatttcccaaagattaattaagtcacacaaactaaaaggcattacactttttacttttctagcaaaatatttcatttaagctcctattatttttaagccaattaacaaaagctcttttatattacacacacaacacatataactacacagaagacaaaggactcatttcctgatccaggaattgaaccctgaacccaggccaccaatgtgaaaagagaaagcagggccacatggttacaagatcaagctcccaaggacataactgaccagttttgctggactgtcttagacagcaggcttatggggtcctaggcccgcattctatcctgaggtatccctctttctgacagaaagatatggaaagacaaattcatagcacaaagtacaacagattcactacagtttaagactagcctcacgaattctttttcccactaatcaaaactttacagaggagataaacagtaatttttaccattcattcaaccacagagagagagagagagaaagagagaagtcaaaattcttacccttttgctgacatgccaggcttcagggtttcctttctctgagtggccctactgacccggctggctgcaccacagctctgggggccaagccgcaacacgaaggaaggccagagtaaaatacatgtgacaaaacacagacattagcccctctgcttagcacctagtatcaaactgacaaggctcaaacgtgcccccggctggaccctgccattgttaatccaacctctgaccaggaatttcaactcgtggtctctgggcaagatggtcaccctgagtaatagtaaagacgggaaaaggaaaggagagagagaaaagcattgcctggggcagagtggggaaggtgaagagcccagggaggccagagaaagacccacccattgcagcgacactgaaaagttcaggcggcagcttgtcagtagaagagggatctttcatggcagttccatcagctctcaagtttcccctttagggggaaacttgtccccatgtcccatgatcctgtacatgcctaattctgtcacccacagccatcagcaaagagtgcaaggcagattaacccaaagaaatggtggttaacatcctatagtgccaaacccgttcttagctgagagggactttactgggaggggcctctaaccccctaaatcttaggaaagactctaactttcataagttgggtctcaaacccaagttcggtcaagcgtccttgccttttattaagaggggcctttaacccactctatcttaggagagactctaactctccttagttgggcttctaacccaatcccgtcatttactctggtaaatgcaccccacctacccaaagtcagccaatttgtgtgtgcaaatgattttcctttgggttggaagcctcttcagtatcatccctttggggtttgcagaataatgttactggatcccaccacttacccagagttagcctttgggtcggggggttttttcagtattgtcccttctgtagtgaccataaagatgttacaggaaaggggtcccaatccagaccccaagagagagttcttaggtactcagaaagttcttaggtactcagaaagagggataccttaggatagaaagaattcagggtgagtccatagagtaaagtgaaagcaagttaattaagaaagtaaaggaataaaagaatggctactccatagacagagcaggcagcaaataccattttgtattgtaaaatacctgattataaatctccctcccacaagacctcaatctcttaaagattaaagttacctcttattgaactttttcttgcacagtgcccctgtactttttctcacaaaaactccttgcttctgacataacacctacttgttgattctttgactatgctacattctttctctccatcttcaaacatgcccttacttttcctatgcacctttctcaatactaatttttctttcaaatttaactctttccccttctgggaagcgtaccctaggcccagtttgagtcaaatgctgccttcctatttagtcctataccataaaatatatctcaccattactgcacttaccacccttgctgttttgttttgcttttctgaggcagggtcttgctgtgttgcccagactggccttgagctccctggctcaagcaatcctcctgcctcagcctccccagttgctaggactacagacatgttcccctgtgcttggcattactgcctgttttgaatcattagtttatgtttgtctttctgaattacactgtacactctctaagggcaagaatttttttttgtcatttttgtcttcacaatcccagcacttaacgtagcacttgtccctaagtgagtactcagcaattgtttgtacaatgaatgaacagatgatatgtcatactcaaaaagccaagatacattctgaaaattgaattggtctcaaagatgaattcctggacatgatttaatacgaatttaaacagaatctcacttttacacagtttggtgttgttctgttgtaaattaagaaatgaagaattcactcaagaagaggaaaattaatttcagttggcgtgacactggtggggaaggccctaggtgtgagttttggtacatgcccacggtaggtccctgatgaagaatggggcacaccatgatgaatgtgagtgtttttcactctgcttaagttattcaattaaagcaacctgttgtgaaaattgtatgatacaacgctctggctgaaagcaacatgattttaagttatggccatttcctaactaatcttcagggaaatgtttttgatggtttaagaggctttgatagtcattaaaaacagaactgtaagttgagggcacacattttttccctctgcaatcagttttctctacctttgaaggtagttttagtagaaggcctctgtagaaacaggcagacgtctggtttccaagggatatcctggaatttgaatttctgaagtagacttattaggtatagatttatcgggcatggccagaaatgttttagataccctctggccattctatattttagtcattttaagtctcttgaatgatttctcaaagaacccgttttgttttgttttgttttaatgaaaaagaacaaaaaacgttttccataagtttgcagactttgggcttaaaaaggctcctttctgcaagacttcttagaatctttaatatgctcatattatattgtgaatttttagaaggtgattttagcgttctgtgcttcaaatgtatttgggtatggtgaactttttttgtggcaagcttttaacgtctccaaaatattcattttcacaagcacagtttgcaaaacatggcagggtagagtttgagctattggaaatctaaggaaggaaacctaatgaatttgtgttgtaggcaaaggtatgtctgtctttgcagccttggtcatcatggggttcagaacatggtatccccaaatagggtgccttggcacattgaatattttgaactggaggaatttgagaagtggcatgtggtggaaagactctctgaccttctcccctgaacagcaggttacagtacccttgtgtgagagaagtgccctcctgatacccagaggaaaggagtatccttagctccaagaatggagggacacaatggggaatctgcacaggcaggtcttgctcactttcccccagtttaccaccctcagctcacacatctttgtcctaatacattttcccataactttccactcttcatcaagcttaggataaaaatgctcacgcttaatgtttctttctgtcttcatttttttaatgaaggctcccacgtcacatggcacttatattcaataaattttatgttttccctttgttaatttgtctcttttcagtctaatttacaaggccccggacaacctaagagcatagaaggaaaggagttttcccttccctctactcatgacagtatagcctgagggagggctccctctccagagttctgagtctggcagcttcctgaagatctgggaaggaaatgctgaaaggaatatttctggaataagcatctgtgatttaaggaagccacctgggataatggacatagcactagtctagtgtcagaactgagattcccatccagccttggtttccaggtagctgtgtagtcttggtaggcatttaacgaccatgggtcttcctctcttatgtaaatgaaagaattcctagaagagaacacacaaatggctaagggacattaagataaaagggaaaaaaactaaaccttccacataaacaaaggaagtgcaaattaaaacagtgtcagatacatttcacttgggagatgaataaagattaaaggggcaatgttgaatgtgaggaaggctggtgagggtggaaattggtaccagctttccagaaagcatgcatatcaagagcctcagagtaagttctcacccttcagctttacaattccacatctggaaatcaatcaaaagacataaactagagaaacagaccgatttatacttaaggatttttttatcacaatctttgacatagtaactacttcaatgtagcagtgagatgattatagcaactatagtacacccatctagtggctataatgcacaaattaaaagcacaattgcaaggaatgtttagtaatacagaaaatgcttacaatagaacattatgttaataaaaagggatactacacaactctttgggggtattgaaaaggatattttttttctatatgtttctgtgtttttgtcctttaattaatgagcatgcctttctttcatattttaaaaaaagttattttcagaaaaagcaaatacattgataaatgaactgaagaatatggcctcgatgatttctaaagtttctcctaaaatcatacattgtgtgatgtaggttatggattagaaaacattgtagagaagaggaagcagaatgttatagacagagtcaacacacattttattgatttaaatgtgagtcaacacacatttaattgatttaaaatagaattatgaagtggcctatttgacttgagacctttaacctgggcttgtagtgtaagcagttggaacatgaagatgctggtagacagggtatctctcttaattatttgctcttaaagcagcagctacttcctttagagaacattgtttctagtgaaacattaacttctggaatagtatctattgctgtctggaaccataaaggaagttgttaaatttcctgcatactataggaataaaactttagggctagtgaagtgattgcaaagagtataaggttttggtgtgatgtgaagcagtgtatatataacagtagtggttaagggcaagggttttggagttggacaaaaccaggctctaattgcgatgacaaggtcaagctgatgacattgggcaagttacttaacctctttatgtctcattttccaaatctataaaatcattatctacctcctaaaaccatagtagggattaaacaatataatatatgtaaagtatcttgaagaaaacctactatatagtaaacacgtataaatgttggttttggccagacgtggtggctcacacctgtaatcccagcactttgggaggctgaggagggcggatcacttgaggtcaagagtttgacaccagcttggccaacatggtgaaaccctgtctctactaaaaatatgaaaattagctgggcatggtggcgagcacctgtagtcccagctactatggaggctgagacaggaggatcccttaaatctaggaggtggaggttgcagtgagctgagattgtgccactgcactccattatgtcacttaaatcactgtatatttatgtatgaaattaaaataataatagaactaattaggtttgttgtgaaaaataaacgaaaagatgcataggaagaatgtagcccagtgcttctgtatagtaagtgaaagcacattaataagcaaagtagaaaggaaggaatttgcacataggggagactaaaaattgtttattaaagaaaaaaaaatcttagaagtcacaggctctttctcatgattttattatccctgtctgagaacattcactctgaaaatcttgtgtttggcaagatcacgaagactttccatctttgtacagtaattgaacaattaaagctcgataagaggttatgggcttcttgaaagagaagaatctgctttacagttgtgtcttcccagtgctgctttgtagtatgggcccaccaaagaaatggcatgagattgtcaggatacaggggaaagggcacttggccagaatgcccgaggcttgtttctcccacagctctgctctcctgctgggacctcaggcaagtcacttcgaatgtttactttttattgcctatataacctcagggagttgtaaggtcagtaggtgccatggctctgaagtcttgataaagactatctaagtcttgatttcctcaattaaaacacaaagaagagaaccactttctctaagtttagacagctggttgttccctgaggacacagttctgatttccagttcattgccccttgatgaatcaatttatggcacatgtgatttggatgcaattcagttgtcctgtggataactatattcacctaaaagtttatgcttaaaactttaaatttgatttatattaataactttggaaattcatttgtatgaaaattttgatgatttaaaaaaatacatcataaaaagtcaattgatagcttcttttttttttttttttttttttttgaaacaaggtctcactgtctcacttcactttgtcactcaggctgcagtgtcactctgtgcaacctcgatctccaggctcaggtgatcctcccatctcagtctccccagtggctgggaccacaggcatgtgccagcacaccaacctaatttaaaatttttttttgtaggagtggggtttcaccatattgcccaggctggtcttgacctcctgggctcaagtcatccaccttccttggcctcccaaaatgttgggattaaaggagtgagccaccgcccctgtacattctattgataacttctaagtttagcttctgactagcattttaaagattataatgtggagtagaagtcagaaaatcttcattggctttcttcaccatcttgttgaggatttcaaaaatctcttccgtttgggtgggttcatcctgaagtggctattttcagttaaaatgccatttctctgttagcgtattttatttctttttccttttttttttttttttttttttttgagtcggagtctcactctgtcaccaggctggagtgcagtggcacgatctcggcttactgcaacctccgcctccagggttcaagcgattctcctgcctcagcctcccgagtagctgggatttacaggcgtgtgccatcatgcccaattcatttttgtatttttagtagagacagggtttcaccatgttggccagaatggtctcaatctcttgacctcgtgatccgcccaccttggtctcccaaagtgctgggattacaggcgtgagccaccgcacacagcagtttatttcttaaatgactttagggtacttgtaagacctaaagttgtgaaaaagttgttctcatagaagtagagagtagaaggtggttaccaggggctggggaggagggaggactggggaggtgctgatcaaaggatacaaaatttcagttagtccaaaggaaggagatgtattgtacaacatgactactatagttaacagcattgtattgtatagttgaaaattgctaagagagtagattttaaatgttctcctcataaaaagaagatatgtaaggtaatagatatgttagttatttgatttagctatttcacattgtatatgtatatcaaaacatcatgacacaacagtgtatgtatatattgcaaaacagctaaattaagtcattaacctggtggctcacacctgtaatcccagaactttgggaggctaagatggaagaatagcttgagaccaggagttcaagaccagcctgggcaacattgtgagactcccatccctatgaaaattaaaaaacaattagccagatgtggtggtgcatgcctgtagtcccaggtacctgggaggctggagctgaggcttgcttgagcccaggaattggaggctgcagtcagctatcatcgcaccactgcatgctagcctgggcgacagggtgaaacccctgtctctaaaacaaacaaaaatcatgttgtacatcataaatatacacaattttatttttcaattaaaaataagtaaaaacgaacaataaataattgtgtgagtcaaggggtaataactgcaagcctggggaagacaaaaatgttccattgcttatgtcatctttagtcaaatggtgataactacctagatcactaatgagaagagttttgggccacatatgaattctgcaaaaagcaaagaaaataaaaagcaatgatggggaggccgaggcgggtggatcacgagctcaggagatcgagaccattctggctaacacggtgaaaccccatctctagtaaaaatacaaaaaattagccgggcgcggtggcgggcagctgtagtcccagccactcggggggctgaggcaggagaatggcgtgaacccgggaggcggagcttgcagtgagccgagatcgcaccactgcactccagcctgggcgacagagcgagactccgtctcaaaaaaaaaaaaaaaaaaaaaaaaaaagctatgatgaattattgatatcttgataactatgctgggcataggagggggaaggcacttgccttgtgttgggtagctaccattgcaaaattccagagaggaagaatagtaaatattattttcatcaaggcacgtcattaccattgaccgttaagaatttccattgcattgagagctgtacagctgagatccattttttttcttgttgtgcacagattatctcaaattagtgacaggagtatcatgtttatatcaacatgaagaatacatgctcatatagttaagctgaatgtgtaattatgaaataaatactagctcacatttcccctccaccaattatgttactaaattattttcttctgttcaaaaaatttcccaaaaagtttggttgaagaaatctttatgaattttcataagaattcaaaacagcgtgttttttcacatttcagaaagaattttcacacagctttattggcgtttattggcttatacagatatactgtacttagaatacatgattaccatgtaaagaaaaaaggcaatggtgggaaaatggtcagggagagcagaactgatttgcagtcatgtcaggaggatttcgaaatgttaagaaacagctgagccacacaagcaagccaagacaggatttgtttcttgttttttttctttttttcttttttcttttttgagatggagtctcgctctgtcgcccaggctggagtgcagtggcgcgatcttggctcactgcaacctccgcctcccaagttcaagagattctcctgcctcagcctcccaagtagctgggaatatgggcacccaccaccacgcccggctgatttttgtatttttagtagaggcagggtttcgccgtgttagtcaggctgggctcgaactcctgacctcaggtgatccgcctgcctgggcctcccaaagcgccaggatttgtttcaaggatttgaatcaagtccgaggtggctaaaagtcagtttacaagctcccttggggaatatggccaggtgccctttctacttccacttctagctgcccccaataattctgccgaccctgagggtgcccatactagcaatcagagcaagctgtggacagatggattctgaggctctgacttagccctatgctgggactaagaaaataaaattctcaagatgtgctaggcttcccattagagtgttgtttttcatgtagaagttggctgtcactggacatagtaattttgtgtcagagacaagacagttattaccgtctcattttgaggtgttaaaagacccatcatcactgtgaaatcttgtttgcttcagaattttgctttgctttgctgttgttctgtttttcttctggccctttctcggtctgctcgtctgaattcttttctctttcccctcccatgccaccttcttgaagccaaaaataagagcagtattttccatggaatgtccacatacttggtgtttcccaacaccaagagaaaaatacaagagcaaaattagaatgcaaataaaaccaaacaaagcataccctttttgatctttattgcttctaattctgcagccttcagtctaggctcagttgattgaaggatgagttttgtttgattttgaatttggaaattgttactcttgtacttttcccccctcctaactgtgttgcttcaggttgtttttgaaatatcaaaatttagttttttaatatgtattctgttgtaagactatgagaaagaaaaaattagaatgtaaataaaacagactctatttgacatttattgaacctaattttgccaccttgccaccttcatccaggcccaattccttctactctgtttttcctgagaaagctttactttcttgtctctttgatatattttgtaataataatgttaacatttgtatgggggtttgtaattaagaaaatatttccacatagattattggtctgacaggggaactttggaggcaagatgggtgattccttttttttttttttttgagatggagtctcgctctgctgccctggctggagtgcagtggcatgatctcagctcattgcaacctctgcctcccaggttcaggcgattctcctgcttcagcctcccatttttgaaagaggaaagtatgttcataaaaatcaggattagaatccatggccaggtgcagtggttcacacctgtaatcccagcactttgggagctgaggcgggcagatcacttgaggtcaggagtttgagaccagcctggccaacatggtgaaaccccatctctactaaaaataatacaaaaattagccaggcgtagtggcgggcacctgtaatcccagctgctagggaggctgaggcaggagaattgcttgaacccaggaggttgcagtaagccaaggctgtgctactgcactgcagcctgggtgacagaacaagaatccatctcaaaaaaaaaaaaaagataagaagaaaattaaaaaaataataatcgggattagaatccagatattcaaaattcaagtctattctttcaacagcattgtggtgcagggagccataagaatagatatctcctctcttctcttgtctcttcctggcagataaacattaggatcttggactttgaccttatctctcagttaagggtttactatgatataattagagaatgaactattgtcccatatgctgttaggtaggaagttaaatctttagctgattagtgactaaacaaaattaatacaaaaacttgaagaagaagtgattattaaaggtatagttaagttcagtcatgagtcacacacacacacacaaaataataacagtgagttaaataggaaagaagtttacattctctcctgtgtaaaattctggatgaatggactggtatggtggttctgctttgcaaatggcccagagacccagggtccttctagctcacagctccaccaacctatgccatagcctcattttttcatgtgcaaggcagcaccttccatcttggcaacaagatggagggaagcataaagaaaaagggagaagaggcacaccgtaactacctcttaaaggaggtttctcagagacaccatgtgactgctcttcttcaattccattggccagaatctgatcacatagccgcagatagctacaagagagactgtgaaatatagtctttgttctgggtgactatatacctagttaaaatttttatttctatggaggaaggtgaggttggatgttgtgggacaaatagacattcctgtcagagatagatattggaagagagttactaagttatcataagtgaaacgaaggaaacatttgctatattattttaacaatctatctgagaggagcttatttggcattctaaattgtttacatgaaatagaagattttgatcaagttgttccattttggtccacattgcctttcttaagtcagtgctaaaccaaaacatatttgaattcattaaacacaaatttgtaaaatatggcaaagcctccaagatagctttttttttcctgttgagattgacttattcctatttatacccagattggctgtaaaagtgtgggatagtaactgagctatgatcaattacaaaaggtaaggggtgtggctggtctagagacaggctgaccagtgatacacaacatgtacaaagaccaggaaattgactctgaatcaaagtcttcgttttatgtgcctttgcataatacaagatatccgtggggtttcaaaggagatttgtttcagctgttggctgagtgggcggcaggagaagagaattccaggacaacatacatatgcctgcctctgccaaggactgttcttgcagagcctgaaacacactgctgaccaaccatttggagataactgttgggtgaaatcccaccggtgcctttgtattttgctgcattcttcagtttcatttggaattaataggtggattgccacactgagaagaaagatatatctgccctttgtataccttgatgggctggtaccagggaactaattatattggtgactttcttcaatttattttcggttaagcaacataattacatgatgacatatttacctctgagataggattgctttgcgctggctgtcagaagatgcatctttaatgagttagtatgttttgtccataaaaaatttgttcataaaaatgtttattttcaagttatctacatatatttaaaaagcctttaaacacaataagatttgtttcaaagtttctgtttatgtcaacacacatgcaattttacatgaatctcatatgtaatttttgtacttttttttttttttttttttgagacagtctcactctgttacccaggctggagtgcagtggcacgatctcggcccactgcaccctttgcctcccgggttcaagtgattctcctgcctcagtttcctgagtagctgggattacagatgcatgccaccaggccctgctaacttttgtatttttagtagagacagggttttgacatgttggccaggctggtctcgaactcctgacttcaggtgatccacccgcctcggcttcccaaagtgctgggattacaggcatgagccactgcacctgacctgttgttgcattttttaattgcatgctcttcttttcctttttttaaaaaaatattgctgtttgagtctgctcaggctgctataacagaaataccgtagacagggtggcttaaagaatagaactttattcctcacagttctgaaggttgggaagtccaagatcacctcttcctggtttgcagagggaaaccctcttgttgtaagcctcacatggccggagagagagtgctgtaatcttttcatcctcttgtaagaatcccatcatgaggactctaccctcatgaccttatgtaaacctaacgcctccacaaggccctacctcctaatcccatcacattggaaatcagggcttcaacatataaatttggtgaggggacacaaacatctagacatagcacccccctcatctttcttcagtctatctatactatattgcccctatcatattgtacctaccaacaacctaatgcttgtctgtccatatttttctccatgcccatttaattacatgttaatacaacacatgtctccatctacatgtatgcatatacatagatgcagcctttagagttgctttaccgaatggaagcatgcttttctccattttattttttctgactccacaataccttgtagaaatcccgtcaaattgaatgatttatctctaattcaaattctaaaagttacattccattccatggtataagtatatctacgctatttaaccatccccttcttgacatttactttgcttgcagtttccactatggacactgctgcaatcaacattcttgttcatgtattcttgtagacgttgcttttatctctgttggatagattctcagtgttgtgtggcaataatgaaacaaacagtgatggattttgatttttacctcacttcttctttcggtgtttgactggaggtgctgcctgggaaagactagttggccaatcatcaggaagtctcatggtgtggcattttccagagtcaagaatctcaacctcctcaacctcagtgttatgggcacagaaaatggactttttccatatatcccaggatgatgtgcctttttgtgacagattctcagtaacggaattcacgtggcatcttgatccatggctaatggtgcccgcttatgatgccagttcttttttttttttttttgagacggaatcttgctcttgtcacccaggctggagtacagtggtgcaatcttggcttactgcaacctccgcctcccaggttcaagtcgttctcctgcctcagcctcctaagtagctcagattacaggcgcctgccacgatgcctggctaattttcatatttttagtagagacaggggtttcaccgtgatggccaggctgttctcgaactcctgacctcaggtgatctgcctgcctcggcctccccaagtactggaattgcaggtatgagccaccgtgcttggcctttttgtttttgttttttctttttagatataataatattcctgggttaaactataatcagtataagggaatttaaggcattgttttctccaatttattcacttagttaacaaatatttattgatatatcaggcattgttctagacactagggttaaatccatgagtaaaaaatatagaaattaacatcttcgtgagggacatggcagtgactaatattaggttggtacaaaagtaattgtggttttttgccattgaaagtaatggtgaaaaccacaattactgttgcaacaacctaatataaaggatcaaatgcattatattaggtggttagaaagcactaaggttaaaaactaagcaggaaagtggtaaagaatgctaggagatgagactgacataattctaatggggttgttaggtgtgaccacactgcaagtgtgacatttgatgggaacttgagagtagagaggtggagggagggatatctgggggaagaacgttcaagtcagagacaacagaagtgagaggctttagtgggggagagaggagggaggaatggatcttgatttgtttgaggaaaagcaaagatattagagtggctgggacagggtcagcaaagggaagacaaacaggagatgagctgagagagagaagagggaaacagatcacatactgtcttctagatcatcaccagggcttcacctttattctaagatgagacactactggaagttttgagcagagcagtgacatggtataagtaacatttaatcaaaatactgactgtgatgccgagaaatgcctagaggaaaggcaggagtagaagtagggagatcaaataggatgctattgcaatcatccagcagagacttggtggtggcttggaccgggggatcacaatggaggtagtaagaagtagctggattctggatatgttttgaaggaagagtgtattaactttttatttttgtgtaacaaatcactataaactttgtggcttaaaacaatacaaatttatctcacaatttcccttggtctggggtcagattatggcttagctgggttctctgctttaggttgccaccaggctgcagtcaagatgttgacggccttcattcttatccaggggcttgacttaggaagaagccacttccaagctcattcagggtgttggcaggattcatttccttgtgacagtagaatccatggaggcttgcttcttcatgttcagcaggagagcccctggttccagtctgccgagagagtctcctgtataacaaaatgtaatcataggagtgacacccatcacctttgttcaattctgttggttggaagtgttacagattctgctggcactcaaggggaaggaacttttggatactaggagactggaattatttggggggtcacctaagatctgtctaccataaagaaacaacaagattttttgtctagatttagaatgtgtgatgaagaaaggaacaactgaaaagttggagttgctgttaattaaggtaaggaagactgagggagggaagattgagagctcaattttggcttcataaagtgtgagatgtcttttatacaccacccagagatgataagcagacagttgcatgtgcaaatctagagttaagcaagagggtccaggctagaggtgtaagtttgaggtccattagcacataggtggtatttaaggccaaggaatgagatcactaaggaatgagtgtagatacaaaacaggtcctacaactggactctagggtcccagcattaaagagtcagggagtctagaaagaaccaggtaaggagacaaagtgggatagagtgagataagaggactgcaggagtgtggagtccttgcagcctccatgtgttaattagtttaaatctcagaaagcaaagattcccccttacctcccagttttgggagacatctacctatcttcttgcctctcctctccctgaatgtgctgttgcgttagatgccaaatgtgaatggaaaaaatattgtatcttgtcaaagttcaacaaccatattaaaggggaggcagccaagatggctgaataggaacagctccagtctatagctcctagcgtgagcgatgcagaagacgggtgatttctgtatttccatctgaggtaccgggttcatctcactagggagtgccagacagtgggcgcaggacagtgggtgcagcgcactgtgcttgagccgaagcagggtgaggcattgcctcacttgggaagcgcaagggatcagggagttccctttcctagtcaaagaaaggggtgacagacggcacctggaagattgggtcactcccaccctcatactgtgcttttccgacgggcttaaaacatggcgcaccaggagattatatcctgcacctggctcagagggtcctacgcccacggagtctcactgattgctagcacagcagtctaagatcaaactgcaaggcggcagcgaggctgggggaggggcgcccgccattgcccaggcttgcttaggtaaacaaagcagccaggaagctcgaactgcgtggagcccaccacagctcaaggagacctgcctgcctctgtaggctccacctctgggggcagggcacagaaaaacaaaaagacagcagtaacctctgcagacttaaatgtccctgtctgacagctttgaagagagcagtggttctcccagcacgcagctggagatctgagaatgggcagactgcctcctcaagtgggtccctgacccctgacccccgagcagcctaactgggaggcaccccccagtaggggcagactgacacctcacacggccgggtactcctctgagacaaaacttccagaggaacgatcagacagcagcatttgcggttcacgaaaatccgctgttctgcagccactgctgtggatacccaggcaaacagggtctagagtggacctctagcaaactccagcagacctgcagctgagggtcctgtctgttagaaggaaaactaacaaacagaaaggacatccacaccaaaaacccatctgtaaatcaccatcatcaaagaccaaaagtagataaaaccacaaagatggggaaaaaacagagcagaaaaactggaaactctaaaaagcagagcgcctctcctcctccaaaggaatgcagttcctcaccagcaacggaacaaagctggatggagaatgactttgacgagttgagagaagaaggcttcagacgatcaaactacttagagctacaggaggaaattcaaaccaaaggcaaagaagttaaaaactttaaaaaaaatttagacgaatgtgtaactagaataaccaatacagagaagtgcttaaaggcactgatggagctgaaagccaaggctcgagaactacgtgaagaatgcagaagcctcaggagccgatgcgatcaactggaagaaagggtatcagtgatggaggatgaaatgaatgaaatgaagtgagaagggaagtttagagaaaaaagaataaaaggaaatgaacaaagcctccaagaaatatgggactatgtgaaaagaccaaatctacgtctgattggtgtacctgaaagtgatgagtgatggggagaatggaaccaagttggaaaacactctgcaagatattatccaggaaaacttccccaatctagcaaggcaggccaacattcagattcaggaaataaagagaacaccacaaagatactcctcgagaagagcaactccaagacacgtaattgtcagattcaccaaagttgacatgaaggaaaaaatgttaagggcagccagagagaaaggtcgggttatccacaaagggaagcccatcagactaacagcggatctctcggcagaaactctacaagccagaagagagtgggggccaatattcaagattcttaaagaaaagaattttcaacccagaatttcatatccagccaaactaagcatcataagtgaaggagaaataaaacactttacagacaagcaaatgctgagagattttgtcaccaccaggcctgccctaaaagagctcctgaaggaagcactaaatatggaaaggaacaaccggtaccagccactgcaaaatcatgccaaattgtgaagatcatcaagactaggaagaaactgcatcaactaatgagcaaaataaccagctaaaatcataatgacaggatcaaattcacatataacaatattaagtttaaatgtcaatggactaaatgctccaattaaaagacacagactggcaaattggataaagagtcaagaaccatcagtgtgctgtattcaggaaacccatctcatgtgcagagacacacataggctcaaaataaaaggatggaggaagatctaccaagcaaatggaaaacaaaaaaaggcaggggttgcaatcctagtctctgataaaacagactttaaaccaacaaagatcaaaagagacaaagaaggccattacataatggtaaagggatcaattcaacaagaagagctaactatcctaaatatatatgcacccaatacaggagcacccagattcataaagcaagtcctgagtgacctacaaagagacttagactcccacacaataataatgggagactttaacaccccactgtcaacattagacagatcaacgagacaaaagttaacaagggtacccaggaattgaactcacctctgcaccaagcagacctaataggcatctgcagaaccctccaccccaaatcaacagaatatacatttttttcagcaccacaccacacctattccaaaattgaccacatagttggaagtaaagctcttctcagcaaatgtaaaagaacagagatgataacaaactgtccctcagaccacagtgcaatgaaactagaactcaggattaagaaactcactcaaaaccactcaactacatggaaactgaacaacctgctcctgaatgactactgggtacataacgaaatgaaggcagaaataaagatgttctttgaaaccaacgagaacaaagacaaaacataccagaatctctgggacacattcaaaacagtgtgtacagggaaatttatagcactaaatgcccacaagagaaagcaggaaagatccaaaattgacaccctaacatcacaatttaaagaactagaaaagcaagagcaaacaaattcaaaagctagcagaaggcaagaaataactaaaatcagagcagaactgaaggaaatagagacacaaaaaacccttcaaaaaattaatgaatccaggatctggtttttttgaaaggatcaacaaaattgatagacccctagcaagactaatgaagaaaagagagaagaatcaaatatatgcaataaaaaatgatattgtggatatcaccaccgatcccacagaaatacaaactaccatcagagaatactgcaaacacctctacacaaataaactagaaaatatcgaagaaatggataaattcctcgacacatacaccctccgaagactaaaccaggaagaagttgaatctctgaatagaccaataacaggctctgaaattgtggcaataatcaatagcttaccaaccaaaaagagtccaggacctgatggattcacagccgaattctaccagaggtacaaggaggagctggtaccattccttctgaaactattccaatcaatagaaaaagagggaatcctccctaactcattttatgaggccagcatcatcctgataccaaagcctggcagagacacaaccaaaaaagagaattttagaccaatatccttgatgaacattgatacaaaaatcctcaataagatactggcaaaccgaatccagcagcacatcaaaaagcttatccaccatgatcaagtgggcttcatccctgggatgcaaggctggttcaatatacgcaaatcaataaatgtaatccagcatataaacagaaccaaagacaaaaaccacatgattatctcaatagatgcagaaaaggcctttgacaaaattcaacagcccttcatgctaaaaactctcaataaattaggtattgatgggacatatctcaaaataataaaagctatctatgacaaacccacagccaatatcatactgaatgggcaaaaactggaagcattccctttgaaaactggcacaggacagggatgccctctctcaccactcctattcaacatagtgttggaagttctggccagggcaattaggcaggagaaggaaataaagggtattcaattaggaaaagaggaagtcaaattgtccctgtttgcagatgacatgattgtatatctagaaaaccccattgtctcagtccaaaatctccttaagctgataagcaacttcagcaaagtctcaggatacaaaatcaatatacaaaaatcacaagcattcttatacaccaataaaagacaaacagaaagccaagtcatgagtgaagtcccattcacagttgcttcaaagaggataaaatgcctaggcatccaacttacaagggacctgaaggacctcttcaaggagaactacaaaccactgctcaatgaaataaaagaggatacaaagaaatggaagaacattccatgctcatgggtaggaagaatcaatatcgtgaaaatggccatactgcccaaggtaatttatagattcaatgccatacccatcaagctaccaatgattttcttcacagaattggaaaaaactactttaaagttcatatggaaccaaaaaagagcccgcattgccaagtcaatcctaagccaaaagaacaaagctggagacatcacgctacctgacttcaaactatacaacaaggctacagtaaccaaaacagcatggtactggtaccaaaacagagatatagatcaatggaacagcacagagccctcagaaataatgccgcatgtctacaaagatctatctgatctttgacaaacctgacaaaaacaagcaatggggaaaggattccctatttaatgaatggtgctgagaaaactggctagccatatgtacaaagctgaaactggatcccgtccttacacctcatacaaaaattaattcaagatggattaaagacttaaatgttagacctaaaaccgtaaaaaccgtaaaaaccgtagaagaaaacctaggtattaccattcaggacataggcatgggcaaggacttcatgtctaaaacaccaaaagcaatggaaacaaaagacaaaattgacaaatgggatctaattaaactaaagagcttctgcacagcaaaagaaactaccatcagagtgaacaggcaacctatacaatgggagaaaattttcgcaacctactcatttgacaaaggctaatatccagaatctacaatgaactcaaacaaatttacaagaaaaaaacaaacaaccccatcaaaaagtgggcgaaggatatgaacagacacttctcaaaagaagacatttatgcagccaaataacacatgaaaaaatgctcaccatcactggccatcggagaaatgcaaatcaaaaccacaatgagataccatctcacaccagttagaatggcaatcactaaaaagtcaggaaacaacaggtgctggagaggatgtggagaaataggaaaacttttacactgttggtaggactgtaaactagttcaaccattgtggaagtcagtgtggtgattcttcagggatctagaactagaaataccatttgacccagccatcccattactgggtatatacccaaagaactataaatcatgctgctataaagacacatgcacacgtatgtttattgcagctccattcacaatagcaaagacttggaaccaacccaaatgtccagccatgatagactggattaagaaaatgtggcacatatacaccatggaatactatgcagccataaaaaatgatgagttcatgtcctttgtagggacatggatgaaattggaaatcatcattctcagtaaactatcgcaggaacaaaaaaccaaacaccgcatattctcactcataggtgggaattgaacaatgagaacacatggacacaggaaggggaacatcacactctggggactgttgtggggtcgggggaggggggagggatagcattaggagatatacctaatgctaagtgacgagttaatgggtgcagcacaccagcatggcacatgtctacatatgtaactaacctgcacattgtgcacatgtaccctaaaacttaaagtataataataataaaatgaattaaaataaaaaaaagaaaccatattaaattgatagcctttctaagggtattttttctattgataaaaggatacactgattatgtaacaggaatattaccaagtgtgtgacatttacattttgcagagcataataaaaggcattttaaatttaagaaaaaaaacaaagacaacagcaacaaaaaacaaaacaaccagatgtgcattcttgcccaaataagccaacctaagtcagcttgattgtggacaatagagtcagttggagtgtgagaacagttttactctgggactgataccataaaaaacaggctgctctgtaaagtgtacacccctcaggtatcaggtgacacaagtcaggcactgcctcaaaagtgaaaggttgcaaacagtgacaagggaatggaaatagattagatgtggataatggaggcatttgttcttctacaaccttctgacaaacattcattttggtatctactggttatgcacagaaatttattgaaattattaacatggaaggcctttctttgggcataacaaaccactatttgttcacctaattatactgggaatttagggatatatttcagtgcattttactttagataaaatcttttcatttcttatggaacacagagaaatcatcatgaaattctaagtggataaagtggaaacaaagactctatttgtgcaagttgagtacatgggaatgtaattagcattgtagatagtataaatacgcatgtccatatgctgtgtcattagctgtgcgtgctgaagctatgtcacctcattcgtagtccctttcacacataaacagaaacttgaatgttcacttagaaaaaagcatattttctgtaattaccactcaaatgtttcttaggtgtcttcattgcccagcaaagtcagaagtgtgcccagtgtgataaatcattaaacttctttcttatccaagtagcactgatttagaatgaatcatgttttcaaacaatgtgttaataatcctatcagctctctgaaaaaaattagattataatcctcatttaacaaatgaggaaagggaagcaaagagtttgacaactgtctatgaactcagtgaacaaaagccacacttgttggcaataaggctggctgtttcctcctggaccacacagttgacatcccggttgggatatgtcaagtccggaagcggtatgtcaagtccggaagcaggagctataagcagggtaatgaaatggctgctttgcctttcagatgggtctagaggtcaagttagtttatttgtttttaatttagctgaactcataggctggttgaaagatccctttgttggtagcgatcttttgaatagccacataaaccttttggtctctctctcgctttactccaaccccttctcccatttgcaggattagaaaagcacttgggaagcccattaatcttgccggcgttgtcaggagtgatcagcgagttttattaaaagccctgggattgcctgaaaggcccccttgtctgactttgaaatgaaaggggcatgttaagatctcggggcacattgtcaggacccctcaccctgccccttggactatgagctgaccctccaggaggaagcacagaagccctcctttgttaaagggatttcgccggtggacagagaagagttgggccctgtcagcatgaactctctgagttggggggctgcgaatgccgtgctgctgctgctcctcctggcctgggccagccccaccttcatcagcatcaaccgcggggtgagggtgatgaagggccactctgccttcctgtcaggagatgacctgaagtttgccatccctaaagagaaagatgcctgcaaagtggaagttgtgatgaatgagccaataacccagagggttgggaaactcactccacaggtaggtcctatctgcgattttctgttcagtcgtgtgtatgaatgcaagtgtatgaaaatgtgtggggggacagagaacagatgtaaaatgtctcccctcaagccatcaaagacgagtattagaagatgttcacatttgaaatggtggacttgcaattagtaggcatagtattgcgctgcttttctatgtgaggtgaaacctatttttaaacattcttggctgacttcagattacaagcctgaaaccagcaggatttaatcctgattataataacatttatagaggaaatcaggttcaaactaatatggatgcatgtaatttttttcttaataatgcactgtttcagtaagtctttccaatttctcctctttcctgaagataactctggtatatctcaccagctgcttgaccttatagagtagctaattatacaggaaaaagcgcaaagcatcatgtaagagaattacattggagttattcctgccccgagttatcacatccattgccagtcagagtggctttggataagagatcaagatttcaagacatttttaggacatacctgtgaccttagcatagcaaaggtaaaacttgaagatgtttcatctattaacatcacttaaacattttttctgagtaagggaaaagaagtagaaaagagatgtgaagatacttcactttaaatattcactgttctttgaaattatctgcttaatttttttccttttaatcaaaatcttggagacctttatatttaagggtattctattgtcaatcttcttgtagagtgaagagttacctcctaattcattgggtttaaaaagtctatattctctaacactgtttttgcttaaagtaggagttaccactatacataattttaaaaaattgcttctgattttattacttgttcccactgtcctgtaactttgctcccagtgcaaacaatcttgagaatattcaacactagatgctgctgctgcttctggaaaaatggaccattctcttttgctgaactatgaactttatttccttttcatttggctaaagaaaactaatccacgaggttattgaaaagtggtactaggtattacagagagagaaaaaaagacttagatggatactagctcaactggtgtctctagacactccatttaccacacttcaagttatagacccattctgaaacacatcagaattctttggaagagggtctcactttgcaggtatttctgatgtggtagtaaccaaatgtctctgcctagttgcttgtaagattttatcgtcagtcaaagagctttagatgggtatctaaaacatgttagaattcaacaatggctccacatattagccattgtattcccaagtgtttggtagttgcagtgtctcctcagttactcccaattatacttgcattctgaatgtgttttgattggcacttacgagtcagggaaaaagaagatacctgggattgctcatactagaaccccaatgtgctacataggatgaggaagcaatacaaataagctcaggagtgggtgatagagacccaactacagggactggggtcgaaaggaaaatgcaggctggttgcagtagcttacgcctgtaattccagtactttgggtggctgaggcgggtggatcacttgagtccaggagttagagaccagcctggtcaacatggtgaaactccatctctactaaaaatacaaaaattagccaggcgtagtggcacatacctgtaagcctagctactcgggaggctgagacacaagaatcgcttgaacccgggaggcggaagttgcagtgagccaagatagtgccactacactccagcctgggtgatagtgtgagactctgtctgaaaaaaaaaagaaaggaaaatgcagcctgtagagttttgagagagggtaaaataggacacctgatcctagaggactggggtgtttgataaagcaggaacccagggctgtactggcacatatgggtgtcttataaagactggtgattgataatatggtacctcttccaatcaatatatttttaaaaatcattcaacatttatttagaagtgggcctgagtatattgtgaaaaagagaagaaggaaaattcccactggtagctcgcaggagcaagctgtctaagctgtcttccagtttggacctcaagcatgcatgcccaactgagcaaaacaaaagccctgcagatgaccagattctccttagtaggcaatttggagataatctattgttacctaagccagcctctgagagctctcctctccctacctcaaatggcctatgactccttaccgtatatggcagtctctctgagagaaataaaattgtccccattatatatctttagtgatgttttaatggtcctgattgcttggcctgctccaaggcactgaggagcaaaaagggatccaagtgactagaactaggtaaaaaacatttgttcacaagaatcaaggattggaataggcctgcaagtcatctccatctcacactctctgattttaaggtaaaactccagttactagaaagacagtatagaggagaaaccacaaattgccttggttgctgagaaacacctctgaatatactgattccctagcctgctattgctcattaagaaaaagtagaatcaagtcatgaatacttagtgtatgtatttccagaggcaaatatgacatctcaaatggatttatagcctctaaagtcggtatgggatttatatcttctaatatttattctgtggtaaaggagttcattaaaatatggagtttcagtactttttttggccaaatattaaaactgtgtgtgagagaaatctatatcatgggagaactttgtttctcaaactgccaggtgattgttcctatttgttattctcataatttcaacaaaaacaagattcctaagtctgttttgttttgttgaatttgtgcttggtttttaacgcaggctggttcagtccttccctaggggttcgttccttatggagttttagaaattaagcatagctaagtgcatgtgcacacacacacacacacacacacacacacacacacacagcctaaacattattctttaatagagcttagtaataagctgaaagccaagcttatgtgaacccatttctagcaagacgactgtattaacaacaccctgctgtgtaatgaacagtttcatgtgacttgcacagaaaatgttttgtttaacatctgttcaattagtgttttcatttcattactgaagtttgtcttaggatcaacaggttcattttcctgttgaatatttggaaagggatttcagttgatgcacaccagtgccttctgttcagataaccctcttgatatagtcaattagatgaggttgatggcaatatgttttcctcatgttttaggacaagactccctcacacatggcacttctcacacctagcccaaagcaagaaatttgctgggtggaaagcaccccaggttagcactaaacttgcttttttgaataggaaatatagcggtaagaaagtatctctactttgaaccattttactgtcattaaagtgagtaatgagctaggaatgtgtgacaatttaattataaattgtaattgaaaagcagttgaagtggaaaaaaacaaagctagacagtaattagaaaaggatttagctctcctttgttttagttagtaaatttatggacaattatggttgtcgccttttataaaaggaaaacatattatgaaacataaaacagatgtttcttttaacaaagcagactgtctctttattaccatgactatttgtcaatgatatggggaaggtctttgctttatctccttcctagttgtcaatttaaaagaggaatcaatgatatctgcgggaaaagaaaatcgtttgtattagtggtaaagtcttctctgagtgaattatgttgtctgaaaatgtttgaggctgtgaaaaggtacagacgaaacaccacgaacacaatggtggacatgcgtgcatacctcaagggtattagaactctaccagagtcagattgggcagaatgaagggcatgatatgggtgggagagatgattcttcctctaaaaatcaggttcccaaaatataacagttaacaatctcctaataattctgagtgagttgagacagttcattataattttatttgaatagaggaaattgcttttagatttctgtttttctcatctgccatttctgctattgcctaactaatgaaagcagttttttgcaagtatgcaagacacaactctgggtcatgttaggctctgattaaccacagtagtgtccatagtcagtggcttcatctttgaatatgagaatactattcggaaaaaaaaagaaatgaaaggagaacacagatatacagaaagaatacagtgtgtttgtgggtgggttaaagcatgccttttcatgcagacacacagaaagaactctctaactcaattgctgtgaacccctgaaaggggtaaataaaatttcgaaaaatgaaagtatgttttaaatgcactctaggtggtaaaaagacacttatttagagacgtaatcatcccttaactaattttcttgaactgctttggttttcacaacttagatattctcaaaacaagagacagctgtataagtaggatggtgactgggtatgggggtagggtagaggtggtggtggtgaagacacacacactcacacacatacacacattactaacagagcatattttctccaggcagtgctctcctggcaaaatgttaaatcttgtaccaattttctcatagatatttatccaattcttcatgtgaactaggtctttgactgccatttccttcccaacgaagtcaagtatgttcacaatggttgtccaattcttgatgaagacacagtgaagctcagactttacaggtaagcggcacgggaacatcgctcatttgctgccaagtaaccattctgtgttcttatgagggcttttcttgtggatatgtattgtcatgaggggagttaatagattccagacaagaaagtaatcaacagaaactggaggcctgagtggatcaggcaagatttgtagccaactttcagttatttccacttgtgtcatcttccctaggattcttctgtggcaaatttttagccgtatcctgtttccctctagtgtccttatataggtatctctggtgttccaacccaccacttatggtagaaaatggaaattataaactacaaattcttaatgaaaatcagggagaaaatatattccaaaaatgaatgaaattcttcttttttgttaccagctgtttagttacagaaagtgcaatatcttccatttttaaacatattaaatatttaaaattcctttttttttttttttttgagacggagtcttgctctgtcacccaggctggagtgcagtggcgcaatctcggctcactgcaacctctgtctcccaggttcaagctattctcctgcctcagcctcctgagtagctgggactacaggcgcccaccactacgcccggctaatttgttgtatttttagtagaggtagggtttcaccgtgttagccaggatggtcttgatctcctgaccacatgatctgcctgtctccgcctcccaaagtgctgggattacagggatgtgccaccatgactggcctaaaattctttaaaaatcaactatggagttaaacatggaatgaccgtaggagacagcagttcttctcctacgcatatatataagaaaaatgaaaacttatgttttacataagaacttgcacttaaagttcaatgcaacattattcataacagccaaaaaatggaataaatccaactgatgaatggataaacaatatgtggtatattcatggaatggaatatcattcagccataaaaaaacaacgaagcactgataaaggctacagcatgaatgaaccttgaaaacattatgccaagtaaaagaagccaggcacaaagtgtcacatattgtattgttccatttgtatgaaatgtctagaactggcaaattcacagagacggagagtagattagtggttgccagaggctggggaagggaaatatgtctcttttggggttgatgaaagtcttctggaattaggtagtcatgatggttgtacaaccttgggactacactaaaaaactctgagttgtatatttttaaaagatgaactttgtggtatatgaattatatcccagtgaaaattaattttaaatttaagctcacgattatggtatatctgacttcataaaagtcactgagaactgatgtatgtggagtaggcctttatagggttttttatttggtttttattgcttttaagaatatttggttagatatgttggtgtgaatttcctttaagcattagactaatgtaaaagacttttgtacaagacattggaacagtgaaccattctacaaacatttatgaccacctattacaggccaggctgtacgttgagcataatcaacaaaaggatgagaatacacagattattttagtgcttgtagtctaaggcaaaagatgagcaggtaattatgatgcagaacaagcgccaaaagagagtcacaaaatgctgtgttgagaaaatgaagcggcactcaaggattccttaggaagatatgaaatcagcatacagggccatttgatctttctaagactttagagttaaaaaacaaataacttcaaagaacttgcgcggagcgggtgggaagggtagtggggagttgcagggaacatggggatggttaatgagtacaaacagtagttagaatgggtaagacctagtatttgatagcacaacagggtgactaccgtcagtaacaattcaatggcacattttaaaataactataagattataattggattgtttgtaacaaaaaggttaagagggccaggcgcagtggctcatgcctctaatcccagcactttgggaggctaaggtgggcagatcacctgaggtcaggagtttgagaccagcctggtcaacatggcaaaaccccatctctactaaaaatacaaaaattagctgggagtggtggcaggcacctgtagtcccagctattcgggaggctaaggcaggagaatctcttgaacctgggaggcagaggttgcggtgagccgagattacagcactgcactccagcctgggcaacagagtgagactctgtctcaaaaaaaaaaaaaaaaaaaaaggataaatgcttgagggaatgctcaataaatggataccccatttattaagatgggattattacacattgcttgcctgtatgaaagtatctcatgtaccccattacatatatatgtgtacatatatgtatatacgtgtatatatgtgtatatatgtatatatatgtgtatatatgtatatatgtgtatatatgtatatatgtgtatatatgtatatatgtatatatgtatatatgtgtatatgtgtatatatgtatatatgtgtgtatatatgtgtatatatgtgtatatatgtatatgtgtgtatatatgtatatatgtgtatatatgtacatacatgtgtatatacgtatatatgtgtatatatgtatatatgtgtatatatgtatatatatgtgtatatatgtttatatatatgtgtatatatgtatatatgtatatgtgtatatatgtatatatgtatatatgtatatatgtatatatgtgtatatatgtatatatgtgtatatatatgtatatatgtgtatatatgtatatatgtgtatatatgtgtatatgtgtatatgtgtgtatatgtgtatatatgtgtatatgtgtatatgtgtatatatgtatatatgtgtatatatacgtatatatatgtgtatatatacgtatatatgtatatatacgtatatatgtatatatgtgtatatatgtatatatgtgtatatatgtatatatgtatatatgtgtatatatgtgcatatatatgtgcatatatatgtgtatatatgtgtatatatgtgtatatatgtgtgtatatatgtgtgtatatatgtgtatatatgtgtgtatatatgtatatatgtgtatatatgtatacatgtgtatatatgtgtatatatatgtgtgtatatatgtgtatatatgtatatatatgtgtatatatatgtgtatatatatgtgtgtatatatatgtgtatatatatacatacctactacgtacccacaaaattaaaagtaaaaataaatttaaaaaagaaaaaaagctgatgaatgcttgcttcttctactccttccttgggtttctaggctgctgggaggctggaagagtatacatgaaatgcagggttagaggagcttcttcccctcttggtcttcagcacatttgaaataaaatattcaggggagtaggcagcagaaaacagggagcatgtttgttcccctcttactgcttctccttctccagcccctttggcaagctacctgagcccgttatgcctgagtttcttcctccataaaatgggattaacaatgtctggatatcctaggtttttataaggattatgttatatactatcatagagaatttagcataatgcctgggccataataagagcacatcaattagaagctgcattattgatgcatgcatatcactcattaatcttctcccttcaaaaaaaatgacacccctctattttagactcttcaaacaacctgagattaaagttgctaagtggatggagggaatggaagtggcaattgctgaatatgctttttacatgccaagcactgagctgggcacccaaactaggctgcaaatgaccacctatgtagtggtatttctgaagggcaaaaaggcctgaatgcttcagaaaccactcaccccttcactcctgaattaaaagtcaatccagaaattatataggcttgagactcttaaattacacatgtgctagaagtgagactctgagatctcagcagtcattaaatatccacgtgcatgatgagtttgagagcaggtgttgaaagaaagatgttgggaggaagaagtggcaggaaaaggtgttgacaccagggtaaagagatgaagggaaaagaacagagaggctgggagtagagcaagaaatgaaatccaaactcaatctgtggcacaaatttggtgaaggccaatctttagtcttccagctgagtacatgggtatcagaaatacctgagcaccaattaatattgcttttgccctgtgttctccacagatttactgaaagagataccttcatagaaacttttatcctgtgggtctatctcctggaaccagactgtaacatcatccatatgagtaacaatgtgctggaggtgcctgaattcaatggcttgtcccaagcgattgataaaaatctgctcagattcgattatgataggatggctagcctggaatgtaccgtcagcctggacactgcgagaactcggctgccagcccatggccagatggttctcggggagcctcgaccagaagaacctcgtggagatcagccacacagttttttcccagagtcccgtatgatgtcttttaatgcctttctgggtattaccaaaactgacaaaaatatccatgcatgctcaccttccaccatgatgaagagttctagttaactagtcattttagctggctgaacagtgtcagttagtggttaagagcacagactttacaatcagaaagacctggttttgagaacttcatctgttctttattttctgtgtaattttagttattaacctgtctaagcctctctaaaatgagaaaggaaaatagctgccctgtagggttgggtaaggataagagtaaatgaggttatacatacacacagtacttaacacagtgtctggctcacagtaggtactcattgtcagctgttattagtaatagcaacagtagtagttggtgcatttatggagtattattggattatgagcaaatttgaagtaaagctagtgggtagcagtgatagacgaaattaggaagagtttatgggtaacattccttctgctattcactcaatcaacctattttgggcacctcctgttctctctagaaactatgagaagccaagaaatataagggataatcatagcaatagtagtaatactttgaattttggacagaatgacagttaacggcacatttgttctattttgtacgtctgagaaatgagactccaaaaaaaaaaaaaaaaagtgggtggctgggcatggtggctcacacctataatcccagcactttgggaggctgaggcaggaagactgcttgaggccagggtttcaagaccagtctgggcaacctagcaagacctcatctgtacaatttttttttaatttgaaagtggcttatgagtattatatactaaacaagagtggaaatacatttggttagagatgtgaagactgttggagagacaattatggttttcagtgagaaagagcatgttggttcaggtggtcaaagaatgtttaagggaaggcttagtaaaaagaccaggtggacctggaaggatacgcaggatttgagtgcgtgatagccacatggggaggggatttcagtgagtagacagcctagtagagattgtatgatagagacatggaagctgattctgtaaaggaaagactggagctagactgtggaaggcctgcagtgagtcactggtctatttgtcagagatgttcaagcctcagacaacatattttattattttttctctcagtttaacttttggtgggtgagggcacgatgagacaactggtcaaccgtttttcagtaaaggaaactacaagctttcagaataatgacaacccactcagtgaatgattggaaggtacatgagtgttcctgaggcagtgagagggaataagtattcatgggacggagtactggtttctaaattttacaattgttatgtttaagtgactctcttaatccagtgctgtacattctagaactgagagcaaaactgaagtgtccaggtgggagctgtaccccaggattaaagaaaataggaagcctcaaagtgagctgtgaggagttcctgctgatgggccttcgttatcagcatctggatcccccttcacccaacattgattatatctccatccaactggacctcacagataccaggagcaaaattgtgtacaaggtagagtttggggttatgtgtgggtgcccccaggattcacagtaagagagccagttacacaggcttactcatgctcgcccccatgccagggagagttcctgtgcttttgggggtaaaactgccagcgactcattggaactgcaggcttgttggttctgctagtaagtgcttaaaacagtaggttttgtataaaatttcccttctctggttctcttctaggtccaccatcagtacagcaacttgggaaggactggggctagttacgtgctaaccttcttcctcctttactcccaatactcttcagcttgtcatttgaccttttataacaccttctctttgatgcttccttttgtccttcttgaaatcagggggtccactctgcaaggtcacaggaaactagggggagggaggagaatctcagtcccatggttatgtttgtcacagatttgtcactcttccaggctttgggatgaagggctagctcatcaaggagacaggctcccaaagacctcctgcgtcttccaatctcttttaattctcttgtttttctcctattgatctctatatattgaaataatgacagaaagtggattccatttatttgaaatatttaacatgcagtgctgctgattcatgaactctataatttgtttattggggaaaccggggaaactgcacctgctgaaacagctgagatttttttttttttttttttttgagacggagtctcgctctgtcgcccaggctggagtgcagtagcgcaataatgtcggctcactgcaagctctgcctcccaagttcatgccactctcctgcctcagcctcccgagtagctgggactacaggcgcctgccaccacgcccggccaattttttgtatttttagtagagaaggggtttcaccgtgttagccaggatggtctcaatctcctgacctcgtgatccacctgcctcaccctcccaaagtgaaacagctgagattttgtgctgaggaaagatgatccaagatgatgtttggaaatacttctatctttcacaatctggcttctcactgggatttctcctaaggggcccagtcaaatattgaacattattaccccaaggaattgatatgacaaggaatcataaagaaatgataaaacaaaatcatagaattaagatctggaaaaaaactgtgaggcagactagtcaaattgatcaggtaaatcacttgggtagcttttcaaggataaatttctgagtccaaataatagttaagagcatggacgctgggcccagattgcctgggttcaaacgtccacttaactaactgtgtgacttttggtctcattttcttcaacttaaagtgggtttatagtacctatttcttagagtaactgagaggattaaatgataaatacttattatgtgcttgacataaaacctggcacatagtagcactatgcatattgctggttttaaaagtcacccagtaaaaaactcattagccaggtttgcaaaaccaggctgggtttagctcaagcttcctattttatagtggtggccccgagaagtgacataccttgttcatacagacctaaacactaggtctatagacaactaatagatgttttctgtttgttttaacacaaaactcctttcacttttaatgatttattatatccattgaaaaaaaattggagccatttttctttttgatcaaattttctcatttttttcttactatattgaatacgcctttatttgtttatattttaaaatctgttttattgggagtttatccctttaccttcttgctttgtttatcattaacctattccatagcttatttggcatgtcataaaacagattcatttatgaatataaaagtaataggctcactgcagagaatattaaaaaaaacacagaaagcaagataagaagaaaataaatatagctgtatttttaccatttttacatacacacacatgtgcatgagtgcatgccagagttggttttgttttatggaatcgcatttatactatatgtgaagttttgtatcttgttcttttgttatttttatggttgtacagtcaattctcatcaagtgaccaaatgatccttcactcataatttcttctagatttttaaaggtcttcttccttacatttgcctttttaatctacctcaaatacaattttattatatgatgaaatacaaggaacagttttttccaaatagcccaaattttcaacactattcattgaacaattaacttgtttcccattgattttagatgatcttctattgtatataaggatataacgtatacaatttcaaggctagctcttttatttcttagatttacctacttattctttgtcagtctcatattattctaaacataataggcctataattttcttacagacaggttcttccttatcacttctcttcaaaattttcatggccattatcacctagacttagttccaaataaatataattaaatcatttatgttagtttaaaaaaaagcccctaaggatttttatcagtatccaattagaactataaattatttggggaaaattagaataatggaacatttacaatattaagtcttttcatccagaaatgaagtatctcactttattgaacaaaggttcttttataggtttctgtaaagttcgtagtttccttcatgtaaggtgagcatacttattaagtccagtcctaggcactttgtttttgtgaacctatggtgaatagaatatttttctcccattatatcttctcaatggttattgatgataaacagaaaagctatttttggaataattttcttttatctggcttctttcctgaattcaattattttaagaagttctcaattctttgggcttttaaagaccataattatatctttcactagtgatgataattttgttctttcttttcctgtaattattcttcttatttttgctctattccccactggtttgagaagaacaatattaaatataatgttatttgtaagaatctttgtcttatattttttacttttatcaactgcccacattgaattcatctttgaaattatgtggtctctctgctttttccattaatgatcaatttgtatcacccttttccttttaatctttctatgtaattttaagtgcctttcttgtaaggtacatataattggacatttttgttgaatttcagactatttgtcttgaataaggaaatataaactttatatttgtggtagtaatagatacacttttttctatcatgttttatgctttcttgctaattaaaaaaatttgtcttgcaaaataaatgatgttttctttgcctttatcttatttgacaattccttatcacagttgatgttttatttggacttaattctaaacttaaaaatattcttaagcctatatttgtaatatgtacggtgaaaaaatgaagtgagctctcttggctccttcctatgtatgatgataactgatccaattgatcctttctcctggcaattgctttgtttatataatttgcaatttcagttctagcatatgattgttatactttattacaagcagtaagctctttcatcatttgtatccactttattaacatgtttaaaataacgtacttatttagacttgactctagactcaattggtcttagcattaagcaccagtccttctaaatcacaatttacccctcttgagttttctaattatgcatcttcaaataatacttcttcccagtgacacacgaagattagatactctaaaccctgggacatctcagtatcgttcacctgccttcatcaaccatgcagtgggaagggaaggggttgattgtcttctcctctattcctctcttgcaattctcttttctctgggcattgctggttagtttcttaattttcagactggtggcaggggtggttttggggaatgggagagagggatcttatttgatcaggcattgatgacatatgatttcatgctctctgagcctggtagatgtctcaagctgcatctttgtcttagggacaaatttatggtttctctggagagtcccattcattgatctatcactcatagctctcttaagaggattatttctaacctgagtgatcacttgcaatttctcctgcagctcctaggatttgattctatctccagcattttcctactggatttttgtcctctcaagagtgcactctgaagttcagggtccaggagatcccagaccagccctctgcccactaggcccttaactggaaacatttatatgtcccttgttgccacaaacaagaacagactgattttggcacagccatcattttttttgcttccagccagttagcttcctcagatatgagccctgcatcagctctctgtgtgtgtttcaactgcaagaaacacattttaagggacaggagatatggcattgctctgctcttcctgctccgtgccaatgtttggtgttgaaggtcaggaaagtgactgaacacaacgcagcaaagcactcctctctcctaatcaatctttttcttacctttctcaatctttttatattcttatatgggcaagaaagttctggagtctggaattagttccagacaacttgctttgtaaattctgcatattttactacctgtcttacattcagttgcacatctaatctcttttattggaactttagcattctgttatacacagattacaactcctagcccaatggcaagtgttcagcagtatgggactaatgtgaatttggtaactgagcctggttctctcagcaatgggctagatcaaatcctgtgagaactagcatctacagctatgaggattcttttcttttctttacaaagtctcactctcttgcccaggctgaagtactgtggcatgatcatagctcaccataacttcaaactcctgggctcaagtgatcttcctgcttcagccactcgagtaattggctataggtgtgcaccaccatgcctgtctaattttattatttttactttttttgtagagatagggtctcgttctgttgcctaggctggtctcaaactcctggcatcaagcaatcctcccacctcggcctcccagagtgctgggattgcaggcgtgagctaccacacctcaccctgtgaggattctttctgcccatagcacttgttgagatcttagatcttgtggcacaatttcatggtttctttggagggtctcttgctcatagtgctctcattttgggaggatgcatgcctagcctcagtggccacttgcaatccccaatgcccaacccttgcttgaagatccagggtcttaactagctagacaaccaagcaactattcttcatttgcatgagaaccaaatcataaagacatatttccttcatccttctcctgccccctttaaaactacatgacaggaggtgaggaaggcggctggaggaggttgttggtgagtgccagattgctaagtgcctactttggctatttcatttgtcctcacttaattcttggtagtctagtattaatattttcatttacagctggaaagaaaatgagactgaagagttaagtaacttgtctaaaatcacacaaattaaaagtgttggagatagaatgataaacacagttccttctgatgccaaagtaggtgctcccttcttcacctggctgcatgtaagagtcaccagggagctcgagaaatactggttttctggtcccctttttggaacaattaaacaagaacctctggagacagatcctaggtaccagcatgtgtttaaagctccccaggtgattccaatatgcagccaggcttcaggtcactgctagacgctaggctgtggctgtattaaatattatgctattagccctgtatgatatcacctcattcatattatttcctcctttatattttctctatccttcaaaagtcagagagtgcgtggctgcctgtctatatcagagctggaattccgaatcagattccaaaggctgcattcatggccgtgtttattctggaagtggatcagttcatcctgacctccttgactacatcagttctggactgtgaagaagatgagacccctaaacccttgctggtgttcaacattactaaagccccgctccagggctatgtgactcacctgttggatcacaccagaccaatctcctcattcacctggaaagatctcagtgacatgcagatcgcctatcagccaccaaacagcagccattctgagaggagacatgatgaggtaagaaggagagacaaagcttccagcctagttagaagtcacagggttatttaagaaccccctaccctaaaccctcaggttcctttgtacattcattgcctcagaaaagaatcaatcactgtaaatcaggatgcacactcactgcccagaggagccaggcaggtggggtcaatgagcaaaccccactgaggggcactgtggcaaactgaagaaagagccatcccctcaggaagcagctgccactcagctcatgcccaccactgccctgcaaggatacaagtgtgcccactgttgctgtagcactcatgtgccaagagaaattggaaaatgatacatttttggtaaaatgcttaaattcttgaatatagaaaacaattaaaacttgtagtgaaacgtattgtgctagctaccaaatatttctgagggccacatttgacccagggctcaccagtttgagaactgcagcagccttcgacagccttcctgaatcacagagaccattgaagttagagatgacttttgtttacaattcttttatttttaacaaaatttttttggtgtgtttaagttctggggtacatgtgcaggatgtgcaggtgtgttacataggtaaacatgtccatggtggtttgctgtacctatcaacccatcacccaggtagtaagcccagcatgcattagctattttttctgatgttctctctccctccacccccaaccccgacaggccccagtgtgtgttgttcacccaaaatatggaacactttccgaatttgtgtgtcatccttgtgcaggggctatgctaatcttctctgtagcattccaattttagtatatgtgctgccaaggtgagcacacaattcttttattaataaattcttttattctttttttttgtgagagctttttatgggaatccttaattttaattaataacacggactcaggataggacattccgtagtcttatttgataactaatttcacagtgaaacacagtccatcgggaaggtcctacttctatctaatttccttttgctgcaggttccacctctctcctctgttttgtagttagtgggaggggaggacagctggttaaagtcttccacataatagtgcttcacatgcttaaagaactaccagcaacttgattcaaacagggtggaaattgtaaacgagcagactgatagagacttgagctcaggtttattaaggaaaatgatcgtccctggggttatctctattgtaatttcggcattttcagcatgtagcctcaagggaagacaaaggacttcaggctataaacgctatgctttgccttctgcttttatttcccccttttcatcatagtctgtggccccccatgccttccctgttaggaagtaatttctcattgcacatccaatcttagagcactgcttttctggcctcttcctgtgtgtagtttctggcattgtataatgtactcttaaagcagaacctgtgcgaatgtgtgatttttttcgttagacagtaactctcaattttttcagtggagatcacacagttttcaggttgtgtggactggaagccctgggccagggcccaaccgaatgcattacccctccaaaaaagacacctcctgcccatgtagtttcctgttcagtctgttgctttggcagccttgaatcagtttcttttgttatttagtgtttgctgatatagtgctgtttgattatttatcttatcctcttccatggaccacatgttcttcaaaagtagggagtatgccttgcatttctgtgttatacctcattcttctctgtcaacatctggtgcaatacatacacagcacataataaagatcaaaacttatcacgcagcccctacttacttattagttatgaatttcatgaaagcaaataaagttgagatatttaaaaatatgtctagtgaaatacatgtctctagatcagggtttcttgatagtagcagtacgacaattgccattttgtatcagataattctttgtttgggaggttgtcctgtgtacggtaggatgttagtatcctggcctctacccactcgatgacaatagcattttcccacacaccgacttctgaaattaaaaatgcctccagacattcccaaaagtcctgtagtgggacaacatcacccctagttgaaaaccacttctctagatcctccacctttgagaaagatttaagtgactgaatgtgggaaggggttggtctcctaagcaagtgcagagacacttctccagcatattaccaattttagattaataaattcttttatgtagaagaaaatttaaaaataccgttaaagtaaggaacaagatctagaacctgaaaaagtcaaatcaggatgtctaaatgagatgtgggaactgcagaaatgtgaatccccgcagaaaactgaatccactgtgtgtgggtataacccagaattaatgctactttaccctgtaacgcttcagtgtgtggctcctttgcctctgtttgtttacaggtagaattggaggtatacgacttcttctttgaaaggagtgcacctatgacagtccacatctccatcagaacagcagatacaaatgccccccgtgtatcctggaatacaggtaaagctcaatataaggcatagagcaacatagccctgaagggaatacaagaaagtagatgggtcaggaaagaaaggtagttttattcctatgtcatacatgtggcaactgaaacccagacagattaagggcatcacatagtagcttttgttgttgtttttttattcctcctggcagcgtgagaaatttaaatccaggatttctgcgtcctgaggccaagttctttcctctgccggagataagacaaagggacacttttcaactgaatgaagcaaaaaactgactatttgtgatattgagctgtagtgggactgaaatctccaactcaaattgttccaagggattggagaaaggtttagcttttataatctatagtctatttttatgttgggctgcatggaaactaaaatatgtaaataagagctttaactgctttaaaatatggctttctatgcctctcaattctgagtggacttatgtgatatatatatgtatatgttgatcagatgtaaatgtggaatgtaaatggagatcttttccttctcactgatcccatcaataccatttgaaacatacttataagcagtggtggtagatagtattaaggaaaaaatatctgtgtctgatttaaatcctcaggtggcagcttaaacgagctgcctcgtgtgtgtacacatagatatgtgtttgtatgtgtgtgagtttcagcagagatagagaacatcaggtgagcagccttgatttataattctggctatacatcctactgtacctctgtcaagggggtaatgagagaaaagatggaatcagtaacctaaagtttaggaataatcacatgttgcatgggctcctgcctgagtgtagagatggaatagtctgtacgtgtatgtgtgatcggtgacacccaggtttgctcaatgtcattttggctgctttgaacatcagaatcccttttaaaataaatgtttgcttattatgaacttgatctgtgccatcgttgaaatttggagaatgcatctaaaattattatttcgccgtgaagatataaccaatgttaatattttgctgtatatatttctaggcttctcgattgttcctctgctgtgctccgtgatgccttgtcctatgcactcctggcttccaaacccttattgccagtcacagagattcttcttatgcacttctgtccatttcttctccctcccaccctccctccctccctccctccctccctcccttccttccttccttccttccttccttctttttctctctccctctcctttatatatgtattagcccaatttccctagaaaacagaccccgaggcagatcagatgtactaaccctatactaaaagcaagagtaaggggagaagcaaataaaaacgcatggctgagctggtgtcacagctttacaataagataaagcagattgctctgcagtgttgatgtctccagggagaagatgcaactgctgtgtctggtaagagttggaagtggggttgggaaaaggtcaacaatctattaatggtcagttatttcccatctcctgtgtttaatgggttaaagtttacttcactggctgttaactccccacatgcccagattgtgttatctggcccctcttagcagccattgcacacacttcctgggtcccctggtgcagggcctgatcagccacaaggttggtcctgccgccactagagggcagtggaggtagccggctgcatcagaagatgaggcagtggtggcaggagggctttacaattttggagactgggaaccctcatggggcggctgcagctagagaacagtcagttggtcgaggccgggatggcaggtgaagctggcagatgtgagagaagcataagataagtccagcagcacgctaccttgcaattcgaccagcttgctctgctccctttcaggattatctgtaatctgttgtaatattggagttaatagtactaaaaataaaaatagtactaaaaataaaagctacattccagtttcttgaaaagcttttatagatgcaatattcagatggtttcatgagtggaaattcactcatcttttcttaagcaggcacgttggcatgtcatagaacttgccaatacccttttcttatctttttttaaaaaatttaagttctggggtatatgtgctgaacgtgtaggtttgttacataggtatacatgtgccatggtggtttgctgcatctatcaacctgtcatctaggttttaagcccctcatgcattagatatttgtcctaatgctctttctcccctttcccctctacccccgaacaggctctggtgtgtgatgttcccctccctgtgtccatgtgttctcattgttcagctcccacttatgagtgagagcatgtggtgtttggttttctgttcctgtgttagtttgctgaggatgatggtttccagtttcatccatgtccctgcaaagggcatgaactcattattttttatggctgcatagtattccatggtgtatatgtgcctcattttctttatccagtctatgataccaacacccttttctcctttctttcataggtctgagtctccttgaggggcagtctcgagccatcacttgggaacagtttcaggttgtcgacaatgacgacattggtgctgtccggctagtcaccgttggtggcctgcagcatggatggctgactttaagaggtgaatgatccaacttggtaacctagcaaagaatccaaaagtattttcttcaaaagtagatatatttaacagatatatgtagcatctcttgggcccaatttctcaatgaaattgtcaaatgcagaaaatctggagatcttgaaatcattgacttttgtgttcaaatgctcagatcaatgtctaaccatttatgaatggtaccttgtacgtggctcattgtttaaacctcagttttgctttctggatgccatgcatggcttcttgtaagtatactccttaactagttatttttttcccagttggaggacagaatgttttttatttctctgcttcaaagaagtatattgaaaaattaggccgagcgcagtggctcacgcctgtaatcccaacattttgggaggccaaggtgggtggatcacctgaggtcaggagttcaagaccagcctgaccaatatggtaaaactccgtctctactgaaaatacaaaaattagccgggcatggtggcgggcgcctgtagtcccaactacttgggaggctgagacaggagaattgcttgaacctgggcggcagaggttgcagtgagccaagatcacgccactgcactccagcctgggtgacaaagcaagattccatctcaaaaaaaagaaaaaagaaaaagaaaaattaatgcttaattaatactttagtaataatgatgttatgttattagtagtagttgtcatggtttaaaagaaataaatttataattctatgggatgatagttaacaaggtaataatctaataaaagtaatatttacactttatgataaaataagtcattccttataatgaactcagaggatttaattcaattatcttcttagtttccctaactgtaatgcagaaagataactctcaccatcatttgtgagcagggaattctggaatcaaaaacaaaataataaatgtatgataaatcctcctgcttaatctcaggacagtgggaggccagtttaaatctgggtataccagtcaggttgggtgttcgcttgtatgtaagagaaatccaagtgtagtggcttgaaaattagttattttcttcatgtatttgaggcttgaagacccagaaggaacaatgaaagaagtcatgatctaagtttgctgtatctaacaagttttcctaggagcacaatacaacaatttccacttagatttctttatcaaactatgtcacatacaactcctcagtgcaagcaagtcgggaagcctgagtatttttaaatgaccatattgctatgccaaatacaactaggattctggtagtgaggaagaagcataaagtggatcttggtcaagacagtgttaaatcgtttattcctctaaggtctttaacacagccacgtggtgtgaagagaataatggggtgcacctgccattaagaattgtaagtctctggccgggcacagtggctcacacctgtaatcccagcactttgggaggccgagaccggcagatcacttgaggtcaggagttcaagaccagcctggccgacatggtgaaaccccatctctactaaaaacataaaaatagcccggcatggtggtgcgtgcctgtagccccagctactcaggaggctgaggcaagagaatcgtttgaacccgggaggtggaggttgcagtgagctgagatcacgccactgcactccagcctgggcgacagagggagactccgtctaaagaaaaaaaaaaaaaaaggaagagttgtaagtatctgaagaaaacaaagcaatgtttattaatactacagcaatgaaatggagagtgggagaccataatgcattgatggtctgggttcagaggagacacaaaatagtgtgatcatttattaagctttactttgtgacagacactgtagaaagcattctgtatactttaacttgttatctcatatcaactttatgatattagatactattattattcccattttacaaatgggtaacctgagacttagaacaactgatttatctaaggttgcacacctagaaaatggcagaactgggatttgaacccagactgttagatattagagctctagctcttggtctttgagccagtaattttcaaataggcttgataacactggttgttgcctccctcccacccacccctgaatttctgattcagcaggtccagggtaaggcttgagaatttgcatttctaaaactttccagatggtactgaggctgctggtttgagaccactcctctaagaactgctgccatgtaagatggtagcaattagctgaagaataaccaacatttattgtaggcttactgttgcttaagttctctcattcttgctgtggattatgaggtaagtatttgtattagtaagggttccctagagaaatgaaaccaacagaatgtctatctatgtatgtatgtatctatctgcctacctacctacctacctacctacctatctatctatgaggtgatttattctgggaattggcttatgtaattgcggaggctgagaggttccttgttaggctgttggagaaccaggaaagcccaggaagtcatgggtattagtctgaaggcccgagaaccagggaagctgatggtgtaacccagtccaaagccaaaggcttgagaagatgggcaaggggagtggagaggggtgagtggggtagggaaggtggagggtggaggcacaaatgagggtgttagaggatggctggtttatgttccagagttcaaaggcccaagagccaggagctccagtgtcagagggaagaagatggaaggaagtctcagctccagaagagacagagcattcccctttcctcttcctttttgttctattcagtctatcaatggattggatgatgcctgcccacaatgatgaatgtgatcttttctcagtctgctgattcgaatgctaatcacttcaagaaacactgcttcacagaaccacccagcaataatattttaccagttgtctgggcattccttagcccagttaagttgatggaaaaagttaaaaccatcacagtagtattatccatgttttatagatgagtttcataaattaaataccttgctcaaatctgcacaactgataaatgttggagccagtattcaaaactagatatgttctcccagaacccactaacaatctgtagtttttccaggtgagggaaatacgggctgcacactttccttagcagcctctactgtattgatgctttccccacagctgctgcttctgcactcccttgctcaatctgctccatctctgctctctccctcaggggggaaagggtttctcttcaccgtggctgacctccaggctggagttgttcgctatcatcatgatgacagcgactccaccaaagacttcgtggtcttccggatatttgatggccatcacagcatccgtcacaaattccccatcaacgtcttgcccaaagatgatagtcccccgttcctcataaccaatgttgtgattgaactggaggaggggcagaccatcctgatccagggatccatgctgcgagcttcagatgtggacgccagtgatgactacatcttcttcaatatcacaaagcctccacaggctggggagatcatgaagaagccagggccaggactgataggtaagttctgggcagttaagatcatttgaatggaattcactcttccatagagaaccttctatgcatccttctgggtttgctgaaattgtgtccgagtttgtcctaaggtgaacatcaagtttctgaagtaagatagtatttttattcccatttcataatgaggaagcctgagatttaggaaagttaatttgatctgtccaaggttgtgcatctacagatttccagagctgagcctcaaagtaaccattacactatgaaaaattaagtcagccgagcaaggtgatagaacaaattagtctaaaaggagattttttgactattctagattattgataatttcatgaataacatttgtttacattttgttagaatcattttgtaactacttcttaaagtaggtagatccggagtttgacaaaatagggatcaagtaagtagttagtgttactttgtatatttgaaataagagtaagtttcttgaaaatatttttctaatgctaatttttccatatatcaagacagatatagtgactttagttttcctgctttattatttattatttttctgctttattatttatctttgatgaaaacatttaatgcagattccttgggtacatagaatgtactagacagataagacttttgaagataagtccaatatcattgtccctcgatatttgataggcttgtacaaaagtatgtggtgttttatggacccaataggctatcctgtccatggcttccttcagagggatttgtttaatggaatcatttattatcgtcattttggtggagaaatctttgaagattcttttcaatttgtcctgtgggacagccatgaacctccaaatctttcagtgccacaggtaagagactgtttctgaacactttcccaaagtcttgtgcacaggtgtcaattctaggagatgtggttagaaaccacatgaaaataggtttcaaggtttaaaatttgaaaaacaatcgattaaacaaaattaagcagatttctttgcaataggactactcaaatgtttcctttttgaaagacttttatagatatctatgtattcagtgtttcaaggtcatttaactatgggacccttttatgtagagcaactcacaaaatttgcttgtctcccgacactcaagaaaacatttattttatatgtggtgattaaattataggctctagagttaggttgcatgagtttccctcttgatcttgacactgactgactggtcaacccatgctccagtttccttgtctgtaaaacagataataatagaaccttcctttagagttattgtgaaggtgagataatgcatataaagtactgagaacattttggttcatgggaaacactcaataaatacattagctattatttattgttgtctttaaagatctaagagtctcttctaccactagaggatataatttaaatgtgtagaatgcagaaagaagtttaagcaaacattgccatatagaaattacagaaagtggagtcagggtagtgtctggacaactataatagagtagactccttgaaaggagaggctggttgataatagagattttaaaaaaggacagctgaaattaagtaatcacctactgatatggtttggctgtgtccccacccaaatctcatcttgaattgtaactcccacaattcccacgtgtcatgggaggaacctggtgggaggtaattgaatcatgggggtgggtttttcctgtgctgttctcatgatagtgaataagtctcacgggatctgatggttttaaaaacgggtggtcccctgtacaagcttgcgcgctctctctctgcctgctgccatccatgtaagacgagacttgatcctttttgccttctgccatgattgtgagacctccccagccatgtggaactgtacatccattaaatctctttcttttgtaaattgcctagtctcaggtatgtctttatcagcagtgtgagaacaggctaataaacctactatgtacgtacattttgctaggcattttgtacctattatcttggaagatagcctgtatatggatccaagcaaatttccaacctgttctagaatgactgcttaaagcaagggtcctatttgtcacataatgccttcccataatgtcatagacactgacattagctaatgcatagatgattgagctattcatctgtgtgctaagaagagtataacagaaggagatgatcaggaagaatgattccagagagctcagaaatggaaggcaataggtaatccctattaagaaggaatagagaatgaatgagaaaactcagttcatctgctctttgactaacaggtcaattccttttcaaataacacctccctctttttatcaatgtattatatgtcatttctagattaagtttttgcttgaaaccttagtttatttgatagttcaaaaaggtaacagttaataggatttacttctaagtcttctgtgtatctatccaatctgagttatgtttctgactaggataccgtatcacttttagtggcctatgggcctttttaaaaatgaaaaattcaggacttcttttttcttctttcgttgttatatattttataaatcatgctcttcatatacacaagtatagatgtcagatttctctgtaatgaaaactttagtgcagcataattatttctgaatctgggcaaattggtcaaactaaactctgtagatctagttataagtttattccctgtgatggataggtttctaaagatgcttatcatgtttttctctgctttcatcttcttaatttatgttagaaagagaaagagaaggggacagagggagatctacaaatttgctctcttcattaccatatatctttggcccctaaatgtttatccagctcagatgtgtgtcctacctctctatctgacatctttacatgtatgtatcatcagcgttttaaacttatgaccaaaatacatctagcatgtgtccctaaaaacttgcacaaaataactagctggaatctctgaagtcatccctgactcctttctctaatgtcagcacaaccaatcagtcagcaggtttactaaatctgcttgacgagtttttctgatctatctctacctccccacctcactgccattgcttcagctccaaccttcatcttttctgggctagattatcctcaacccctcccatggccttttacaaatagaggtgattaaccaaatccttatagttgcgataaattaaaactcattaatatagtagcagtattcttagtgaaattaatctagcatctgtttttcccattctccctcttctggttggtggtaactttgtcttagtccctctccagactatggacttgctgtcagctctaacatcagctgttccaagaatcctctgacgaccccattccacaaaccctcaggcaggatcagcttgtccttttacatgctctggcatctgtttacacatatctttgttgttgaactttctgtaaagtaagaccactatttcttttattggatcagctctgatctccttgacagtagggacccggaattattcatttcaatgtttctagacctaggtatctgactcattgtagacccttacaaactgcttattgatcaccaaatgaattctggttctttcaacatttactgaaactaggaggaaataagacccaaacatttggtagggactagggagggagtgagatggggcggtaataagtgtaaagctttattcagagtttctagaaataagtgtgtgcatgccaatgaaacaagtattgtgtgtatgtgtgtgtgtgtgtgtgtgctggcaagcatttttatatttaaaactccgatatcagtgaaacttcaatatttgaggaactcaaatgattacctggtctgtttgatgtttacattctcaatttggacaagtatctagtcatgtcctacagataaaaatagatttaaaatattcaacaaaattcataactttcagctgctcaactagaagtccagataaaatgattacttgatggtagctttcgtgatcagaatattccatggttttgttttattttgacgttgtaatggaagtacagatgagcaatgccaattttgtctacaacaatggcattcagaatactcaatttgaaaatgatgagaattccttttgaaattgacacacacagcaaaactaaattatgattaagctttttctatgacataaaaaaggctagaacttcagctcagccacctacaagctgtgctccctggggcaaatcatttaacccctttggggctcaggtttttttctctgaacattgggaataataaccatggctattattagtgaagtgctatctggatcactcaagatagctagtagcacagtgagtactcagtacttagtaggtgctcaataaattaattccctgtctctatcctttcatgactgttgccaaagtttacagcatgtttatccattatgaagcatttcaataattaaaaattaaatccggttatcaaaataaacacaatggcagtcatttttctattctcctgcagtctgtgtcatgattttttccccccaattacagtgtttcgctaatctacaaagttcagaaattctctgtgggacttcccagccatagtgtggatcagtgaggctccacttaattggaaaactggatttaataaggaaacaatagttattgtgccttcaaagagaccattttccatgctaatttattctccaatgtgttctttgtgtaagaagaatgtacagcatgcttttttatacccctgtaataattcttagtgggcacatttgtgtgtgtgtgtgtgtatgtgtatgtgtgtgtgtgtgtggttttaaggagtggagagagtttaatatacaagacggggcaagaaggaagggagaagacagaaggaagaggctcccctgtacagagacagaggtgggaatggggctctaaagctgaaagaggaggtccccaagtatggtggacaccagccaggtatatatgcagaggctggaggaggtggtgtctgatttgcatagggctcaggaaataggtttgaccaggcatgtcattcatgtagcccgcgaaaaagctggtcctcccaccctagccttttaatatgcaaatgtgggcaccctgatttctacacatgtggggatatgtgggggcggccatgttgccaggagcatatgggccaagggcaagaaggccaagggaatcgccatgttgggtggacccagtttctaatggccggcatttgcatatcaaaggttgcccacctgactaagagctggggctttacaagaaacttttccggatatgctttaaaagacgaaaactacccaaggaccccttttcctctctatctgcataaaataatttctttttcttaataactcctaccacattcctccctgcggcaatatcacactaactgcagttagggggttttgggcgaagactctttctggctacttcctacttaaaaggggcgttgaatggggaacagcagttagggctcctcctgggattgatttaagggtcctcggaagaatggcatgtccacatgcggttcagtttgcagcaccatttggagtttgattgcttttaggcgagaagaaacaatttgagtcatagtactgaatatacaacgtccaaatatcaattcaagacatataagcaagagagggcttaataaaggggttaaccaattccagaaagaagactggaatttattaaagagggattgtagccgcccagggctgaagccggcattttccctgagcctgttaataattttgatttgatttttaagtacctgtagattttcctttcctttactaggtgttaatccaaaagcagcatgtttcatttaaaagtgcatcactaaatccaataaaaaatcctagcagacttagtgatagtaaaacttttacgctttctttttgtcagtaactattatcccagttataaggataataattaagcaaaatactacagcaatgaaaactctctgtccaatattttagtttgaaggtgctaccgtgtataaccctattgcaaatagtagagtgaggacagcaattcccacaagtgtggtgtggtagataatttccatctaaaattttacttgccaagatagagaactcccctttgggggtctatgaagttccttggttttattttcccaaacaaagaaagctcagagttatgggcaccttactcacttttcattacccggcagaagttgcaagataattgcccagaactagcatattgattcacattttgacgttacccgtcccttttttcttttttccaagctgcagatcaccagttgattcacaggaataagcagggttcgtctaaaacgtaggcaaaaagctgaaaaacaagagactaggatttaatgacaaatgtatgataagttttggagcaaaatttttctcttcagtcttcacttttggtaaaaagtaattatcagtaaactttagtcttatagttggcctgattatttgcataaagtgcagcaagaatggttatttttacataggccttttggattggctttgatgaaacgctgtttcacaaggaatttcaggtaagacttttaaagccgagcccagccatgggtttgtatcctctaatacctgtgagttgggtgatcctttcctcttgaggtcccaagataaactcatagcttccagacctattagaaagtgacattcttcactgaccacaggttaggaactgtatagacaaggtggtaggccagttctccctaaggggctttaattggctgtacatgtcgagcttgattccttaaagggagacacaccccttcagtcaaagccttgataaaataaccagttttccaactgtgtcctgttgacaaagaaaaattgattcttattgcactgatgcaaacaactgtattgccataagagtacttacagatagtctccaaattctagaggaatcaggcggagaaaaatgaacatgctccaaattttgtttacaggagtataccttactcaattattaaaggctgtaaatagtttaaaataagtttccttgactctgaaaaactaaacaaggatcagcaatattccaagcgaaagttaaaaagtttgctttaactttgtgagtgcagtccacttagttaaattttgttttgcttgatatttgtgaacatgtcagttttttaggagtcctgtagattctccctccatttcagtgttacaatcttcaaagctattacaaacctgcatttgagaacacctgttaaagtccttaatatagcttgattataaaccatcttttgagaaggaacaaagcaagacaacaattgtctgtgaatggcaacattcccaggatagttacagttaaaaacatgactggcaaagaactttatttatcttcgtggtttacaataactttacccttaattatgattgatagcacatacttaggcattagaattttagaaaacccatacaatttttgaacatatattagtgttcaccaaaatataacttaaaaaagattggacatcattttggcaatctcatgtgactaaatatgtcagataatcctgtttacctcttttctgaatgtttcaggggccctctgaaccattcaaaaagccaggcatcaggaaggataatttccagattgccataaattattttgccaaaatgatgactcaaaaggcaaaaacattttattagtctttactatgatatgaaaattcggtttaaagctaaattttacccttgcattagtttatttgttcaagtgaaaccttatagattattccattttatctttatcaatttgaccatgaggtgaaatttttacaaaccttttgtaacccttttactaaaggacagagtagtgtcttaagaccttcttgctatgcttttatttcaatgcttaatttaagaaaagaccatatagataccatgggagaagaaggtgtagtgcttctaccatgcacttcatttcaaggcaacccaaagccaattggcttattttgtaatcagcccatccctgatgggagtctcatccctcagtgtggggtggagatgttgccttattttccaggtggctaagagcgtgcttctctgatttataactactattagccatctcttacagtgtattttctacctagttattactcaccaaagctctctcataatgcgaagtaatttctgatactcccaaaactcaaaaccatcagataacacaatgcaaaacagaacagagcctttgattttgagagggataatttccttttaattcctggggttttatgaggaaaacagaggatcccccccaactgccccacaaaacggggtctgtggcacctcctctgtttttcccaaggagtcccatgctaccagaagttatcttagagcctttcaggcatgcattaagagtggtaagacaaaaaatggagaaaaataactcagttgactgagaagaaaagagcctttttccagaaaaacaacatccaaaaaaagaaaaacataaaggccttttaaatatacctctaacttgaatatccactcttaattaagctgagcactctttaagaaaatccttttaaatcccttgttacttgactttagctacaccaagcagtaaagattttcagcttttgaatgttacaaaaaagtaacctcacagatgaaatcaatgagccttaattaggttatgacttaaccatgagtgtgcaaggtattttcaaaggagtgataggcagcttttgaaactaccattacaaaattgtgactgagacagtgaaagagatccgacccaaacaactccattttatttttagcccctaagctctcctcgaccatccctgggtgtaggctgaaccgactttggaaggagcctggtttataggctgtagtctaaaacaaagatgataacagccgcttcccaagatatacttccctcttgcctggggaagaccaagaaactagccacaagattagaaaccatggcccaggagccatgcagctggaggctacaagattttgaccctccctaaaccactcttaagatcagtgcttaagatattttataaaccctgcccttgatggatcggctggcaccacccagagtgacaaactggcttatttgattttgtggcccttacccaggcactgacttagcacaagaagacagccaccacggtaaaatggcagagactaaaacaaagtattgccacatggttaccgattatgttcctaaggacatgaaacaagttggaggcccatagccaagtttgttactgaccgttctgctgggctggctggaacagcaggcctatggggtcctgggcctgcatcctaacctaagataccttttcttcggtagatccatacagaaagacacgcaaagcatacaagattgtttacagcttaagaccaaccttacaaatcctttttttattaattatacatttactgagaacataagcagtgatccttattacccctttttcaggtttgcacagggagagaagccaaaagcccaactggtgagaaatttttacccttttgccagcatatcaggcatcaggcttctgggttccctccccgctagctcaactctacatcaagcattttaaggtttggaaaattagtttttcccaggttggaagaacattataaaagagatagaagccattttaaactgcaaaagaaggaaaagcattgtagaaaggaattcaattagggttgttaagaggtattgcctctcttcctattgggaattgtgtttcccctgtttctttgccttccctattttttctcttcccttttggcctactataggagacatattgcttatctccaaaattctcttctgcgtgcagagctgcctgttttagctgcagtgagggtttgccaactctgtgtacggtcaaatacctaagttacattttggaaagcttctatatacctattagggtagttagaaaatcggcctaagtctgcctttacttgcctaaggtcctgcaatgagaagggaacttgaaggggccccaaataagggggaccctcagatgacttccctgaaagttacctttttaattttgggaaactgttttccctgggcctgcccaatatggctgcaaaagaaaataaaccactttttcttcaaagtttcaaggtcgaaggagtcccagtgcttcaaaatatgttccaggggagtgcatgttgaagacaatctgttacccatctagaaagagaagtgagaataaaagcgtcgttttcgtctccttcctttcggtatgtgatccaggatggagatgaaaacagtagagggcgtccccccagctattctctgtccgtcgctcttggattcccggcacccgcttaaatgtgccgcacatgacttgcaggcgtgaccctccgagccatggcgccagaggaactgagttttgggccttagtcactctgtccccaagcaatcagttctctgccttttatttccctttgacctcctagacttgcgtggcctgtgtgccttccaaaaaatagattccaagaaaaatcatgtaattgggcaaggcccctttaagggagggagcaagctagattgaactctgtatcctgctattatagcccaggctaaagcatttacccatagaaaaatggttctggttaacttccagaattaaaatacccttcctaattaagtactgtcttaataggagacaaaataggtgccttaaaggaatgtaggaaccaaatggccattttcctgccagtgggacaatatcgagattaaaatttggctgcagaagacgttttactcttaattgttaaaagcagaaactttccattcacagaagaggcctagagcctgatttctaccaggtggcttagaaataccatgtgctcgccagagaagtggtatcaagtaacctcgctgtaactttgttcctagactgtaaaaatctttgcacatttcatgcagagaaagagtaagaggctgcggacagaaagggaagaagagttttgcaacaggatagttgaggttctctgccaacacccagaatgggctgttggaggctgtgtccggtccagaggcctttgaatcacacctggccagaaattctcagttgcctcagaacttttcccagcctcacgtgatggcaaggtcaccagtgaaaagaagctacttcaagcatgaccaacattcccaatacctgtgggtaatggggggttctccaagttctccccagcaagccttatatccgtgacttgagtacggtagccaacaataagcgtatatactaggttgatggatgcctgttgagttatttgatttattttaatatagaggcgaagagtgcctcagaatgacagaacagattttaagcttgctcccacagtcgccactctgatgaaggaaggctgtacctcagattcctgtacctcaatgcaccaaagtgatatggcttcgatgagtgaaggaacaccaagggtcttggccctcatgccggtttagataaaacgacacggacacacgtggagtggttttaaggagtggagcatttaataggcaagaaggaagggagaagacagaaggaagaagctcccccatacagaaacagagcggggggagctccaaagccgaaagaggaggaggtcttccggtgggcacatttttttaacatgctttatgatggcctaagttgatatgtctttacatatttatgcatgttcaaacaattattattctgtgggtgagaaaagtcccattttaacaaactccattgagaaataaagtgttctcaatgtactgaaatctgattgtaacaaaagcattattaaacacccaatcccaggcaaacagtagaaaactagtgctcaaatcaattgctgggctcttgcttgctgccttcccccgtgtccctccagcctgcttatggctacagacttataaggaatcagaatatgaagtgataaatcagtacacaaaatgacaaaacctggccttggtcttcatattcaggctcacaatataatactccaccagctggtatctgactttcttgtgggaatgggttcttaatcctttctctgccctgattctttgatttctgctagctctttcttttgcatcttcccttgaaactatccagtgctatttctcacccccaggaactacttacactgttagttttgcccacccactttcttctctgacttgtggtaaatatgcaccccccaggtacctgttctctcctctgggcatgtttcatttctcccttccacttcacccatgtgcttttgtgtcaccttcttccattctttcctcgttttctggtcctctctctgcatctctcatctatccttatttttattctccctttttcttctaatattactctctcctggattaagatctcttaaggcttaaggtctataaagctgtctaccaagtagaatagagttggaaatgtttttcaaaagcaagttgagtgagtgaagctgtcttagtccattttgtactgctacaacagagtactacagactgggtaatttataaacaatagaaatttatttggctcatggttctggaggctgggaagtccaagatcaatgaactacatcttgtgagggccttcttatgacatcataatacagaggaaaacatcatgtggatgagaagagagcaagagcttgaacttgcagcctcaagcccttttataatgatcattaacccattcatgagggtggagccctcatgacctaaacaccattgggcccctcctctaaacactgttgcattggtgatgaagtttccaacatatgcttgttggaagacacattcagttcatatcagagactttatttgatgacagtcatggcaaccaagatagaaaaagttcatggagcaggctgtggaaaagacccatgatgccaggcaaagcaccattttcagacagtaattaatagcttttccacaaccaatgatggattattataaaagaaatgttataataaaagctgtttggcaagtcctccttaccctctagcatgataccaacctgtaagtgtagttttaagacttaaaatctcaaacaggacatgacttactcagtttgcaaacattaataaagtgcctcctacctacaaaaaaaattgtgctagatgttgtggagatacagagacgaatgtagtatttattgggcacctactatgtgccagacattttacctacatagtaatatttgatccttataacagctctgtgaggttgtattatgcttaacttactaataagaaaattgacactaaaaggttaagtaacttgtttaaggttaaatagctgctagtaagtggtatactcaggactataactgtaccgtcaaattccatgtggtttacaccatattgtaatgctggcctcatggaactttcagtctgggagagagactcatttgtaaactaacaatacaaaacattagaataagtatgctagttgagggatgtctaagtttgtttaatctgctataacgggataaatgactaatttagaaataatagaaatttatttccataaataaatttatacataaataagccataacattctaccccggcacctcccccgccccgccacaatttatgttcttctcccatacaaaatatactaattccatctcaacagcccccaaagtcttaactcatttcagcatcaatgcaaaaaaataaagtctaacatctcatttagtacatatttatgtactaaatcaggtatgggtgagactttaggtacagttcatcctgaaacaaatttcccctcgagctgtgagcacaataaaatcaaacaagttatatgcttctaaaatacaatggtgggacaggtataggatagacattcctcttccaagagggagaaataggaaagaagaaaggatccaaaactcaacagggcaaacaatattaagtcttgaggcttgtgaataatcttctttgactctgtgtcctgccttctggacatgctgaggctaggattgggcccccaaggccccaggcaattccacctttatggcttttctgggtacagcccaggcaacagctgtcagaggttggcgtcaggtgcctgaggctttcctggatggcgttgcacattggtggtctctggggtggccctgaccccatggctctgctgggcattgccctagtgggtactgtctgcagcagccctgcacctgaggcaactctctgcctgagtcccgaggctttctgaggcatctcttgaaatctaagtggaggcagctgtgttttcacagctcttgcactctgcacacaagcagagttggtatttgtgccaaggcctacttcttgtgttctccagagtggtggctcaagtggttcctgggcctgcttgagccacagctgggatggccaaggattgcatcagaatgcagggagcagagacttgaggcagtgctgggcagagaccccacaggtccctcccttgaaaccattctgtcctcaaggccctggcattctgaacctgtgatgggaatggtggcctgatgtctaaaataccttcagggtcatttttccattgtcttgataaatagcagctggtttctttctattcatactaatctctctatcatataggcacttggtcacaccttttgtggcctctcctaaagatgcttttttattctttatatggtcaggctgagaatttttcaaatctttaagttctgcttcccctttgacaaaaaattctggctttagttcatttctgtcttctagtattttactataagaagtcaagaaaagccatgcaacgtgctcaactgtttgcttagttatttcttccaccacgcatcctacctcatccctgctcagttctgccttacataacgtgttagaacacaggcaccatttagccaagttctttgccactttataacaggaagatctttcttccagtttccaataagatattcctcatttccatctaagaccttatcagaagggcctttactgtttgtatgtctaccaatgttctgattatgaccacttaggtaatctctaagaagattgaggttcttctgtctagagcacacctcttctgagccctcaccagaattgccctttatgatctattcacagcaatataggctttttctagcctacttctccaaattcttccagtctgtacgtacccattacccagttctaaagctacttccacattttcaggtatttcagtacctaactctgtcttagtccatttgtgctgctatggcaaaatacctgagactgggtaatgtataaataatagaaatttatttctcacagttctggcagccgggaagtccaagaccaagttgccagcatgttttgtgtctgatgagggctgctctctgctttcaagatggtgcctcgttgctgtatactccagagggaacaaatgctgtgtcctcacacagcgaaagggatagaagatgaattcattccctcgagcccttttataaggcacaagttcattcatgagggtaattagaccctcatgaattcaacctcatggtccaatcactactaatggccctgcctcttactaatcttgtattggaaattaagtttcaacttaaattccagagaaaacacaaacattcaaaccataccaaggggtaagtaaaattcaggaacaattccaactgaaaaattggagaaaggtctaagaagagccgttaagggtgagaaagactcaggttgctggataaaacaggaggaaagcattctagaagtgtggtcaaggaccagtacatggtcagtccattgtgtataattagagtgttggattgatgttaaaaggtagtaaaagatgttgaaaggtggctgggtggtggctcatggctgtaatcccagcactttgggaggccaaggagggcggatcacttgaagtcaggagttcgagaccagactggccaacatggtgaaaccccatctctactaaaaatacaaaaattagctgggtgtgatggtggaagcccgtagccccagctactcaggaggctgaggcaggagaatggtgtgaacctgggagtggagcttgcagtgagctgagatcgcaccactgcactccagcctgtgtgacagtgtgagactcctcaaaaaaaaaaaaaaaggttgagaaagagtgtatattgaaagtcttggatgccatgctaaggagtttggatattctataaataattccacactttctgagaagttgttttaagatttttgaaggggtaaattaacttatttcatttgtacttttttgaagataacacgaggtatgaaaagtctagattagctcttggatttagggctaacaggcagcagttgcaataatgtaaggatgaaattatgaaaggtaggccagtagcaatgggaatgacacttgggcgtgggatgtggagtatggtcactgcataggaaattttataagtagaaagtctgggacttggtgatgtgttatatgtgggtggagaaggaggaaccaaaattcatgtcaaggtttctaagattgatgactgaatatagggaagtattaaagaaagcacaggttgttggtagaagagagatgtaaaaataaaaccaggaacatattttgtgttttatgtgcccattctgtagcactcatgactggattcactataattgtggtatatatatatatatatatatatacacacacacacatatatatatatatgtatgtatatatatacttttttttttttttttttgaaatggagtctcattcttgtcatccaggctggagtgcaatggcgtgatctcagcccactgcaacctcctcctccaggattcaagtgattctcctgcctcagcctgccgagtagctgggattgcaggcacccatcaccacacccaactaatttttgaatttttcgtagagacggggtttcactatgttggccaggctgttctcgaactcctgatttcaggtgatctgcccacctcggccttccaaagtgctgagattacaggggtgaccccctgcacctggcctgtgataataatattcttaaaatataatattaaatgagtagaggatttccattttttggctcatattcttaatagctcctgaatcatttgacagaagtatattataaatgacagttttagaaattatcttaactgtgactaggtgattgtggggcattttctttgttgtttttttggtatttcaaattaatggtacagacatttttattccaggtggcaacaatccatataactccagtggatgaccagcttccaaaagaggctcctggagtttctcggcatttggttgtcaaggaaactgaggtggcctatataactaagaaacagctacattttatagattcagaatcatatgacagggagctggtctacacaataactactcctccatttttctccttcagccacaggtatctgaaaagtcaccatttgggctactagttctaggattgcaaagttgaaagtgtcaatatagagcaatatatatatatatagtactgtggtttacttgctccattggtcaggcatgaaattatactcaattaagcgtttacttttttctcaaacaacttcctatctccctttgaaagctgtattagttggtaagtgatctgcagcttgtagtgtcttcagcattggtaggcttaaaacagtctttaatccactttttgaaagacaatgcttatttttcttttagtacaatttattgaggtcttcctaacattagttttgcatattactgccatgaaatcgttacattctatgatctcaatctagaaaaatggcatgaatatacgttatgctagtatcgtatgcatgagagcaagaaaccatttttaacatgagtgtaacaattcccttacatgatgccaagcaaaagattctgtacataccttttgcagtcatgacaaggatgatgttgatgaaactggacttaatgctagaatctcccaacataaagagagaatataaagatagagcacccaatttcttctcacaatgaagtctttcagtttttgattgtgggctattcgatttcatttttcttacctaaaaatgagctgatgtgctcctctgtatttctctttagacacttggatgctgggaaattatttatggtggacagcataccaaaagtagttaagaatcctacggccctggagctgaggtcattcactcaggtatgaggatatgctaaaatgctgacaaacatgatgcaagtgtgcccttagaaggtatggcatgcctagtattgtgcctgagaatgttggtctttgacatccacaaagacttgacatctttatacttgctacttgtatgtttccattaagtgtgtggcatctatttcaaagtacttgatcaagttgaatatggtttcacaatcttttcagtaattttactgaaaacagacttttgtattgttttgccatcagcaggactctagtttgggtatctggtgtatacgtttttattccacaaaattcagtttattcagtatcttactgtattagtttccaagggctgacaacaatataccatgaactgggtggtttaaaataaactgccaggacataaaggactatgagctttattttctcatagtcctggaggctagaagtcttaaatcaaggtgttggcagggccatgctccttctgaaaccctgtaggagaattcttccttgcttctattagtttgatgcaaaagttattgcagtttttgccattgaagtaaaaatagagcttttggtaatcttcaaagtgatgatggtggcatttacagtgttcaatatcaattaacatgatggttctcttggacctctaaaagcttttgatccttgcaagtcagcacccacatatccatctcaacttactttgcagcatgctgtgaactatatgaaagtggcctacatgccccccatgcaagacattggtccccattgcagagatgtccagttcacattttctgtcagtaaccaacatggcggtactttgcatgggatctgctttaacattacaatcctcccagtggacaatcaagttcctgaggtatgtacaatgttctatatagaggatgaaaaggaggaaaagaaaggagagacttgaagacctactagaaatggtaactttcctttaggctagttttttaaacttataaaagaaatttccatctatggtgtagtaaaaaaaagaagaaaaaagcagggagaagggagtcttttactcccatgggactttctatgtaaaaggtgagatttttcagctactaaatttaacattattttcaaagctttatcaaattctttttcacttcctcttctttctgctgagtttcacgtgttgatcaagggaaggggattaaattatgggtctcttagccactggaagggcttatttaccctcactgcagcccaactatgctgctctgtaatctaaagaagctctttaattttccaaaatgaatcaagatggacccttctgtcatactttgccccactgccctgtgtttgtgtaagcctgaaaggacttgggtcttttcattaaaaccgaactacaaaggcattgctaccttgtgcattttttctgggaagctgggatttgcattgagagtatgtcccatacctacccggttcccctgcccaccttcacaatgctaggcttaattagtatggtcattattattcttattatttcccttaaaagcaggaagacaaaatagcattacccattcattatcaaccagaagggaccagagcctacacatgcctcatccttaaggaaagaggtcactttcccgggtgcctacttggactatagcctgcactggcgttctctttcctgactcctcatcatctctatacctgcccaaggttgtggggcagaggtcttaccctgagggcctaaaagggctgcccaacctgcagaagttttgatgggtgtattagtctgttctcacgctgctaataaagacatacccgagactgggtaatttacaaaggaaaggggtttaatgaattcacagtttcacgtggctagggaagcctcacaaccatggcagaagggggatgaggagcaaagtcacgtcttacatggtggcaggcaagagaacttgtgcagggaactctcatttataaaaccatcagatcttgtgagatgtattcactaccatgagaatactatgggggaaactgcccctatgattcagttatctccacctggccccatccttgacacatggggattattacaattcaaggtgagatttgggtagggacatggccaaaccacgtgaagaggtcaaaacaatatatgaaaataatgaattgccaacatttaaagatcagaagattttccatcaaggctgattcctagcttcccttgaaactctggcagatctaataaaatttaacccgcacaccctacagcagccattgcatagggcgtgctctccagaccatctaagcccccatccaactcaccacacttatttctatcactggcctgacctcccacacctgtggacttgccatctttggtagaaaacctgccaaagggctcacacggaggattttaaactaactccattctttgacacctttcctatcagggaccagatcatattcccggtggtgaaatagtttagaatgcttatggagtcaacttgattagattttattcagaccattcttttctatgtatgagatacaggccatcaaatagcctagcactaaagaagccaaagttttctctaaaacaatcatggagaaatgctcctttatgcaaagttattcaagcctcttgatggagaatgatgatctgagaaggaaactaaaaagtgtaaaggaaaaaagttaatttcactgaatagttttgaggagttgaggaaagaatggcagggtagcttctctttttttttatttttactttttacagtatatggggcaaatgaaatagtccctcaaaaagctgaggatattagaaacaaaattaaattagcagcttcagtgagacccaccacaggagttgatcccttatgtagaattcctgcagagagctggccaagtgataaccacgggaggatgttgacaccatgctaacctgagtcccagaaacctgagcactggatctgggcaagaattaaaaagctaatgactaatgagtcgggggaaattagccttatgcttttatttttttgaaagttgccctaaaatatatatttaaaaaatcacctaatgtagcaaagcatattccttgaaacattggaaattgaagattccatattgggatactaattcaatacagctcagaaaaatgaggttggcaagcatggacctttgttcgaagacaacactcctctctgagtaagagctccctctctttctttctcctacaaacagtgaaaatataggtttagcaaagtgaaagtgagacacttgggagaggtcagggtgggggtagttgtagggagagaagtctatgtttttgcattggtagttgattaaagaatagaaggcagtggtctcagaattgtaggtctcataatttccatgatgcaaggggctgcccttgtggcaccatgaatgccccaggtggctgtggcctggagttggtaccagcactgtgccgtggtgtccagaaggacacagcaggctcttgagcagaggctgcagcttcacttgcttccttccctttcctcttccaatttgttgtcatcctcctttaccagctctttcttcagggaacatcctccctgctgggaccagcagctgctctgagaagagtaggtgcttcctaggagaactgctgcatcctcccatggacagggcaccttactagaccacctgggaggggtcctcagagcccgtgatttggtaccccactgtatctgcttgctttcacttctgcgtagcaatacaagcgtgggggtaatgataggttaaacaaagttagcaggttttcctcctgcaggatctcagagccttgaatatgcttatgtcccttataaacctccatggtaaggatattttatgtaacttttttctagacttatttggccatagaacacttattgctccctcccaatgaggtgataaaatatcccaagccattcaacttgcttttaacttacaaatgaattattagtcgagcagtgagtttttctattatagcaaattatctttgtggctttaatatttaagtctaatgtttgaataaatctatttcctctggaatcttcaattttgccacactacttccatttctaaaatattcactgtgactgaagttctaaagctccaatccatttcccaagcctttaagaatttttaggatgaaaagtagatgaaacctttccttcaggggaatttgacatagattttgtgtattttttagactaagctgtatgtgtattgaacagtgatgggaatggacctgaggatgaaaattattatttcctcagtttagcagcacagatagtaatgattgccaattctactatacaggctatgcaataaatgaaaagtagatactttcaatcttagagatctgccttgtttccttgtaacacattaatgcttagaattagaaatagtaaaaaaaaatttttcagtcaaaatgtctagctatgaacttatcctcttaccacattcttgaaaaattagtttgcatgtgaagataatactggaagttttacagtgatgtaatgagctctgtcttcaggggtcatggaaaaaggctttgaatgtttccttcctttcttctttctaggcgttcaccaaccctctgaaagtgactgagggaggtcaaagcatcatcagcacagagcacattctaatttctgatgcagataccaagctggacaatattgacctctccctgcgggaattgcctctgcacggaagggtggagctgaatggatttcctctaaattcagggggcacattttcttggggcgatctccataccttaaaagttaggttagaacatttcatggtttttttatttacatgctttagtttcttatctagatcagttgtgaggcagagtaagagaaagaagtttgtccaatttcttaaaggataccaacatgccacttaacacactcaacgggtcagttgaaaattacaaatgatcaatttttcctttccctccagacattttatttccatctgacttgctataccagtggaaataactttatggatatttgaacaataaaaatttaattgccgtgaatattaaattggcagtaactgcacatatcacaggaggtaatagtcaaactagataaagagagactgaaataatctgtgaggctaatgtacataattgaacttgtgtcccagagaagcaaatttcataacccagaaactctgggatagaactctgttgatcaatgtccttaatgtaaccttattccgttctactagggcagggatctgcaggcaaacaagcagggtgagctgagtaggcagggcgtaaactaatacttgagtctccaacagggatggcacaatccctggcctcatggtcctagagaaactgcccttacctgaaggtctttcatttcctctacctaatgcagttctgtaagaaactttcctacaaaatctagtgaaacaacttctctggaaaacaatacaagctattcaaaagcaatggtcgggtagacccacacactcacttctcacctgtaaattcaagctataaatgggagcattagccctttagataaagtatgataggagatattatacatcagatgcttagctctgcacttgactagaaagttgaccagaaactaagatttgtacagaagaagatgagtttaatcctgacagtttagttccaccattgatttacagtccacgatatcttgatctttgcactcgcactcctatccttgttaaaaaaatgttttttgagatttcagctctcagctgtctgttagatagagagccctgtttaggtaattcttgctacggagtgaatgatggataaacagtaccaatatttgctagaactatctgttcaagcatactgtcagaggcttacaattatggtttttgaaaatttaatctgcatagtaatcaagtctgacaaggtatccattctcatattttaattgaagaactaagcacaaagagattgaggaatttgcccaagttcattcagctagtatatggaggggtcagattttgaaagaatatctgtttgactccagtcatcctttggatgtgtactcttagggccatttgatccttttagggattttagcatagtaaaatagaattagtaaaaaagaattatcactcaccaatatagttttgatgaaaattgcagggagcatggcaaaataaagcatagcgggtagtgcgtgagaggatcatggagggtggggaggatgtgggacttccccaccataggaagggaatcctcaacctcagttcctaccctgcctatgggtgaaactagtcctcagtaaaatacctttcagctctgactttttccccatagttaaagattatacatgttcaatatattatattattttttaatacaacttttattttccattcctaggactcattgatatgtttaaaatttggctcaattcacttcagcagctccttagaactttccaagcatcactgcaatgggctggagagtatgtggagggcctataattagacaatgccttcaagaaatgtggctgagaattagtggaagatagggctaaggctagacaaaggaaaggtattttttaagtctaagagatttaagaatttatatagattgagaggaagatagctagtcaatggaagaggagaaatgacaggaaagaggcaatacataattcattgatcaaggttttagagaaaagctgaatagatccagagcacaggcggaaggattagcctagccttagaagtagaaaaggggagaaaaagatcaaatccacagtgtcccacttttcctcatctactgctcagtctgagggttctcctggccctagtcagtgtattctgcaagcgtacagacctataccaaatggttcctgttgtcacagtggcatttgaagggctgctttttaatttgaggacaaattagaaatgcatataacacatttttccagggtggagcaattttacattcaaggatgtatgagtagttaaatatgtgacttcaggattatgctgggtttttgttgttgttgttgttgctatttatttatttagtgaacacatggccaaagccttggaagagctcatgtatcatgcatctcaatttactctcacactgttcctaagaggttggtgacaaatattatccccacaggtatcaacatgatggaactgaagttcttcaggatgacctactcttggaggtcaccgatggcacaaattcagcagaatttgtactacatgttgaggtgggtagaaagtttcttccctgggttattgtcttagtctgttttgtgctgccataacacaatactacagactgggtaatttataatgaaaagaaatttatttggctcatgactctggaggctgggaagtctaagattgggtagctgcatccagtgagggccttcttgctgcatcaccctatgatggaagggcagaaaaagagcaagagggagccagacactgagctatgagccttttatgatcagcattaatccattcatgagggtggagccctcatgacctataaacctcccacctcccaacactgttgcaagttttcaatgcatgcttttctggggacacattaaaatcatagcaatcatacagacatagaggatcttgttggaaaactctcaggtcctgacagaacttgaaacctacggcctccaaagtgagaggatacctgcttcgatccttgtatgtctcaggcctgccaatagaaaccaaagttgtaatgatgaagtagtagtactatgctattgtctctctctaatctatttagaggtagaattactctgacttcaaacatagatatttaattttaaaagtaatttattctatgtataaattatttctaatatctttgaactataaaactcagaaatatttgtttagcagtggggcaggttaggctagtatcactggggttttcctgtttacagataaagccatgtatatgtgtgtgtggtgcctctttgtgagttcctgtaccatatagtcctagcatgaggatttaatcatatttccccctcttgacaaatgaaaaatctgcacataaaattcgagtgcagagcgggcaaggtggctcacacctgtaatcccagcactttgggatgccaaagcaggctgatcacttgaggtcaggatttcaagaccaccctgtccaaaatggcgaaaccctgtctctattaaaaatacaaaaattatctgggcatagtggcttgcacctgtagtcccagctacttgggaggctgaggcaggagaatcgcttgaacctgggagacagaggttgcagtgagccgagatcatgccactgcactccagcctgggcaacagagcgagactctgactcaaaaaaaacaatttgaatgcatgcccaagggacttacaggaaccccctgaatttctttgttgagtggcatgcaagtccaagagcataactcagaggatttgcaggtatttatagttggtaacaaaagaaggtctgaagaaaaatataccatgttccctgaagagccactaattattttcattgttctagattatttttctttctgttggaatttttcagatctttgtgatatgaactcattactatattggtaataatgtctttgtaagatattttagtaactaataaaggatgttcacatctataattttaagaagcagtgaaggagttatccccattttatagctaaggatatttaggtacaagaaggttcaatgacttgcccaaaatcattgactagacagtgtagtcttgggctggcatctccactctttgttacctaggtcagtgttctttcctcctcaccctgccacacttctacatcactaggtgattataatgatcatactggccagtagttcctgtgcacctctctatgccaggaacaaggcaatctcttcctttcgttttcccacttagtcctcataatggcctttgggatctgaataaagagcagtatgttattgcagcttcaaaaaggacagttttctttgttggcagacttacagagagacaaaactttctgagttactttttttgtctgaaaagcaaatttgtggggaaaaaaccccaaccctatcttccatccatgacaataggcagtgcattttgggaaaacaatctgtttattgtttctttttaaacacaagaggatggtctttaaaagccaaacagaggcacagccaattttttgacaagtgtttgtgattttttttttacccagaaggaatattcttaattctattgcctttggactttattattcatttgaaagctgagactcttttgtgaacggctgcaagatggtcatcactgaatttgttggtgatattcctcagggtcaagaacaatactggagaaggtcttaaatgaattcactcaggggacttgaacaaagatggttttttcttaataagccaatagaaaagtagagaatattataggcttttaaagtctttaaataactagcctggagcttttgttacccattcctctatccattaaatttcatgtatatttgttttagagttttagcctgtttaaataacaaggtagtcaggacacatatacatagttgcattcactcattcatttattcagcaaatatttaataagtgctttctttgccaagccttaggccagatatttagaatatgatgatgaacaagacaaacaaagtcactgttcttctagaggtcacaggccagggatgaagacaggcattaaacagattatcaccaagataattaattgattaaaatttagatggttctatacgtaaataggatgctaaaatagagtaaataatagaagcccctaaattagctgaatagttaaggaaggatttcctgaggaatccccatgtaacctgaaggaggagttaaccaagcaaagagttggggacagaattcccagggggaagagacgtgggcagtggggagagagatgatgcagagaccctgtgatggtggggaatgtgtgtcgggataaaactggagtggagtggcaaaggcaccccatagcatgggataaggccagagaaatactagcagaatcaatgggaagccactgaaggtctccgaaaggcagtgacttaaagtccacacgttaaaaagatcactttggctgagcattagggaagaaggtgtagggttgagaggattcacagggcagacgtggcagccttgcagcacacaccaagttgtggctgtgaactcagaggggggttgtcctcactcccttttagaagatatgcttttccagatttctacacgatctttttaaatttagagtgccagcgtgatcccatgtcgcttttctttcctttttacttggagttttattttcgtgaaagtgagagaaaaacattttgtcgggatgaaacctggcattgattgaatagttacggagtttcatatttaactcaaactgtttgaaatgcagctgctgcttattataagtccagagaaacttcctgggtggcaggaagttgagggtggaggaaagctttgtaatcaccaagtaatttgaaacaaaaataactttgatgcagtaaatgaaaatgccttggaccacaaggaccagaattcttctggaatatgtgtgagtttaatgaaagaggataggggctttggtgaagaatgccttatattacatttgtattttttctgtctagaaacaaatgagagttttgagtcctgaaccataaccatattcccccattcctacctaaaatgtctgtcacatggggcatttcttgcaagatggtttacatgggaaaagttaaaagacacagattacttggccaaatttcacggctgttgtttcatgtgtctgtaagatgaaaatgcctgtcattctgactatgagcaatggattacctgtcaaagaatttgtcatttctttctttttctgaaaacatgcattttttccattgcctaggtattccctgtcaacgatgagccaccagtcttaaaggctgacctcatgcctgtcatgaattgctcagagggaggagaggtggtcatcacctctgaatacatttttgctactgatgtggacagcgataacttgaagttgatgtttgtgattgctcgcgaacctcagcatggggtggtgaggagagctggagtcacagtggatcagttctctcagagagatgttatctcagaggccgtgacatacaaacacacaggtaagcagcagcatggtgaccagtgagggaatgcaagcaacatgagagtctccactcctcagtgtgggctcccataatcaaacagtcagaatggttacttccattaaaaacaagaagcagctgcagcctggcctccatttttccagcatgatcaccatatatggaagtatttctgattgtgttattataacgaatttcaaacagcggagaaaggcagatattacttgctttgttcctgacgctaccacacagaccttccattcaccctatgattctccttagcgtttttggtcagtttgatcatcgtagttggtgggtctataaatcatgacagaaatgcctgaagcaagctcctaaggtaattacattattaatttgcaaagcttactgatcaccacctagctcctaagaagcaactggtctgctttttgagttcctgaaaagtaacgataatgtcttacccagtatatgacttgcccacagcaaatgacagcgtgaacacaggttagatgtacagaaaatgttcatttattagcactgcagttacatttttggcattgctttatgttgtcacccaggtggcatttgttccactaaaaaatattaattcaacatctgatatctgtaacttatagcactaagcactgtggggtacacaggaatatgacctagaccctgctatgaaagactttgaacttaaatgggtagacaaaacccatttgcatgcaaagatgacagtgtgactgacactgacacactgcacatcatcacatcatctcaccttgcacatcttctgaggtctgggttggggaaacttccttggtaacaatgctgcatatttcatctgctggcttttgctgtactgtagtgcaatttcctgtctactcatccatatgcctctttaaactgcaagttccaatgcaggaagtatgatcaagtatgtaaggccaggtgagtggtataggaaataagaactttcagaattcaaatcattttcttatttgaagagattcaagcagtgaggcatgaaataaattcaaggaggagggatggagatagcaaaggattaattcagaaatgggagaaaacattctgaaataatatttgtcctatatactttggaaaacagtgatttattggaacaccagatgtctcgggacattttaatcacttcaccagacatcttttttctttaaatggtatctctctatcctcttatctgtgtttagtcttaggaaagctttcctgggtgattaccttgtcctgaggagcgtagttcgtatgtttgatgtccctcaggagttcaccactaggtactcatttttgatttccccagtggatctgaaatagactggcagaaaagggatccaaagaccaatgattgttatttattgcttaattatttaacatctctggcaggctcatgcagcacaggtaaattaggggtgagaagaatctgtcttcttttccagtgccttgttctaagtgctaaacaacaggtatacaaatttctaaatctcctgtagtgtagcagccatagacgggactattaactaattttttttaaaataaaacccagtaggacattggggcaaattatttcaaatagacggcttttggttatgttactaagttagaaggaatactcgattcaaagggtattttggtatttgaatgttaacgttttcttgtaatgattactcacttattcaattggtagttacccagccctgggctgagatcaggataaagaatcacagcattgtaggatctgaggtttcagtgagttttctggcccttctcttgcttctacgtgttgatttagaggccacctaagaataattttattagcattactttatttgctttctataagtataaaaataatacacactcattgcagaaaacttggaaggaatggaaaagtacaatgaagtttttaaaaatcaccttattacatatctaaaagagtcactgttcacatttcagtattatagtattttattctctttattctggccataattttaacatagttgcaattatgttgtaacatatgcagctttgcagattacttttatcatttagattatcacctgaaatgtttattaaaatatatattaaatgttagaaagttattataaagatgttttagtaatagaataacatcttactatatgaaagtccattaataatttgctattccccaattaacattatctggtcccagctacttggaggctgaggtaggaggatcgcttgagcccaggaggtggaacctagagtaagccaagatcatgccactgcactccaacctgggcagcagagtgagaccctgtcttccctcaaatttttttttaataacactatgattaacatttttaagtaccaatcatgtccttaggctatattccatttcaaggtaaagaatttcactacctatgttgtaggctttttagtggcttaatatttggcctgctttcccagctatttctgtaaatatatcctatgcttccattatagagaaattgtggttactcaatttgcaatttgccttctctgtttttaaagctgtcttctctttctagagtgacttttcatttctctcccccattgcctctccctacagatcttctatcccatctgtcccaatgttctaccttatctgcttggcaaactcttactcatcctttaatgctcagcacaaagccagcaaaggcatctggaaactttgctgactttccttggcacgtatgccctgcccctacgccattgtcagctaaaactcatcttctttcaccctcagcaccttgcacacgatcaggccggaatacataaaattgccatttaacaggtaaaaaatggtttaatagtagcaatttcatgtgattctacataatacatacatacatacatacatacatacatacatctgtgctattctaaccacactgcatttccttctctaccattagacagtatcggtgcctgacgcatagtgtggtcttttgacatttgacattcttttgaaatgtcttttgaaagttccaaaatgtgtgcctttttctctgctggtgtgctggaaacactaattatcacacagtaggtgttgaataaatatttactgagtgaattactaatgaacacatttttaagccagtttgcattttagatatatgaataggtgagaggtctcttatttttgactctttctcacattgacggctgattgtttctttctaattctctcaacttcaattcggtttttccttttaagcccagttttctcatcctttgaacacttggttgctcaataatataatctctagattttccttgtcatttttaaacgggaaataatggcaaccacagagctctgcagatttgaccagagtgtctgctgaaaagggaggatgtccctgatcttttgtaccctaggttcatcaaaactccaagcattaattcctccctgtattagtccattttgaggctgctgataaagacatacccgaaattgggcaatttacaaaagaaagaggtttaatggacttacagttccatgtggctgggaagcctcatgatcatggcagaaggcaaggaggagcaagtcacctcttacatggatggcagcaagcaaagagagcttgtgcagggaaactcccatttttaaaaccattggatctcatgagactcattcactatcatgagaaaagcgcaggaaagacctgcccccataaattcagtcacctcccactgggttcctctcacgaaatgtgggaattgtgggagttacaattcaagatgagatttgagcgggggaacaaccaaaccgtatcactgccttcttgagattttcatggtgatgcatgagaattaccaacagcacatgtgcaaaacttttctgtgtcctggatagcaagcactcttactccacgctcttagtgggtaacccaagagcagattgccctgttgctgataaactgtctaatcctgacattttgttccttcttcctgtcactgtctaaactggggacattttgaatcctacagatgtaagacctaaacagtgaaaagaagaaaatgaaaataaatgcctcttcttttccacagactgttgctatttttaaaaacatcctggctaatatataataagaagaatattgaaagaaatggcaaaaatgtggcctacttttgtatttcacctattcaacatcctcgtttctcataactgctctgtggttgatggttgttcatttaaggtggttaatgtaaatggaaagacacttaccaaagggaaaaggttgccttctccctctccctgaggttggtcataacatgaaatgattataagggaagaatgaaaccttcactagtgaagctttgtgcccttgctcattcataaactgtcagacccttgttggcccagttttgtccctccttatcatgatagatggctagtagggagttcaccagaggcaacagatgggcaagaatttttgcattattttcatgactatatttaatttcatagtgataaaattgggttttacatttattttatccacataacttcttttccttgctgtttcaatgcttgtagaagaggtgtgagtagatttcatcttggtattctatattttttaaaaggcaggtttcagctatagttgtgtcttccaggtggcgagattggcctgatgccttgttttgacaccattacattggtggtttcggatggagaggctggcccttttgtgaatggctgttgctacaatggacccaatccatctgttccacttcatgcgtcctttccagtgtatgatctcaacatcacggtatacccagtagacaaccagccaccttccattgcaataggtgacaatgtgtttttttgttccagtactattgtctgacctagtgtcatacctgtggttcagtgaaataatacatttcatttatagtctaaaaagaaaaccaccatatggaattgtccttcaataattacctcaacacaaattttgtggaaaacccaaatctgttaagattatggggcaaaagaatttacatgtttaaaaattttaatatttctgtatggagagagaatacgtgtgttggggtgtgtgtgtgtgtgtgtgtgtgtctttgtgtgtgtgttgggacaaggacaacattgcaatcctcaaatattctgattttatttcacatgggaaaatgtaatttgcttgctgaagagagagtaatttattttatccataataatttctattagaacagagtgagtataccggagagaccatttatatacatttaaccttatttgctttttagaaagtcatcttttcataggcattatgtatatgttctgtctctcagaaaaaaatataagcatacgtatgaatgttattgtaatttgcaaactacctcccaagcagtgttctggaaagaaagcattatcccagcagaataattaagcatcaagccacgaaaaaactcttcgttatgagcaattcataatagctctcaggcaattaacgctctgacaaacagaggtaccaactgatcttgaagagtacataaactacgtttagtggcttaacattaaaacagttgggcaattcttactttcatttgtcacttccatagagacacaagggaaaccagagttccttgagaatgactaaagggctgtgctggaacagttagtatttctgctggctttctgttatcttctgacttgcctggacaagaaaaaaatataattccataggtcaaagtaaattcactcattaccactcaagattttcactttaaagagaatgatgccaaagaaaatgaacatctcccatggaaatgtttttgcacgtgggaggcttctctgaactagaatttcagtcactgcattttgtcctacccagtctgtttagaggatttcatgctaagttgtaattgtgtttttatttgtatgcaggtcccgtgtttgttgtagatgagggctgctcaacagcccttactgttaaccatttgtccgccactgaccctgacactgcagcagatgacttggaatttgttttggtttctcctcctcagtttggctacctcgaaaatatactcccttctgtgggttttgaaaaaagcaatattggcataagtataggtaagctgtagcttcgtcaccagcaatgactcccttccttatatttatggaagcgattggccaggtcatgcttaataactttgtaaggactttcaaaatgtttaaagcaccgggcgtggtggctgatgcctgtaatcccagcactttgggaggccgagatgggcaggtcacctgaggtcaggagtttgagtccagcctgaccaatgtggtgaaacccctctctactaaatataaaaaattagccaggtgtggtggcatatgcctgtaatcccagctacttgggaggctgaggcaggagaattgcttgaaaccaggaggcagaggttgcagtgagctgagattgtgccattgcactccaatctggacagcaggagcggaaactccgtctcaaaaaaaaaaaaaaaaaagtttaaagcaccatatgtattcaatgaattattattactattatagctgatgcttttgaatcttaccatttttcatttaaatttttattctgacttcccccttgcatgcaaatttacttcaaaataaatggaattttacttatggaaaatacaagaataaacattgaagaaagaatggtttaaaaggccctcatagcaacacaggataccatgagagagtgaatctagcgggagctcacaaggtctcattctcacaaccttttagcattttgaatagatattggtggaaagggtgaggaaatatactatgggtgtaacagagagaaagcctgaaatgttgaagcagatgacattaattttaaagccaaaacgtgtcccagatacttaaataggtcttgtatttcaggcaaaaacagaccaaccaaaacaaaaacagaaagcaaagacaaagtcttccaaagacatataaatgattctccaaaccccttttgaagaatgtccattttaaatatgaaagagactgaatataagattaattgcattcaatgttactcagcttttctggtgacttaatgcacatctttaagcattttctctttggatttaagcccatgtcaaaatactaaaacagcaggttagctaattccactcaatccagcaccttgcttgatatgtacctcttcaagtaggcagatgattgattgactcttgttttgcgtttacgtgacggaggtggtctctttttatactcaagtgtgacagagactattcatgcaaaagtagtcatttaatcaagggaaggtctccgacatttattctaagtatctgaagtattcttgaagtccctgtgcatactggttaaaaagtattactcttcggttctccatgcaaattttattcttctgtatgatctgtggatatctgcctttatgttgatggttggctgttgtagcagcccttgatagcaagatacttaggtcaactgctatgatctcttatttgtattactgagaaattgactattattgggttaaggattaaggaccaataacttggaaaaattttttttttatttatctgttccatcttggtgtgctctagattcatttcagtggaaagacatgaacgcttttcacattaactatgtgcagtccaggcatctgaggatagaaccaactgccgaccagttcacggtgtacgtcacagatgggaagcatcactccttggagataccattttctattataatcaaccccacaaatgatgaagctcctgactttgtagtgcagaatattactgtaagaaacatatccaaatgttccatttctcttttatcattttgatttttattttcaattagtccatttacattgctccaagtgcattaacacattgcattggtgaggagtggggaaggctatgttatgtaatgcaatcatttgaaaattattaatcttcctgcctttcctcttttgttggcacatggatttctctggagagcccttcagtaattatgagagagaaaaaaaatctacagatgattccatcgatacctacctccattgtcttgtatcttgcctagggtcggggcttctgaaataataccactgggaagttgtcccttgctcttctctggaagtagtcatggtttttttgttttttgttttttgagatggagtcccgctctgtcgcccaggctggagtgcagtggcgcgacctcggctcactgcaagctccgccccccgggttcacgccattctcctgcctcagcctcccgagtagctgggactgcaggtgcccgccaccacgcccggctaattttttgtattttcactagagacggggtttcaccgtgttagccaggatggtcttgatctcctgacctcgtgatccgcccgcctcggccttccaaagtgctgggattacaggcatgagccaccgcacccagccaaagttgtcatggttttacctgcattccctagagagactactggagagtgaaaaatatgaagtcctgtgtgttacgggcaagcagactttaagcttcgcataatttttttttagataaccatattttgctttcttgtgagaaaatgcatttattttgtagatagctgggcttccatcaagttatgctgcaagaagatttgaggttttagtttaagttattataatccattccaaacctgtctactaatcaggtttggcattttatgtatattgatctaaaatttttgttgtcctaatctcaataatctattcaatctgcaagaaacaaccacacgttttagtcaagctctatgaagaaggatattataacatattttaagttgctttattaaagttcttggagaaaaaggcaaggtcctatttaaaatgttttcataagtataccattgtaagttgaactatgatgccactttaatatttaataagtagggctagataaaagaaaatcagcatccttttagcacaagtatcatatatggcaagtgtttttttgttaacacatgttcaataaaatgtggttgcaggagggtgcccttcaaagtcagtaagagagggtgaaatgaaaggatgctttaggccaggcatggtggctcacgcctgtaatcccagcactttgggaggctgaagcaggaggatcctttgagcccaagagttcaagaccagcctgggcaatgtggcaaaaccccatctctacaaataataaaaataaattttaaaaattagccaggctggtgacacatgcctatggtcctagctacttgggggctgaggtgggaggattgcttaagcctgggtgggtgagtgtgcagtgagccatgattgagccactgtactgtagcctgggcaacagagaagactatgaggaaggaaggaaggatggaaagaaggaagaaaggaaggaaggaggagggtaggggaggggaggggaaaagaaaaagagagaaagggaaaggaaaagaaaaaagggagggagggaaagaaagagaggaagagaggaaggaaggagagagaaagaaagagaaagaaaagagaaagaagaaagagggagggaggaagggaaggagggaaagagagaaagaaagatgaaggaaggaaggggaaaagggagaaagggaaaggaaaagagggagggagggagggaaagagaagaagagaggaaggaaggaaagagaaagaaagaaaagaaaaagaaagagaaagaagaaaagaaagagaaagaagaaagaaagggagggaggaagggagggagggagggaaagaggaaggaaggaaggaagttttcacaaattcaaaccatacatgtccttcaaggcttaattgccttctcagtcatgaaaacatcctgatctctgcccttttgtgattcttgtttatgaatatctagcagcactagacattttcttccttgagttatagttattgatggacctttgcagtcttacctgacttgggttgttgagaatactatgtagcatagtaacattgcagattaccaatatgcatgtgtagaatttatatactcttattatttagattttgctatatttcaaaatgggcaacagaaatacttttttgttctctcaatcctcgtgagaaaaaaagattgaatcagctaagtaacatattgtcaagttctaaatgactagatactacatgaaatgataaacatttaattgtctttgtgtttaaaggattatgaaacctgaagtgggtgtgagagggaatgggaagagtagttcaggaaatttggaagtataagaatgggagggagatgagggacccattatgaaaatatacataattatgcatccagtagcatcctttggcattgttgttgatttcagtggaaatacagaagtttttactgcgataacaaaaataaaaaccaccaaatatgcttagtgtatgtagcaaatatttgtatcacttataaagcagatggaaatgtaagacttgtagaagcaaggagatccacgaggattggtttatgaaggtgaaggttctagattcagttttacaactgaacttttccatgacttcttgaaagcaaacaccgtcttggttgcatttttcccctgacctttgacttatgaacaatacatattttaaaaattatatgtcctttgtccttcatggaaatgaataaagtgctttgaaatcttcagaaaaaaatgtaagggagattaatagatctgttacttcctttacattcatattaaaccagcaatttctttttaggactcatcctatataaatctcatagaaaatttgaagtaggatatattcaagtgatttctttaagcagttttccaaagaaagacaagttgtcttttatgcattgttgacttttctcatgtgttcttgctcaggtgtgtgagggtcagatgaaagagctggactcttccatcatcagcgctgtggacctggacattccccaggatgccctgctgttcagcatcactcaaaagccacgccatggcctcctcatcgatagggggtttagcaaagacttctctgagaataagcagccagccaaccctcaccagaaacatgcacctgttcacagcttttccatggaactcctcaagactggtatagcatgttccacttccatgcatttgttattgttgattgaataatttaacccatacttatatgtgaaatctaaaaaggtcaaactaatataagcagagagtagaatgatggttactagaggctgagggtgggaggattggggagatgttggttaaaggatatgaaatttcggttagacaggagaagtaagttcaagagatttattgtacagcataattaccatagttaacaatatattgcatacttgaaaattcctaagacagtagattttaagagttctcaccaatcaaaaaaatgagtatgagaagtaatgcatatgttaattagcttgacttaaccattccacagcgtggccgggcctggtggctcacgcctgtaatcccaaaactttgggagacgaagacaggtggatcacttgaggtcaggaatttgacaccagcctggccaacatggtgaaaccctgtctctactaaaaatacaaaaattagccgagtgtgatggtgcacttctgtaatcccagctactcaggaggctgaggcacgaaatcgcttgagcctgggaggcagaagttgcagtgagccgagatcgtgccactgcactccagacttccagcctgggcgacagagtgagactctgtcaaaaaacaaacaaacaaaaaccaaaataaacccatttcacaatgtatacatgcatcaaaacaccccattatatatcataaatatatacaatgtttatttgccaattaaaaaataaaaattttaaaataatttaacctagaaaaggtaataatacatcacagaaataggggatgaagaaatagcattcacctactttattcatttgtctctcaagggctctctctaggcttggattaatgtaggacaggaagccctaggtagaggtagtaggtaattgaaaaggcaacaacatgttttctttcacttttagactaccattaaaaatgatatttgagtttttattgtattttcactcaaacatttaatgctatagtaaaaaaaatcctttttaaaactattgagatcatgaaactacagtttaagagactggtctgccaaaatttccacagttgaaacaaatatagaaccacatataataatgctcattattttctgaggggataatttactctttagagaaatggcacattgcatagcagcctgaattattttttaattactcttttaaaaaattcaatcttatcccacttttcacatatgaaaatacttttaaaaatctgagaaaagtgtgcggttcctgaattactgcttcctcccattctccttccttaggtgttttcttttcccagcctgtaaggtccttccccctcctttgccaggctagccaaggctgtgccttcagaacgcacctttctgttaacctctgcttgagccccacccaaggtctccaaaccactccttctctgtgcttgtttcatcttagcacttgtttaacatttttccaacttcttttagttatttgtttccccaactagtgtgtaagctttctgccccaaaggtttttttgtaattgttgcaaaaatcatctcaggtttaaatttaaaaaatgcatttataaccaaacactgcatgttctcactcatagttgggaattgaacaatgagaacacatggacacaggaaggggaacatcacactctggggactgttgtggggtggggggaggggggagggatagcattaggagatatatctagtgcgaaatgatgagttaatgggtgcagcacaccagcatggcacatgtatacatatgtaactaacctgcacattgtgcacatgtaccctaaaacttaaagtataataataataaaaaaaaagaaaaaaatgcatttatatatttctcagcttttatcaattgcaaagaaatacattctaggacataaatgatgatattaccaaatcaataaaccacatgctacaaataatagaatacattgtttaaaatttttttttcaaatttgaccaaggaaaaaataataataattcaaattttactctcaagaaagtcaattttttaaaaaataacatttgttggttattatctagttaaataagaattatatgatcattgtgtacagtttggacacagtcattttgaagaaaaaataaaaatttcctacataaaaattagtatttgggttgatattttggagactttctcagaaattagattttcacctctattttatctgtggttcatttatggctacattttttaaaaactttagcatattctcataaacatccccccaaacaaatatacaaagtttataaaactcttcccatattatgtaatctgtttttcttcttaccttttttttttttggagacagggtcttgcactgtcacttaggctggattgtggttgtgcaatcacagttcactccagcctggacttccagggctcaagtgatcctctgacctcagcctcccaactagctgggaccacaggcacaagtcatcacacataccactggctgatgaaaaaaaagttttgtagagacagggtctccctgtgttgtccaggctggtctcgaactcctgggctcaagtgattttcctgcactcgccttccaaagtgctggtattacaggagtaggtcaccataactggcctcttcttacttttaaaacatggagaccgggtgtggtggttcacacgtgtaatcccagcactttgggaggccaggatgggtggatcacttgaggtcaggagttcgagaccagcctggccaacatggcaaaacccagactctattaaaaatacaaaaattagccaggtgtggtcacacctgtctgtaaccccagctacttgggaggctgaggcatgagaatcgcttgaacccaggaggtagatgttgtagtgagccaatatcatgtcactgcattccagcctgggtgacagagtgagactctgtcacaaaaaaaattgttattattaaaaacgtaacttttgataattaccttataaaatcatcatatagacttattatgctgtaattttttaaaagagatgactttgtcacccaggcttgagtgaagtgggatgatcatagctcactgcagcctcaaattcctgggatcaagcattcctccctgcctgagcctcttgagcagctatgactacaggcgtcacctggctagtgtttcaaaaaaaaaattcttttaaagacaaggtctcattatgttttccgaactggcctcgaactcctggcctcaagcgatcctcccacttgagccccgaaaagttgttaggactacaggcgctcaccactgtactggctcctgtgctgtaattttatacaactatctttaaaatacaactttaaaatattttatacaactttaaaatatccagatagttttcagtttcttgatattaaaacttatatttcagtaaacattttatataaatctgggtgcacatcttctagcattttagtagctttgaagtaagttttgaaaatgtgaaatgttaggcttccaattttgttctttttctaggctgttttggctgttctgagactcttgaatttccatttaaatgttaggtagatttaaaaaaaacagttacattgttaatatttaagttttgacctattaagaattcattttgatgattggctcgaggtagggatataactctataattttccccaaataattaactttctcagttttatttaaataccctgcacctttgtttatatagtttatttaaaaatatattctttcctaactgattttaaataacacccttaatcaaatactaaattatttaaataaaaagtctttaataggctaagaaggcactcttttacttcataaaacaagtttaatttcaccctactgcactgataaatgaactcttgctaatacccctgccttgaaaattaagacattatctgtgacatatgtcatgatggttcaatcataaggaagatttacttattttttttccttcttccaggaatgaggttgacgtacatgcatgatgactcagagagccttgctgatgattttacaatccaattgtcagatgggaaacataagatacttaaaaccatttcagtagaggtcatcccagttaatgatgaaaaaccaatgctgagcaagtaagctacctgaaaagagtccctttcagatttctatacaattctatgaaatctacaatactaggtacaggtgtgtgtgtgtctcccaaagaagcaagtcttcgctagctcctgtcacagcttgcccctgccactcaggcatgaggaacctttagtgcaaatgttagttaaggtaacctctccttaacaatcagccgtttaattacttgattttcttctaaacatactaattagttgtaaagaataagaatgactgaacacacagtatggaatgaacaatctactaaacatataaatacatgcacttacaccaacgtgactgcacacctaccaaagtgcaattaatatatagattcaactaaagtctaataacattaactgcagacagtccttacaacagatttgctgaaacttgtaactaagcgtggcggagggaaataaatcaacccacttctttcattatcttggtacttttttgtccaccagttctctactgtgttccatatgggtcaacaccccctcccgcctcacatcgaaatcatcattttctaaaattctgagcgatattattcaattgtaaactttctcagtatctccctgtattagtctgttctcacactgctataaggacatacccaagactgagtaacttataaagaaaagaggtttaatttactcacagctctgtagggattgggaggactcaggaaacttacaatcatgacagaagaggaagcaaacacatccttcttcacatggtagcaggagagagaaaaacaagtgcccagtaaaggggaaagccccttataaaaccatcagatcttgtgagaactgactcactatcacgagaacaggatgggggaaactgccccacgattcaattatctctacctggtccctcccacaacacatggagattatgggaactacaatcaagatgagatttgggtgaggacacagccaaaccatatcactctctctgtaagtgctcagagtttgatcatagggtatagagtattcattagttctatttctatagccccagccatttcttttacaattggcagctatacagaactgtacacagtctacagaactgaacagagttttaggggaccaactcttctctagagctataagtaaaaaagcatctggttcttggaacctccttgatgacttcacctcttttttcaatagtgcaacagtaagagacatgttgtagatagtctgggtttttatcagggagtgaataacttactgaaagcacccaaaccccccaaatctcttccactctgcagaaaggagggcctcaaacaagtcccttccttatctgccccatatcctgctgttccctatgagccactgataaggttcttaaaaagcattatgggaaatactgatgatagatttttggagggttgcatctcatacatcagtttgtctaaaagtattcaccaaaaaatttctattttcttatttcttagctaatatgttggattagtatagcctttatttataaatatgaaaatatgaaggctgtcatagtattacagtacctcctttttgatgatctcattttaagaggcagggaggtgaaagctggcagggtgagggccccggggcatccactggagaggggtaaaaactggcatttattaagtgcttactataggacagacagtatattagattctttcacatatattatttcattaaatcctcaccaaaattgtggaaaatgcatattattatcctgactgaggaaaactgagaccagagaggtaaaagagcttacactaggcacccactcaactccatttgactccaaaggccatgctcttgttactaaactcactggaatagctacatctacagaatcatcaaacctccttcaaccctgcttcaaaaaccctcccttttctgtgcttcctctttccttctctcctgtggataggaagtaataacactctctttctcttccatgtgtgtccttgggcatatcacctctttccttctcccggaaactgctccattattttttcctccagtatcttcagtctctcccttttcatttcctctgttaacaagacaaagggatatggattgtggttaagagagcaaatgctggagtcagattgactcagttcagccacttaccaacagtgtgatcttgaacatgttgtttaacttctctcaatctctctgttaacctctctgtaaatgaggacaatagtggtatcctcttaataggattgttgcaaggattaaataaaatatgtaaacatgcttgaaagactagctactacgtggtaagtgctactaagtgttattgttattattacaagcagatatcctaattgtaaaaatacaaagacaagctagtcccccattcatttcactgaggaactttttggaagagttccatttctgcccactttctccaatctccactttattatttttttctttctttcttttctatttttttttttttttttttgagagaaagtctcgctctgtcacccaggctggagtgcagtggcacgatgttggttcactgcaagctctgtctcccaggttcacaccattctcctgcctcagcctcccaagtagctgggactacaggcgcctgccaccacgcctggctaatttttgtatttttggtagaaatggggtttcaccatgttggccagtatggtctcgatctcctgacctcgtgatctgcctgcctcagcctccaaaagtgctgggattacaggcatgaggcactgcgcccggcccaatctccactttattaaagatgctcccttaaaagttactcttggctttcccgccaaatctaatggctcttctaaccttcctggactctttgagagcatgtaacaccatttctttgctattccttttagctactgtagaggatgctttgggtcctgcagatcacagcccctcagcccatctctgattctggtcctgatcgtggtggaatttgccatgtcagtgtcccacctcaggtgtccgcagtgcctcactccacttttctgcctcagggctttcatgcagcccatgtccatgctcagcagagagcactctggggacagcccttaacctcgggagctagtagataagataaatgctccagcttcctgtccattaggagcacagtttgaatcacatctatgtggttcctcaagatacccagcaggattgagccccaattccccatagcagtaaaacaccctttgttgcctttttctccttccctttctctcctactccctctctcctgcctcctggaatcacttcacaaataaattaccttccttgtcctaggatccttttaggataacctagattatgacacaccttgtcctgtcttggcttccagacattgaattctgacactgaattgcaaacatttcattctgaccagaaatttaattctgaattcttcctaccaaactcttcatcttcttaatgacattggcttcccgttttgattaatctgtctgaccactaatctccataagccctcaaccaactgattgcttagctttctggaataatgggattcccattctctagtaaagaggtgtgcaaatgtcaccacccactgcgagggaagatgtcagccctgggtagcaagatactcaccctgagtgaaagttgttggaactgaggtgttcaggttttggcatctccgcagaggagcataacactgttgatgccagttgctggttctcaagtatccttcatctgaatcccaagaaattcaggcatcccaatttttctcagaaactaagctgtaaagttggacagagttaggccccacatgatgaccacaactgagagctagaaaccctggtggaaagagatccctttctcactttggcgagaccagggacaatggccatataggctgtgaaggcagcagcaccgcacagtaaaggagctatagaaaccacagcagtggtggctctggtaggatcagcagcagctctgccccagcctactgttcaagaagacaggagctgacctggcatctgtaacactgggaaaagatgaatctacaacaagaacacatactacccagaacattacttagaagaggaagagtaatttagagagtcccagattacctaactatcacctaactcagaatggcatatcatcaatggcactggaacatctgtaggccagtcaatgaatctctttaattgagtttctgtctgtaaaattagaacactcatacctagccctcttacttcatggagctgttgttgtgagtgtaaaatgaaatactggaaacaagatcattttatagaataaattataacttacaaaattgtaaagtttggtacatgtaatcaattagaagtgcctaattacctcttcccacattcattagggctgacccattgtcttttcagactttcacgtgtgagggtagagagcctgtttcattcctctcactagtcatcttcagtgctttgaatattgaatgtcattccttaattgttgaagattgggaactgtgatagtcaatataagtgtcccctactaaaggaatatcttctatttttatatcaacccagacatttttctttttacaggaaggctgaaattgcaatgaatatgggtgaaactcgtattatttccagtgctattctttcagccatagatgaagactcacccagggagaagatttactatgtatttgaaaggcttccccaaaatgggcaacttcagcttaaggttagtgacttcttacttttatttttcaaaactaacgtagcaggtataaatcttctcaatatacacatttctatgatgggatttattctctgatagacatatatttgcctagaagtagaaaatttaattttactagttcagggtgaattcatgctgttctaaagtctttgtcaacatggggtaaattcaacaaatattaagattcttcattgctccctctcccgtaggattatccctaaattctgagggagggaattactggggtaaaccaagctgtctgctttctgaggataatccaggatcttttgtgatatcttcatttctaccagatttttgacttgtgattcatgtaactttcctctttagcatccatcatctcaattataaaactccttcaagtctacagtctttcttgttctctcaatctctctctctctctgtgtgtgtgtgtgtgtgtgtgtgtgtgtgtgcgtgtgtgtgtgggtgtgtgtatttcagctaaattctagatcattctcaggaaaatgaaaactttcattattttttcatgataatcaggtccaaggaaacttggagggctgcctctagctcctctggccctaatgtctctgttaaaacattatctgaatcccagcactttgggaggccaaggtgggcggatcacaaggtcaggagatcaagaccatcctggccaacgtggtgaaaccccatctctactaaaaatgcaaaaattagccgggtgtggcagcacacacatgtaatcccagctactcattactctgcaggcggaggcaggagaattacttgaacccgggagaggggggagaggttgcagtgagctgagattgtgctgctgcactccagcctgggtgacagagcaagactccgtcttaaaaaacaaaacaaaacaaaacaaaacaaaccattatctgagtattatcacctcctgccttctcaatgatttgccacagtgagcatctttctttctttccttccaattctcatctttgtcgctgagcaggggccatccttatgtcttctccagggagactacttactccacaaacaatatgccaaattgttctgtattctatctgacatgaacttaaaagacgaaagttcagtgtcttcatcccactgcagtcccacctccccttgcagcaccagaacccttattgtttaggttcagatgggcaaagtcttggaccaaaaaggcagtgtgggagaaaacttcacgtgggagtcatcccatcctgctagcataacagattttaacaactgccaaatttgaatcccatgaactgcatgacaccgtaaattaacattcctggaattgtatatgttctcaaaattagatgctttaatggaaagcaaataagcatggaaacaataaagggaggattctaggggtaggtcacctgggttttactgctaactcaatagcttgctctgtgatttgataaaatgtccttgtttcactttaggcctagaatagcaaaatttcagtctgattcagactgtgtgcatgatgcccaaggatcagcccaacgtgaattatatagatcagtcacctgagaaggtcagttgagtaatcagtccaaatgtttatttcaatggtagattaagactagcaaccacaaccaccaaccatccccattgcaattatttgatggaatgcttaactttccatctagtggaggcacagtcctagaaaagcagcaagaattcattctatgtggaacagcttgattgtcatagattgtaggcaccatagagaatcagagtgaagagcaatcactgatttaaattgaggtacagctgtgtccttatttcatttcaaagagtaatgaagcagaaatgcagtgagagctcacacatttgggtggcttgggaacggaactgttttggatatgtgaaaatgcagatgggtccaggttcccagtatggctccacacagttctctcccagctccctagcagttctccgagtctttccaagaccaaggaccaggactccagccctcctggactctcccaagagttatcgttttcttattgacttctcttagttttcgccatcttgaatctgacttttattttctttctatttctgggtcttcaaatgattttattaagtcagtcttacattttggagtgcaagtaaggaattacatggagacaagagagaggaaaagatgtcttcttctgtgcttacttccttagacaagattagaaaagggaaaatgtgaaatacaattgcaggctttcccgtttaaaacctgaaagagtctgttttaaaaattatattggcaaataggtcttatggaaacaaactctagcttaattattatgatgtaattaacttccatccagtgagcgtgagggcagaacataagtctacaaacatcagatggataaacatattaaagagaaagaaacgttatcaagtagaatgacataaaggcaagtggtagcacaatggcaagagaggaggacaaagctcttttgccaggaactgggagtctgtggaatctggaagtctgtattctatctgacatgaacttaaaagatgaaaggtcagtgtcttcatcccactgctgtgccacctccccttgctgtaccagagcccccattgtttaggttcagatgggcaaagtcttggaccaaagtatcaaggggaataaaaagtaaatgatttacatttctgttttagactcttaaatgagacagtaaaaccacaggataatatcatataataaattttaagatgactttaaaaaattatgtctgatgactttttatgagccattcctagggaaagctatgtaccttaaatgaacaataataggattattaataagataataaagatttatgattacattttctaacactgtcagttgttagccacccccctcagcataagaacctttttaaattcaaaatgccacaatttctgcatcaagctctgtacaaaacatatgcttaaataatgttggcttacttttagaagattctgataaaaacaatatacgatatttgcagtttatattttttgatgacttaggatataaatgtaggtagtgatagtgatccccatcattttctttctttagtaaggctggaaacatactggggagtaaatgcatctgttctatttttgttctgtctacttcagacaagcccagtaatgagccatgttgaaaaaaagtatatttgactagttgaacatgaaaagaactaaaaaatggaaactctgaaagaaatacatttaatttctaaagaatcccttccaagagctcgattacccacctcctcttattaattggaatattcaatcagctatggttgcttatgaggaacaccttggaagtaacaatgctgttgaattgtttgacttcgtctgaaaccctttggttgaagccggtgtttttccaaggtctcaaattattctaatatatttctttgaaaagaaaaaaaaatcaggtaaagtggcaaaaagtagtctggaatttccctgaaatattatttatattggaggtttttaggggatacagaaaatgtccactaacgtacgttgggggaaaagaaaaaaccatgagcagctgactaactctggctccttccagatagggagggactgggttcctctctcccctggcatgaaatgcactcaggaggaagtggatctgaacttgctgagatacacacacaccggggcaatggattcccagaatcaagatagcttcaccttctacctttgggatggcaacaacaggtcccctgctcttgactgtcaaatcaccatcaaggacatggaaaaaggtaaaagcacgtctaccaaggtttactgggatcaactttgctaactggtataagtattccacattcgtttctttctctctctttccctcccttctttccttttttcctgccactcttcatctttgaaattctatcatttgtgtttagatcctttggcttctcacctgctttgcctgggacctatgtggttcacagaagtagccaatccattcgttattttaaaaagtttattggaaattcagccttgcacacaatatggctatacaggctactttaactgttaggatttttttgctttaagtaaaattttaccaagttgatgtgtaactctagttttatcttcaggaagtgatctatcactggaaaatggagtttcaaaggaaaagtacttctaaaacaataaaataataaatgaaaaatacattttaaaatttaaaaataataaagataaactttgtcattagaaaggctggaagttgctgcttctttcactttgaaagtgctaacatatactctttagggacaaggaaagacactataagatcaacttcttgtgagttaattaagcagagtcagttgtataagtggtgaatgggggagagttaaatggaagatggaggagagtttgtttaaaaagctcagcaaggaagagtagaagctcttgatacccaactgttactaccctgtaattttgcttcagcttatgtgaggatcatatctcattcatctgtattatcccaggatctagatattcccaggatgaagcataatcttagatcctcagtacatgcttgattgactgaatgcttccctttttttgccttggctgccaggaagctcagaggtaaattgaatgcttaagtgcaataataaaaaaaaaatcttgctttatgtgtggcagaattataattgtcctaaatttttaaaaaattaattcagtttgatcttgagatgtttacattgagctgtgtaataatatattttatttgcttatttcctggttgtaaatgtgttccttaaagaagtctaatgagtgatttcagataagctagatgttactgtacacatttatctctccctgcaaaacaactatgttcatcataaatgtatgtccaggcaaatcgtaatacaagtaatatattagggcagacaactagtgtattagagtaggccaccttctcattggctcagcacaacacaactttacagtgacataggagagctctgttccacatagtcatctagggactctttatatctagacattcccttattctgaaggccttagagtcactcaagaagtgagatatggaagaaaattaggggatgtcatgcactaggtgtgaaggttgtgtacctctcttgtacacattccagtggctgaatcacagccacatgccacattaagagaggctgggcaatagaaactttagctttgcacccaggaagaaaggaaataaagttagccagtgcgttgccagactctgctgcaattgacatgtgattattttctaaaaggatttttgaaaacctataccgagtagacacattatcctattaacattttcagttcaaattttttcttctttgtttcttcttacaaagtggtgttttgtcactgtacagttttttgttttgttttgttttgttttgttttacttaacatgagttttttcaggttgctgcataactttgtagccataattgtttatctctaaacaagactatactaaagagttagatttaatcacaaccttaaagttgagcatttggttgtttccatttgggagctattataaataacattaagcttcccaactgctgtgttgctgtgttttctgatttgcacagtggcagaaatgatgttgagatctttcagataagtttaggaggacattgtctatagttgactctaacctacactctgcccttacagtgctgaaaacttgcatcaaggcaagagctggttgctcttcctcccctcaggtccatttcctgctcctggtgaaacctctcgtgggtgctttgtgtttcccccacctaattcattcttcttacttccttgatgtattcatcttgcttctgtctgtagcatctgtggctaaggttttgatttaaatttagaatggtctttgattctacgtaggactgaagttgcaaagcattttgagataaaagcatagtatatgaaaagaccaatttagtaatctgaaatagcgttttccaatcatggcaccattgacattttgggatggaggattctttattgcaggtgactcccttgtgcattgtaaaatgtttagcagcatcccaggtctctgaatctagaagccagtagcaactcccagttatgacaaccaaaaatgtctccagacattgccaaatgtcccttggggagcaaaattgcctgtcgttgagaaccactggttaaaattgtaccactttgatggtttatttgtatttcttatttcttcatgaggctgaatatctttaaaaaaatttttttggccactgtgtttttaagttcagaaatagcttggcatttacatcacgtgtttttctttttggatattcaccctttcagtattagttcacaagagctccctaggtattaaagacagggaacaaaataatgcagtgtttaagagcttgtgctctgggctcagatggcttgcgtacgaattctcactcaatgttttattaattttgtaaccacaagcaggtaagttagcatttctataccttagcttcctcatttgtaatttgggcatatgatatgacaatacctcacaagattagtgtgaaggtgtaagggtctttagttctgtacctgacatagagtagaagccctatatttgagatatgatcacttggtaatggacgtcaggtgaacaaaattcaattatggtccctagtttgtgaaactgcatcattggtccatgtgtgacccacttctaccttcctcagtcatacatttaaaaaaaatagtggtgaattatgcataacacaaaatgtaccatcttaaccatttttaagtgtaccagttcatagtgttaaatatattcatgttgttgtccatccaatctccagaattttttcatctcagaaaacttaaagtctatacccattaaataatgactcctcatttccccctccctggcaaccattgtcctgtgttctgtctctatgagttttgctactctaggtacttcatgtaagtggatatcttttcatgactggcttatttcacttagcataatgtccccaaggttcatgcatgttgtagcatgtgccaggactcccttcccttttaaggctgaatggtattacagtgtatgtatatgccacattttgtttatccactcatctgttgagaggcacttgagttgtttgcatctcttggctattgtgaataatcctgatatgaatatggttgtataaatatacatttaaaaaatatatcatgaacatttgtgcaactaccacacaattgaaggactggaatattaacaatagacatcttcctacgttctccagaaaaaaataccattctaaattttgtatttcttcttacttttatcattttctcagcttgctcatataactaatgaatgttaataaactacatctgtgttgttccatgtagctgtagttcattcatttgactactgcatgaaattcagttgtgtgaacagaacacagtttgtgtatacattcactttttgaaaaggcatttgggttgcatgtaatgctttcaattacagacagtactgcaatgaccatttgggtgcatgtctccaagcgtagcagggcaagtgtttctttcaagtacatagctggggtggaattgctgggtcaaggtatacgtgaacattcgactctttacaaaataatgccaaatcttgtaccaatttacactctttccaaaattgtatgcaagactctcttgagctatgtcttcaacactttgtacagtcaggcttctacatccttgccaatcaaaaagttatgagatgacaatttatcatgatatttgtatttccataattactaatgagcttgagcatttaaaaatatctttactggccacgtgaatttcttcttctgtgaaatatctgctcatgccttttggttaattatttttattcataatagttatataaacctttctatgtcgtattaattttgatttttgcacagttttggcctttgtcttctgcctttgccttggacataatgtgttttttgatatgattattgaccataacctcttatgtcatgtaggtgatattgtcatccttacaaaaccactcgtggtgtctaaaggtgatagaggtttcttaacaaccaccacgctcctggctgtggacggaacagacaagcctgaggaactgctctatgtcatcacctcccctccgcgatatggccagatcgaatatgttcactatcctggagttcccattacaaacttcagccaaatggatgtagtggggcagacagtttgctatgtacacaagagcaaggtgactgtctccagtgacagattcaggtgagccccatggaaacttttcaaaccccttctttggattaatacttacagaaaaggagatctgttaatgtgcttcactatagtaaccatttcacaaaatacatgtatcttataacatcacgctgtataccttaaatttatagaatgaaatttgttttttaaaaaaaggaaagaaaaggagaaaaaaatgagtcatttttcagctctggtgcagctgtgtttttcttttactgtcttgttgtatgtaaggtgaagccacacgattaaaatgacagaagcaaagcaagaaattagggcctgttattgaaaaatatacacagtaaacagatctttatgcaagttctgctacgaggagaaatgtgaaaagctgaggctcccagctaaagatagatctggaaaagtcatttccctctttttggagtatgtttttctgtctgacgaaaagggatttattagtaaacatttggcataaacagagactgccttttgacacaatgtgttctggtaactgtatcataaatcatgttgtcataaagtagatcatatttccccatagaaacaatgttgtaattgggggctgcgcacctgttccagaattccgtatcaaataaatcattggaatgaataacaatctggtgaaaaggcaaagatacaacattaatgaaaatctacattcatttaaaatatggaaatttgtttcaagtcacataaagcaagagccaagtccagaagatctataatctcgcagctctcaaagctggttgatcctgaggtcctggagagaaacacagatccccaggccgggcatgagaactgggaaatgttggactttgaacgaaccattgtatacaatccagttttgagttctgtcagttcagaaggaggcctggagagcactggtttgtctattgtacacccacacttttggttcctggtgcaattttcaccacgtcacaatacagtcttctaaagagcactataaaataacataaatggagcatactcctatattattcaatgggttcccataaactatcaagtatcactgtcacacccatgttcgaatatcactgtcctctatcttacttttacctatctaaattcaatatatctgctctgataaacactggttagatgtcagtaaagaggatgctgctcacctttttagcattaaaatgatttttgaaagctgatttggataatccaacaaaacaaaacaaaaaatcccagaaagctggaacgaatatcttatttttttctcttgataagtgtcccttaacaagcaggtaatcatttaattgatcaatattttaactagttcagtctttgagtgttgctaggcattcactaaaatgtgagatgtggggattccttttcaagctggctcttttgtttgagagatggagtagtgaagttaagatacaggcttgggggcaagaactgcctgagtgactcacaactctgtgacaatcatcaggttacacaacctcctgtgctcttgtttcctcttctttgaaatggaatgatgctcgtagcacctgcctcacaaggttgcgggaggtttatatgagcttatgcatgtaaagtattagtagaacaacacctggcacataggaagaactaagtaagtgttagctactactcttactgtcgttgttgttgtcattatattctttccttgacgaccttcttccaatctttacaacaccaagtatgatcttgaaggaggaaaggagttaccaagaggagcaatgattgttctttttttcctgtttgcttatgaaggctgggtgcttcttggcttaatacatttgtatcagatccagggcttttaattttacatgcatttctggaacttctagcttctttcatttcctgcttccctccgtcaatgcccacaggacagtctgctgaagacattagtgactgtcttgaagaaaccagtgaccttgctggagaacacaggactgaatgcataaagatgttcagaaatgaaggttagatattaatcgaatggtgagaataaagaacaaaacctccgtatgaaacgattggcaatactgtaaaaatttcctaatttgcatccagagaaagtcttattagatggcattttagaaatcatttatcccaggaatttctacatttctggatcctcagataattgccagagagaactacaaaatgcaaattcttgggccttaccccagagaggcaactttggtaagtccagtctcaggcccagaaatctgtatttttgaaagatatcttcaggtaattctgatgcagtcaggactagccatcaatagtctggtctagtctgttgttctgaattgttctgaggagcctcaagaatttatggaagttgaggctggggcagtggctcacgcctgtaatcccagcactttaggaggacgaggcaggtggatcacctgaggtcaggagttcgagaccagcctggccaacatggcgaaaccccgtctctactaaaaatacaaaaaattagttgggagtggtggcgggcacctgtaatcctagctacttaggaggctgtggcaagagaattgcttgagcccgggaggcagaagttgcagtgagccacgatggtgccactacactccagcctgggcaacaagagcgaaactccatctcaaaaaaaagaatttatagaagcctttttagggcctcccagagattgagattctggggccttcagcccaatgtactgatggaacttaggtgtgtgtgttgtgtgtgagtgtgtgtgggtgttgatactaaaaacagtactataaataccataaaactaaatataagaaaacaaattttttatgcttgcaagtattcagtttttagtagttaaaaggtttccttttaaatacattgattcaagttaaaaattgaattgatagaaaactagtaaataataagagtacacatagtacaggcatatggcaaaaatatggtttcaattactcaagattaggaaacaaggttttagggagaaaataaacaataaaggctgaaaagcattgatttggtgcaatcccttatttacacataggaaagctagcattgcctgaacacctgcaatgcaccagagaatgtcctggactttttttatatgttatttttcttaagccttatgacaccaccttgcgagagatgcaatagtgttcccattgtacacatgagaaaaccaaggttccaagaggcaaaggaagtcacctaaactgacataactgagtatcactgctgaatttggggctcagagctcatttccagtagaaggttctttccattatacctcgttgtaccaaaaatttgtggagaatatgcatttgtgtgaaggaacctcctcaatgtgtcattctgatatttggccagcagttttacatatttataatggaagagcctagcgtctgcccaagacccaaattttaatcttgtcatttcactaacccaatcacggactgctatgttgtttgtcaagtggcgctaaaccaaagctgaaagcctgttttaatgaaagtgtgatcatggtgctttttaaaaattaaatatatgcaaccaatctaatcacctaaatttatgttgcttgctgttaaatttggcaaggaatttggctgggtagaagagataaattctgtggcagaggattttcccccttccatttttaatgtaagctatggcagcattaattaaatgggggagtttaatagtcagattttaccttctgcaaaaatattttgtgaatcataaatttctcctgcattgtttggtgctgctggcctggaagaaagatttggcagcatgttctaggacagatgacaccgagtgattagcaagctgacttcagctgctggcagccgggtactaaaagaacatgctaatgtcctccattttgacatgccggctggactttttttttttttttttctgaggagctggcgctatttatgattccatttttatctcttaaatgccatgacagatggcagcttcttcagccaactctattgccaggcaatgcagaaagcttgaaagcaccgtggtaatggtgaaatcagaccaggcaggcaccccagtcaaatctgagagttattccccaaatttcatgagagcggtggtcatcttggctgcatctcttctcagggggatgtaacaagggaaattaaacaaaatggatccacagaaggagctgctaccaccaacttcttcacctcagaatggataccaacatagcaatggctttatggttttaaacattgagaatgtatttggaggatttaggggagggggtatttggaagaccatctgattgatcagcttttccagacatgaacagcactgaccttttttcacgtgtactgctagctttattttgactgggaactcaaccgtaaccattcattctgtccctctctctgatgatgtctctctgcctgtgagtagtttgcactgttacttgtgaaagtggaatgatgttatttgatccagtcatgtttagaaattgcatcattttcacccctggcctattagctttaggtcagcactgacagctgccttggtgtcccagataggagcgctggcctcagaaaacatatttcttactcttctgtggtctgtggcccgcgtgccctcactcccatctgtctgatggcaggctgcctgtttccaacgtgggcagatcacgatcttccagcagggaggggtttgagatggacagcctggatcataagacaactgcggtgacctcacagaggccatgcacgcatcgagtagatgtggccgtcctgagatgagctttgaggaccccgtcaggcattcttgcaattcagtctgcagggaggaaagtcagaattagatattcaagatggccgcctctgatggagtccctggcactcactcaagcttgcatttgggtttgttgctcctggtcccatctctccccttctttcttcttccttctctgctgatatttgacatacttttaatagtgcacaatgtctatagctctacaattaatgctaatgctaaaaatacacgtcctttggcttatatttgcgctaaggtaccaatggctgatttaacactctccacagagcacacttgatacagggatctggtaaggaacagagagccagtttaatgtgaaacagggtagaatgagaggtgtgaaacatatttctggagggggaaaatgggaaaaagggaacttggaggcactgagggagcacctagcctccttcctattttattgtgggtcagatgataggatctggggggaatatgaaaaagtaacagaaaaacaatagaataaaggcataactctgttctcaggctctgcctgagaaataaagcataattttatacctaaaaatgtatatcagtttacttttgaaactgtgaaggtgactaagtaaaaagtttgaagaacagacatatttttctaggttcctttattttcttttttaaaattatttttctttttttaagatgggcttttgccatgttgcccaggctggtctcaaactcctgagctcgagcgctccacccaccccagcctcccagagtgtccaagctataggcgtgagctaccgcgcctgacttcctttcctttccttcccttcccttcccttcccttcccttcccttcccttcccttcccttcccttcccttcccttccctccctcccctccctcccctccctcccctcccttccctccctttcctttcctctttttttttttttttttttttttgagacaggttctctgtctgttgcccaggctggagtgcggtggcacgttcatggctcactgtagcctcaacctcccaggatcaagtgatccttccacctcagcctccctagtagctggggctacaggcacgcaccacacccagctaaattttgtattttttgtagagaaagggttttgccatgttacccaggctgatattgaactcctggactcaagccatctgcccgccttggccagccaaggtactgggtttacaggtgtgagccactgcaccagcctcttttattttttttaataaataattgatttttataaatgcctcatgatccagtaatgaaattgcccaatttgttaaaaatatacttatcaaaggtttaattttatgaaaggaaaactgattggtttgttttgagaaaattatgtgattttgctcaatctataattctaaaggtaactgaatacctttattcaaggtgtaaaaaatgctgctgtgggggaaatgtatgaggtttcattctttacaagtcgaggtgtgtgaaatgtcaaaatttactttatttgttgtatttcacttagcaattttaactttttggacatagatttctttttctttgcatcaaatcagatatattttccttgtcaacagtcttattaactagataattagaaaactaaaaaacttcagcatagccttcaaagcaatatcagtactcagccaaactcatctctttttactttttgtctaactgccctccctgagtccgtggtcgcaggcaggctggttgactcgttgctttcacactatctaatagcttcaggtttcttcatgctcaaaaggatcaatgctcaaaccctgaaggacaagacacatttcacaaagaataaagggattgttagtcaaatctgccagatttgtaaaataaatataaatgccataccttctctagttaaaaaagaacttccaaagaaaatatacaatttatatatgtatataaaatttatacataaaaatgttatgtatagtttatacattctacgaaagcattagttttagaggtttttgtatcggtggaatagaagagtgcatcctctacgaatatttccagcaactatggtacatggagaaaagctaacaaggcacaattctgtgattatttctaagtacatttctttggtgtacagtgaatttgtcagtcccattggatagtaacgatttcctaactttttggagttttaatattgtgccttgtttgcataatttcatgatactcttaatcttattgaaataaaaattacatattgtaatgctacaaagatcatttaaatcagtgttattgtgaaattggcttcagtaggtagaatgtgatttcatgatcaatagaatcaaaagcacattaagatatcacaaacctaagactgtaagaaagattttgcttgtctcaaatgtgtatcatttcagctttctttttatagttttgcaatggtgctcaggcaccacaactcttttgtggtggattgctaaaccagaatttgttttaaactctgcaagagtagtgggtgcagggattaaaagacctgcattctagtctcagcttcatctcctacctgcccttatgatctcccaccaactttgtgaacctttctttgaagcaggaaaataatccttgtgtagcataactctcatctgtcttatagggggagaaagtgcagaagcacatgtaaaccataagagattagagcctcccgtcatattttagagttgggtggtacttaatgatcttctggtccatccccttcatttttcagagccatggaaatgaggcctggaaggggaagatgatttaagtgagattacatgtctgagaaatgtgatctgctattaagaaatttaccataaaaacgtatgagtagaatgaattagctaaattcaactcatttagcactttattgtattggcctcccagttgtcagacttacaactttagtctattacacaccaatgaagaaaaaaacaattgaaaaattataaataaataaagggggtatactcttcaaatttgtatgatgagtctcattggatgtgaaatttttatttgcgtcaaggaaccacattaagcactgatgagcctgagaaatatgattgtcagaatttccctgttccatcacatgggtctgtcattaatgttgttgggaaaatattcttgggtgtagaatggtccatttatgcattactctagtgactggtttaatgatagggatttttctgcaagatctgcccttgatttttcatttgagtcacaacacgacaataccctttagtaaaggtgtgtattgttatcatttcattccagtagatggtgacacaagaatccatgctgaaggctgccttgcctctctttaccagattcatcatcagcaatggactgcggaccgagcacggggtgtttgagatcacactggagactgtggacagagccctgcctgtggtaaccaggaacaaggggttgagactggcccaaggggccgtgggcctgctttcccctgacctccttcagctgaccgaccctgatacacctgcggagaacctcaccttcctcttggttcagctcccccagcatggccagctctacctgtgggggacagggctacttcaacacaatttcacccagcaggatgtggacagcaagaatgtggcctatcggcactcaggaggggactcccagactgactgctttactttcatggccacagatgggacaaaccaaggctttattgtgaatgggagagtgtgggaagaacctgttttattcaccattcaggcaagtatgaaaaacacagttcatttgccagagatgtgaaaacagtgacatcgagaattttttttttttttttttttttttgagagggagtctctctctgtcacccaggctgcagtgcagtggcgtgatcttggctcacttcaatctccacctcctgggctcaagcgattctcctgcctcagcctcctgagtagctgggcctatagtcatgtgccaccatgcccagctaacttttttgcatttttagtagagacacggtttcaccatgtcagtcaggctggtggcgaactcctgacttcaaatgatccacctgcctcggcctcccaaagtgctgggattacagtcgtgagctatcacgcctggccaagaactattttttaatttcttttcctctttcattcaagtacagattatgcatctacagcaaaacagcaatattaatatgaatgaaagagatatggtcccctcataggtgctaatgactgaccgtgagtgttgatggtagcacagaaaggagcaaaagccacacgctttggagtcagacagacctagctttgaatttctgctttgcaatgtattagccgtctgaccttaaagagttctttaactcttctgaatctacttttccttctttgaaaaacatgcctacagcattgtggtgagaattcagtaggattaggtatccaaagcagtagtatatggcctgaaacatatttgatgttgaaacttacaaggcagcatctttacactattacacatataataatgatgagggtaataatagcagcaattgcagttcctttagtgttaactgcaagctagacccactccacataaatcttatttgattctcataaaactcatatgaagcaagttttgttatttacattttatagatgagggtacaagttcaggagttaaataatttgatcaaatacacacaaaggcctcaagtctttctgatcccaaattctgtgtcctttctatgacactacactgccacatttgttgactgttacaaggattcctggagggcataatgtgtttttcttttttaagtcaaaacacatcaagtatattctggctctcaaacccttgaatctactctccttggaagtagttcaccctcttctacacactcacaccaaacacaaaatagataaaatttatctctcacttcagaatactttctgactagtaaaatagttacatttttccttgctctgagagagagagagagagagagagagagagagagagagagagagagagagagatttattttaggaaattggctcattggctcatgcaattttagggcctggcatgtccgaaatacacagggcacgttggcaggctacaaatttcagcaggagttaacgttgcaatctttagcccaaaggcagtctggaggcaacattccttcctttttggggggcttcagtcttttctcttaaagcctacaactgattggttgaagcccacttgcattatggagggtgatctctttactcaaaatgtactgatgtaaacgtaatcccatctaatacacaccctgcaaagttgacacatgaaatgaagcctcacagactcttatctatgagggaagtcttgagatcatagagtggatgctggatgagtccttggcagtcaggaggtccaaaaaatgcaaagaaatgataatgcactgggagaagaaagaagatattgacatcgtgaacacagtaagaagcactttgtattaaaattattgtttttatttttatcatatgttttaattgatcttagtcactttcccttttcagtctgttagtgtcttttttttattcctaactcccctaacctaggttgataccagtctctgtactgtccaaccagggatacttttctgggtctctttggctgcaaattcatacgaattctaaattctgagtgcagatgttagagttccttcctacactccatagcacagatggaaaagaggatggagattggggaaagtaccagaacttgaatcaggtctttcccaacaccaacactcatcttaaagagcatggctattgtaagagagttatctattggaagttgtggaatttactgataggaaaatgttggacatatattgtaaagtttctttttttttgtcaaaagtataaggctttccttgcaaaaaaaaaaaaaaatcattacgtgtaaaaaccccacaaggtaagcttcaaaattcctcccataattccccagaaccctcagtctctttgagcagagaagtcaagaggctttagaaagtgactgaccccaccagcagtgtaggagagatgacactcagtgtcttgccttcaagagctttttctgccaagacaatatggatgttgatcaccgttgagtgataaactgtcccaaataagtctcccaactatgggtaaactattcttctggtggtacctgagtaattgagggcaaaactgctgcaacacacaggtgtatttgactgataccagcaggcacaacctgacattcatttggtaggaaatcttttctgtctgaccaagattattgcaactgatgcaacctgtacttctcctttaaaggggtcaggtgagcgagaaaaatgtgatgccattgctttctgtgcattttctgtaaatacaacacaagttatcaggggacagagctttctttaaaaaaaaatcttgcaacccaatatttaaaaatgcttctgggatactaagccagaagatctacttttgacaaagctagaagttgaataagatctaggatatattttaatgtgaccagagacatgacgggaccgtgttgctagagtttagatgtccttttaaaaacacatgatcacgacaggcatttattacttttgtaacactttcatttttaaggaattataacatccaaaaccaaaataaaacaaccatctacattcaactattcatttagtatcaactctgggtatttcttatatggcttagaagtactttaattttcctcttcttccactaaccatctctcttactggccacttggttgtgggagcttcttccctcacgggccacaatgacaatttaatacccaatctcattgctttgaaagttgccacccatactcttcaggagaggagaagaatgactgtgacttttgaaaatgtcagttgctttttcagtttataaaataactatgtattgtaaataattcataaactacaagaaaaaaaattcttgacaaccataccactcaaaaacctattgttggtggctttcttttattttgttcaattagaaatgggatgatattatatatactattttttatgcatattgcctgtttccatcttcatgtgttatgaacatttccttatgtcattaactattcctgatagttcttgataactaatcatattcctgataacatgatttttaaaggctgcatggaactcagtctcaggtcgagatggtttataaatcccctggtggacttttcattccttttgtaaattgctattataaatagtattttggtgaatatatatctaatcatttttgcatacatatctgtttctgcaagatacagaaaaattttcactgttttgcacccctaccagcaaaatataaaaatatctgtttcttcacatatttatcatcatgagttataattatttctgtttttttttaagaatcttgccaatttgagaggaaaaaatggttggttgtgacaaaatttctcatgaaataaacagaggaggagttgtaatctttccccaccccaaaagaaatgaacacatttgtgcaaatgctcccagatttttgcctatgtctatacaaacattatgtatagataaatatatatttttaacaaaaatagtattataattatattcgaattctattctgcaacttgctagggtttttcagttaacacaaaattgtggaaatttttcatcatcaattcattttctcccttattcttttgaatagctacagagtagttcattgtatcataatacacaaaaatatacatggtcttatcattgacaagaattctttactttgctagggcaaactaagatttacagtagtatcaggttggtgtaaatgaaattaagaaccgagagattaggagtgaggggaatgaagattcttgtacatgttttctagtatcagtggtggatctgttctaatccatccaaacctgctccatccataacctacaacagtcatcttgcaaatgcaagatgcactgagctccgtacagactgaacgaggtcctttgttgtgtttgaacctacagtgtaggttgtgaagatgtcatccaccatcttcacaaatctggtccacctgttcagctacctggctctcatcttcaatgaaagaaatatgcaaatgtctagaaataatcacctttcactttttccttactgaggtatctctatttttattcaacatttttgccagttgaaaaaagacatgccaaaaaaatttctatatatttgtaaaccctcacaattttgtgtctgtaaatcactaaataccaggaaaataggagaagttcttctgtggagttaacatgaagtctgctctagaattcttgggtcaattttagtgtattcatttaatagacattccctgggcttctattatggttcaggcactgtgccaagtgcagggaatccatggcggtgaaagacctgacgcctgccctctcggaacttgtatcctaagtggcagtcaagcaatagacaaattgataaagtggagtcaaggtttacagtggaaaattggcctctgttccaagcactgtgatatttgctgaggctgttgtgaacaggactgtctttagcaggaatccactagtgaggagtataaggaatccaaaacgtgggacagtgtgtcattgttgaaccaataaagcccaacgttgcatgggggtgaggggcctttggacaacattttatgtcattgttgatgatccaggtagaccaattggacaaaacagctcctcgtatcacactcttgcattccccttctcaagtggggctcctgaaaaatggctgctacgggatttacatcacttcccgcgtgttgaaggcatcagaccctgacactgaggacgatcagatcatctttaaaattctacaaggcccaaaacatggacatctggagaacacaacaacaggtactggcctccttaatccttacaattgccattttaaaatacccagtggctggcagggctagagagtaatttaattaagtgcaggcccatttggtaaacactccccagggcttactgatagatgcagtttataaatcaatattgctcctaaagagggtttgaagctgagccttcctaaatttatcctgactggaagaaccaaatactgatatacaactgtttatttatattttttttctcaacagctgattataatatattcaaaggaacataatatcaggaccaaatttcctatttgtgactaattttttattctgtcatgaattctaaatgactctaaatgatgtcagatctttttttaaaagttcttggtttttttcctaatggattctctggattgtatattatttctactttatgagcacaatgatcataatacatcattaaacaggatggcaccaagttacagatttttattactgtatctttctactctccttctctttattttcatttttttaaggcaaatatttctgaagcagtcaacttaatgcctaatttaagctcgctgcatttgagttttaagatagttacagtaatgttaatttcttgttttaaaatgtactttagctgttttttaaagctgtgtttaaaataaaatagccatacaattttattagcttttatttaatgttttgtttgattacccatgatattcatttatttctttttttaggtgaatttatccatgagaaatttagccaaaaggacttaaacagtaagactattctttacatcataaacccatctttggaagtaaattcagataccgtggaatttcaaatcatggaccccacagggaactcggccactcctcaaatgtaaattctcttgcttattcagtagtcctatatgttacatccataatgtatctgaatattaggaaagtgaaatgttctttttaaaacagaacccaagaagataaattaatagaccatttcacaagctcatggaatttattttggagaatgaattttctttttattactgcttgaaaataggaaagccagtagctttacagagtacagaaacattaaaaagctaagttgacgttcatattatgcatgtcaaggtacacacttttatacacagggagggttctgtcttaccaattcactagcatccaacactgagtttgcaggttcatgtagcaattgtgcagcaagaggtcactctaggaccgtgttagcaactatagccttctaaaatatctgcagtcggggaaatgaggtagtcaagaagagttagccaaacatcttctctttctcttatgaagaaaattacaattacttgacagtatgtttataaggtgataaacttatcccatgtaagacaaatataatgtaaagaggaaactagactttggaaggtatataaagggtatgaccctcaaaatagcaagagtaacaaatcttcaaaattaacgagattaacagaccacagcaatttcactgactgggtccctactctagacttttcttgaatgtagaccttgaatatcttaccagctaacagatagtcatagaaaggtcggtcagagtccagttattctggtactgtgctgttttttgtttgtttgtttgttcattttgtttgtttgtttttgataccctcccagaaaccccaaagaaaagttgttcacttatccttgttttagtagtcaccatatcctagtcatactaagcatcataagtgatacagctctgtgctctgttatactccttttatgatggagtatagattaagaaaagaaagctgagaaactcctctgcagtcttcagaattcttgcattttcttttggatcctgaattgtagttctaaaatctgaccagcagaggtcacagtagtcattgtcagaaaaaagctagcctccttttcttagcaaaacacattcccagcgtcccactccgttgcctcgataaaatgcagagcctggcccagatttattaactccacagacttttatcgagtggctactatatgccaggtgcacagtactaggagctggggaataggttagagcaaagtagacctggcccgtgatattaaaatgtaatctcgagattacaaaatgtaaaacatatgacctccacccattaaactgtctttgcctaagacaaataattcccaggatcacaatctttatgggaaaatatgtcaagtacttgcaatgtcagacaaatatcttccaattctcaagaaaatgtaaaaaaaaaaaaaaaaaacctgctccaaaaatgttaatacgtggacttcactttttttttttaacattttaaaaataattcaagtaagaaaacataggaatgttgatcagacttgctactgacctaatgctcacctcttgtcctccatgtgtgagcgcagtgtagctgacagaggattttcttcccccagtaatgatgctaggctgatactgcttcacccatagcccctttcaatctttgtcactatcaaggacattgcttttggaagatgatttatatttttaaatatactctcaaattcatatgagaattacagcaaaatttgcttaatttaattataaccttaaatgaggccatttaaatatcctcctgcttttgttggctattaactttcatgtgtctgtgctggagatgtttccagttcaacttgacgtaatttgttcatttgttcatgactgaacaaaatgctgtggcatatgcctaccaaggggtaatatagagagaagttttatttggttctgacatatattaggctattttctttataagcgatgggggggtaaaattactcagcatttatcatcatcatttttgaacggtatagttgtcctcaaccccatttgtaagcagatgttattggaactaggtgcacaattttccagtaaaaagcaaggttatgaatagtggttcatcttcccaagacagccaggcagaacgtagttacaggtacaatataaattacagccatttgcaatataattggtgtttgctctatttcattgctattcatttaatcatcagaaccacctatgagtcaggtaccatcataatctgaaatttacagatgagaaaactgaggacagagctagaaagtgacttttctaagtggaaatgcagctttagagtgcatgatttttctcagcacactgaagaacttcttgcccattttaaggactgtgctaatctggcctgaagggaatggaacaccagacttgtcttcttctttctcttcagacattggccacccaagcaagaaagaaggaatacttactcatataggaccttaaagttcagtgggattttttaacatgtacattatagatctctatattagtgtgcacttcgtatctaacacactagaatttatactatagataataaaccaccgaacttggagctagaggacaaggtttgagctttggctctgcccttcatctagtaactgttcaagccttagttatctcttctgtaaaatgggagcgatactacaatttgtttagaaaaacaaaagaaatgtgtaacgtatatgaaagcatcttgtgtatttaaactccttaacaaatgcaacttgtggtgattactgttgtagttaattcatgtaggtacaataattgactgaagaagtatcccggaaacatttggtggattagaaagcctgcctctaattagaaattgatcctgggatgaatcacaaagtgaacagtcaatatgcatattaatcaatgagctaaacgctgtggaactttgtggtgttctttggcttagacaggattaatagattcatattccccatatttgaaggggtgaaacctctgtgataaagctcaagggactgcggggtgccatctggaacagaaatggacctgttttagagcacgggaaggacccatgttcagtggaaaattcagaatcttgactgttggtcagttttggctattgcaggattcctgtggagtcctgaaggatgaatagatgctccactctaaaaagcattaggaaatgcttgtttcgtgagattcatcaagttactgccagctagctagcttgcgtgcttgtttaactgcatcacatcctggaatcatcgagatgtgcgtgtggattgggaatctctcagaaatgaagcctacgcagcaaacctcaacccaactgggctatagaatcacctctctctacctgccaccccacacacaggcagaatagctcagggaaccaatttttcatggaatgcatctgggagtcactttattgtaaatagaaattattttataatgctgatatccttggaaatttgcgtaaagatttagatttagctaagtgcctacatttcaggcactgtgctaagtgttttcatgagttgtctaattttatctgcaaaacacaatcctctgaggataaggaaataaagctcaaggcttttaagtaattatcctgaagtcactggagagtgaaccctgacctccagacctaagtgagtgcgcatcttattgcctcaccccctggctgcaccccttgacaagcttgtgcctgttttctagtccaagttgaatctccaagatgatccgcagaagccccaaactaagttacacaggacccacatcattcatgaaaagcacttttgtggaccacagaatgtggccaacttctgaccaaagttgttttcctaatacagcttctacgtggacctctttcttgtgcccactggagaaaagtgaacttcaaaagcaatgttgaatgcagaagtctttgataattcagtgactgtttctccggttctgcactctgattcttcacctccctctggcaactcacattctaactgttctgttgtccatttttggctttaaaagagaagggacagaagactaaaaggaatttccatcaggcaaacgttgcaatgtttagcagcttttatgaaacacctgataggggaaggtgtttggctagctaatacctgcacattacctgcaagccaggagttaaggtttttgtcttcagactagatcttaggaaagcacagaggaagggaaggaaaatagcatttattgggcacccactgtgtacaggtgctttatacatactaactaattttaattttaatcattttacatgagtgtaattctcctcatttttaagataatgaaaaccgaggcccagagagactgagtaactgaccgtaatcacacactaaatcacatactaatcagtggttacaaggtgtgcttgattctaaagcacttgttttgggtgcacactatgctgcctcttggctaaacactgtttccccattatcaagagaaaaagagaaaaatgaaaacacaggtgttcatagcattcgattacggagtttaatagcatcatctatgaattgagaagtcttagattggatacttgaaaaaatatttttttaacattttcaggaattcttgtcacatgctacttgattataaatgaagatatagttataaggatagtaatttaatcacaattttagcttctgtaaaccttttgctgagaagctcaaaatacttaatgagaattcatgaaggttcacttaacccctttgaagtacagacttatcattattgcattttgtaataatgacattattataggaagaaaggaaactgaggcatagacaggctaaatatctttttcacagactcttgttaacctggattaatgccccaattcctaaactggtgatttaactccaggtatttctttcagcttcttgtttcatcataaatgaatcaagtagctagaaaataaaatatcagaaagaacatatttattactccaggaccgggtgtctcaacattggcactataggcattttgaaacagaccattcggtgtcacaggggagtctcctgagcactgcagaacattcagcagcaccccaggcctctctcagctgaaggccagcaccatcctcttcccagttgtggcaacgaataccatctccagaaaatgccaaatgttaagaattacacgcatgccttagaaaatagcatacatatgttttaagaaattatgaattatgttagaatgctcatttatcaatgccatctttctctctatgctaataaagcctaacaatagtcaaagaatccagaataagtcagggctagagaaaacatgtgaggatcatctagcctagcaattttttccaagtgtgtgacagatgatgttagtaaggttggggagaaaaatattttcgatggttgtattagtctgctttcacactgctaataaagacatacctgagactgggtaatttataaagaaaaagaggtttaatgaactcatagtttcaaatagttggggaggactcacaagcatggcagaaggcaaaaggcaagtcttacatggtggcaggcaagagagaatgagagccaagtgaaaagggaaacccctcgtaaagtcatcagatctcgtgagacttattcactaccacaagaacagtatggtggaaaccacccccatgattcagttatctcccaccaggtccctcccacaacatgtgggaattatgggagctgcaattcaagatgagctacaattcaacatgtggggatacagccaaaccatatcaatggtcaacttagctcaggagacagtgggataaacaagattcattcattcagttaacagatatttaatgagcactcaccatgttttagatgctctacaagacacctgggttatcacaatgaaccaaagacctgtgcttccttggagcatacataggatctaaatcaatgtgatagcatgcttgctgtacgtggtacatgctctggaaaaatgaaaaacttgaccaggagcagggggatcagcaagtgctgtgtttgggaaagacattgtgattttaaattgggtgtttaaacaacatttcctttacctgactgcttagagctggtgagtgacagagggacctgaagcctcacaagttcaaatccaattttatttccactgctccatgccatgtcttccacttacaacagtggttttcagggatccgaatttatcttcacattgaaccagcttttgctttcttttttttgagatggagtcttgctctgccgcccaggctggagtgcagtggcatgatctcggctcactgcaacctctgtctccaggtgaaccagctttttctattgtgatgaacacattaaaaccgcatatggaagaagttctcaagtgggggtgacttttctcccaaggagcatttgtcaaggtcccgaaacagttttggctgtcgtgactggagggaagtggtgctcctacatctaatgcgaggaggacagaggtgctgctaaacatcattcccacacaggacagcctcccgcaacaaagaattgtctggtccaaaatgggtgggaaagcctgacttagaggcttagggagttttcccctcctgctaaatgacttgaagcgattgccacatgggttacacataaaatgtgtccatggcatacagttctgactgtaaaatgagcgtcactcaatggtgacaggaaactggaagcactgttaaaatgggaagatatgaaccaatccttatctacatgacacctacacatctagaactttacgaatttctctcatgggctcctggatctggacatttacatgatgccaggcatatagctgtgtggcttcttgcaggcaaaattcccaagtgattgactacatctcttatttttcttccaggtgtttgtgtacagtttaagcaatcacagtctctgcgtagaaagatcttctcaaatatactactgcaaaaagcaaaaaaaaaaaaaaaatcacattcaaaacatatattgtacatattctgtgggtatgcaggtcctttgctatttagatatttttctcaaaaatatatagcctggcttaaatttcacggcttttcaatagctctttattatttgtagcgaataattttaagaaaataaaatagagcattgtgtaatgaccaccttgacctataaacgttatgcagcattcaaatggtgcatcagggaaatgcatgcacattcccaaacagtaagaccctttataccttgaagctgaacagccctctgaatggttcccttctgaatttagatcagaaatcaaattgcatttagcttttcgccttgaggtcaccaggatctacagaatgacattgatggatttttacttgtcatggttagcattagcaatggatgaattctcagaagaattggacattgaaactcatttgaaccctactgatggctgaaatccatgcaaatgtatttgtttcattctttcccactgtcctcctttccttcccatttcatctttctctcttttcccctaatccatcttgctgactttttttttctttctcattcaactggatccttttgggattctttgcaacatatttctattggcatttatgatatccttgttgtttgttatcttgtaattctttaggcacacactaatccctcctatctgtgggagatatgttctaagacctccagcagatgtctaaagtgcaaatagtattgaaccctatgtacactgtgctttttcctgtactgcacatacgttgctaggataaagtttaatgtacaagctaggcacagtaagagattaataactaataaaatagaacaactatcatgggatgccagcatcactactcttgcactttggggccatgattatgtaaaattagagtgacttgaacacaagcactgtgacactgtggctggcagtcaatctgataaccaagccagctacagagtgactaatgggcaggtagcatctactgtgtggatgtgctggacaaagggatgattcttgccccaagtggaacagcaggggatgatgtgagatttcatcacactactcagaacagcatgatgtttaaaagttatgaattatttgtttctgggatttttcacttaatattttcagatcacggttgaccacaagtaactgaaaccttcagaaagcaaattgtgaaaaagagggattaccgtagtcatttatttctgtttcttgatctgtttcatgcgagatttaaattcagttgcatcagagacccataaagtttccaatttttttaatacaaggatcctcttttcttgtttaaaattctattaatatgaagtagcaataaactcaaacaataaattttaaatctgactgaataaacaggtatgtttatatagattcatgagcccctgtaataattccatgctcttaccctacccttgccccctagcccatgatgctcagctatgaacctacactgttgagtttatctggctcgtgagcttaatccatagaacgtgattatgacacatgatcagtgtggacacagtggttatttgaagacaaacttcctccctaatatgaatggccccaggaaagcctggagagtgtgtgaaatatgtgaacacatgttccatatggtggcacccagaatttctagttccacaaaaaaagaaagaaattataataaataaacttaaaagtaaagaggaaagagtctaaatctgactagaggtttgggaagtacaagtaaggcaaccactaaggattttgtaaatctagaataaaaggcaactgaataaaaaacaatggaggtgcagttaacaatcgtagtgaaggttgcttgtgtcttttatcctgctctatagtaaggttacagatggcaaaaaaaaggcaagacctcaaaaaggaaaatgtttctgggtaaagataaaaccgtattgctctgcttgagctcacaaaagagtcgcaaagaacttcagttggggagagaaatggtagaggttggatggaagatttggcattagatttatgcttgaatttcatctctgctattagctttgtcatgactttttgcctttaagttagttacttaacctctctgaagcttgtttgtctgtttgtttttgaaaaaaaatgttcctctctagatgaagattaaagaagacagtttccaccaaatgttggactcactaaatatattgtggaaagaaagactatcctctatttctcaggtttatttagttatatagttgcatccaagcctcataccagtagagtcctttttttatgcacagaaagagaaacaaataacacttatgaaacacatgtacattttaattcccaagcacatcctcaaaaatattttgttattaaactgaacccaagttcagagaatatctctgtctggaattgttcttgttgtaccaattatccttatctaaatgataagatagaagacttcctatcagtgtcttttccaaaaaggaatgtctccttgaacttaacaactgctggttcctttcccttcaaaacattcacgattgagtccccttttagttgtaaatatctgggagacattcagcagccttttaaccttagattcttcatttgtgaaatggaattctaatccttgctctgtctaccttacagggttgttgtaaggatcaaatgagataatgttagtagacattctttgtgaactaaaatgtgtcaaataagtcttaaggaatttccatcactggtgtaggttgatcaaccacgtttttccactagtccgctcagcagagaatccctataggcatatactatgcattctcatgatttctcttttcctttcacacacagtttggaactgaagtggtctcatattgaatggtcacagaccgaatatgaagtctgtgagaatgtgggtttgttgcccttggaaattatcagaaggggatattccatggactcggcctttgtgggtataaaggtaatgactctgaaatgtaaattatcaagctaaaacttatgttgttctttggtgtctttcattatattttttttagaaaaattcagagtgaccaaggaaatttcaaattgcagggagatcccactattctgaggattctaagcacaaaacctccttggccctccatccatcatctaagttcataaactctgagatatgattttttagtgtacgtgttgctgaagctagcacaagagatattattattattattgttattttgagacaaagtctcgctcttgtcgcccaggctggagtgcaatggcacaatctcggctcacagcaacctccacctcccagattcaagtgattctcctgcctcaggctcccgagtagctgggattacaggcacctgccaccaggccctgctaatttttgtatttttagtggagacggggtttcaccatgttggccaggctggtctcgaactcctcacctcaggcaatccatccaccttggccttcgaaagtgctgggattacaagcgtgagccaccttgcctggctgagatattaatttttaaaatccatttttaattttgaaagctgttatttgtttctatgaactctttagactttgaggttttatttcatagggagctatattcaactttgtgaacttgggctgaactctgctttagaaagagatgttgtatgcaagacattctgtggggtacccagagcaaatttcagtcccaagaggctttctcttagtattcacctcagtcacttcccatgggctcagttgatgaggcaaataggcagcttaaacccatctatcttaagagttgtccaagccatacaaaattaggagagcatatactaatacaggcaccctgaaatatgaagaattttcagttaaccacttctagatcagtcaacttgctatttcttttcattgatgtgacccatgaagcacaacctatggcttctagaattgaagaattttttttaggagtcgttataacaagagcgcttcaagagaatgagagcatgaaacacttgtacacactaatgatggagaatgagctgtaaagactcccccccaccccatccccccaccatctgatgaaaaagacactggtattagcttctggggaaaaggccatttctattaagtctcaatttaataatgaactcaaatcactctcagaagcctgggaacataaatttgaccatatccaggctcagtatttatctttccagtggacacaggtcctttttcctagatctgttggttacttttttgttattaagacaggagaaaacttggcatgccctatagttttccagaagattgcttatggaataaggaagaatctgcctggatggttttctaataatcctcccgtcctccatagaaagcaccatatgctctaggctggagttttgggccacgccaccattcaccttgccaggtagaaagaagaggcatggtgttacatggaaccttatgcttatttatgctgaaagtgcacaacaaacgtgccagctgagtgtgcaggccttcatcaagcacagtcccagagtctttcaggacaactctaccctgagcacaacctgcagccttacactagagcttggctgcttgactgggagcagggaaagaggtggtgcttttaccctgtgtggattgccctggtttgaattgtgcaccttcacctgactgatttctccaaccaccttgcctcagaccattccttttcccacataggattctgtaaactcagtggtagtaaatactaggtaattggacatgcaagaaccatgcagggaaatgcaacttccagcatatggtggatacaggtgtataatgggctgccttttcacaatgaaaggtggttccagaggagccttggcattgtagacaaagagcaaatggaagcttaggaaggtaatccccttttccagcaaaatgtttccactgctaaccaattaatatatgagggggcctttgatttgaaatggacatattgtctgaggccatagaagtaggaatttttcagcttttcattatgcacttcattcttttgtcagaaggtacagaaatatattatcccacattcctgaccatcttaaacatctaaaaaatacacacaagtaacagaaatgcttgcacacggttctcatttgatgacttatttttcaaatcagccaaagacactttttttttgttttttgagatggaatctcactctatcacccgggctggagtgcaatggcaccatctcggctcactgcaacctccacctcccaagttcaagctcttctcctgcctcagcctccccaggaggtgggattacaggcggccgccaccatgcctggccaatttttttgtttttggtagagacggggtttcaccatgttggccaggttggtcttgaactcctgacctcaagtgatccacccacctctgcctcccagagtgctgggattacaggcgtgagccaccgtgccggctcaaggacacttcttaacatgtgtttgggcaccctttgggtggaattcaaggccatgacttcagagcgctaaaatcgcctctttggtttttagtcttggggctggagctgagaagcaggggtgtatcaatagtctccttagactagggcatttttgttgttgttgttttaaaacacctacctgacggggtccttgaaagtccttggttttgggtgtggatctcctttgtctggttgttcaccaggtcttccggttccacaaaactctcctttcatgtttgtgaagagtaatggcttcatccagacaggaaaatgaaccagatgtgtttgagttaatctagtctaaaggctttcagtgccctggagcttgcaggatacctccaagctagctgacagatcatcacatgggttgtcaggggtacctgctttttcttctcctcatcaattttctccctccttttcttttgagggactattttaaaaccaaattgggatagaaggaaggtaataaaattgtgcttgcaacaaagacaaaaatatagtttaaaattcatgttcctttcttcaataactaaatcatttataaaggaaaaaccaaacaaaacaaaagctttcctttccattgatattagcctaggaaaaagtcaactttaaggaaaatgcatgttgcctggatcccaaatggcttatataatttttttaaaaaccctacctaatattaaaaacagatttaagagcatgagtttagtccagtatgagggagaatagctgtttctctattgtagaatatttatttttatcttaaaaagatttttttttccctcctaaggtcaaccaagtgtcagctgcagttggaaaagatttcaccgtgattccatctaaactgattcagtttgacccaggtacattttgtgtctgcagtttgttttatgtgttttgttttttgtttttttttgtaggcatgtctggagattgtagagaagatagaatgttacacaactttagccaactagaaactcctcagggagccataccacctcactctaaaagagaggtgtttggatttgaggttttgcccttatttttttttagtaacaaatgaattttgatttcaaatgagaagaaagattataataaatatgagatatcaaagcaaacatccaagacaatccagaaaaaaatacagtcacttagaaattatttgaagttctaacacaaagctgttatagtttaattgcctcagatattttatgaaaattttcagaatgttatgtttatatggattcctaaagggcatttctaaatgatccctcatggaataggttgatattaggagattccaggggaaattattatttagttaagtagcacttactttgttttaaatttgtggaaaaattttgctaggtgcaagtggaaataaaaaaggctggtacttgctctcaagtgtgttccattgtgtgagaaacacagacaagaattaacactcactgatagtgcactgggacccaaaagatgagctgttgttcaggctaagagaaatcttggaagacttcccacgggaggcagtattttagcatttagatgaagaagaaaactccaggatgaaggactaacacaaaagcaccaacacacctttggggagctgtgcctaaagctgaggctggagcccggccatctttccctggcttctgtggatgggacaggtagctctgcctcactcactgcatgccactctctatttccctggggtttgagatggatctgaatcaaatgtgggggcttgggagtggcaaatacaatgggcctggagaagcagacaggactgtggctttgtgctttcctgccaaggagatgttctgcatactgagaacactcctctaagtgtgaactattgacatcatctgccactaactcataaagagttgagcaaaggcaaaagaaaatggcctaagtaccagcaccacctcaaaattgcctatcttaatgtcaaacacagaaaagaaatggctctctgcagttcactgcaagtagcatgatgcttgaggactgtgttagtttcttcaggctgtcataacacagcatcaaacagtgggtagcttgaaacagagacatcgagtgtctcagttctggaggctagaggcccaagatcaagctgtcagcatgaaggattacttctgaatcgattccatgcctctcttccatgcttccggtggctgggtggcaaacgttggcattcttagtgtctgctgcctcacctgcatctctgctttcatcttcacgtagcgttctccttgtgtgcatgtctgtgttataaagtccctgccccttttttcttttttgagatggagtcacgctgcgtcacccaggctggagtgcagtggtgcaatctcagctcactgcaacctctgcctcctgggttcaagcaattatcctgccttggcctcccaagtagctgggactacaggcgcacaccaccacacctggctaatttttttgtatttttagtagagacggggtttcaccttattggccagactggtctcaaactcctgactttgtgatctgcctacctcagcctcccaaagtgctgggattacaggcatgagtcactgtgcccagccaagtccccctttttatacaataccagtcataatggatgaggagcccaccttattccagtatgacctcacattaactaattacacctgtaattaccctagttccaaataaggtcacattcagaggtactgggagtgaggacgtgaattttttagaaacgccattcagcctataacagtgaaccttcacttcgacatgcaaaaatctgtattttgtttttggcctccttcctgtgatagttaacattctaactcagataagctggttcttccagctgacctccttttgtgggaagagatcctgttatatatgggaaagattcctgttatttatgtgctgtttactcccacactggtacaggctcttgcggccaacccaacaatccctacaatgaaagggtgagatgatgtgcgccatgtcccttcctacttcatgttaaggcacttccaacttttccatttcttgagtctttgccatatgtcatcttcataatttgaggtctgtttgctacaagatcaggagtaattttggctgctagtaggtttcaggagcccatcaggtgctctgtttggactgataggaactagaacgtgtcacactacaagagactctgaaatctgtctcttggagattccactggataagataaatacccatttgtctagaagagctcacatgctgttttgagtagatactaatgacttctgggggctgtaaataatcttatgattttagatattatttagacaatttaagaaataatataagcatatcttataaattaagaaaaaaacaattggctgttcattgttttagaatttattaacccagaagcagttttgcaaactgaaatcttgctttagagaattttgaagttctccatgtccacaggtccagtaaatatttactcctatcttgttaatccttgcctcttctgggtctggtgtccccatccccatatccaccccttttaccaagggaaatcaatttgtttcttttaaaacggcagcttccatgattgggtgaagaaacagagtgaaaaaccgaagacagtgggatgccgtaaggtttgagaactcttacgtgggagctggaaggaagcttgccttgaagttgcaactatgctaccaaaccaaaaaaataccaaacaaacaaaagcaaaccctaactactttgcattcagctattgtgactagtcttgagtggatataaaaatactcctaagaaaatgattgttttcctttaaaatatgcattattgaaaggcttgcagcattcttaattgatcatcattccttagagtcaaaatgttttccaagggaacagatctctaatgtggcatttactaaaaaatattgagaaaatgtctttcaatagagaaatctgctttgcaggaaaacatccaggaactcacctactctgtaaagtggaatatgtctgcataaaatgacacctctgttttctcttcagcaccttttgttttgtgggaacagggagccagtccaagccttctgaaaatgcttgtatatctcagggacttagcaaatactttgcaccttgaaagtgaaagaggaagggaaaaaatgataaagttttgacttccaatctcattaacctaaagagttagtcctctgtgcacacctggaaggcatagaaaccaagttggaatgcacacaaacaaatcagaagcacttaaatgaaactcaaaagatattttctccaacccctaaccatctggttctactccgtaaggtccaacaaaaaccttaagttttttgttttttgtttgtttgtttgtttgtttggggggtactataattttaaaaaattaaccttaaaatcagagagtcggttgggagttggaaatattttctgtattggattttatttacatgatgcttaactttatggtctttgagggtcaaaacagttctccaagtactaataatcatattattcatatgctttcttcattgaccacctcttatcttttcatgccaattgtattacagcagctgtctatgtggtcttcaaacttctagcctatctgtctatctgcctggatctccagactttctcacataacactctcaggttcattttgctaatccactttcagtgtgtgacttctttgttcaagacccttccctcttgcctatgttgtaaagtctgaatctggccaggtgcccagggctctctgcagtctggctacaaataatctttgcagccttatggcctcctgtccacccatgtaacctctctattccagccagctaattcactcacccttcccgagtcaagacctctgctttgctatcttcctgtctttacttatgttgttttcctgtttcctccctcctaatcctttcacttctaaagcccacatttatataggctctacaatctattctgtatcttttagtaggtaaacatacatagctttcaataattatttgacttttctggttttgcttctgtctcccccaaaagattttaagctcccttagatcagggcttggcttatgttacacctctggtattctccatagcatctaatgcaaagataagcatatcataagtacaaaatatatattttgatgtattgatttatccatccatgagatgggaattgtatggtattattatacatactagatgcttcaacttctgcttttgcaaagactgtgaacgtaattggtttaaaaactcagtactggaagcttaataaattagctgtcagcctgtttttgaataaaatctatttattccaagtacacctaattttttcccctctaagtgcagccagccaaaagtagaagaagtggatagcttcacctttccattgacttctgttgaggattgaagagactgattagatcatgagatctatgtgaggcataccttcaagaaagaggccaccatatagatggacagttgagaggtataagtctgtagaaggcaatctgcaagataaaagagtcgttttttggagatggggacaaggtctcactctgttgcccaggctggagtgcagtgacacatcctgggctcactgcagccttgaccttctgggctcaagcgatcctcccacctcagcctcctgagtggttgagatcacaggcacgtgccaccacgcccacctaatttttgtttttgtttttgttttattgtagagatggggttttgctctgttggccaggttggtctcaaactcctgagctcaagtgatctgcccgccttggcctgccaaagtgctgggattacagttgtttaccactgcacccggccaagagttacatttttaagagaagactttttaaaaagtttaactgtatcatatagaggggcttaaaggagtaaaagcactcaaatagccaatgagcaaatggcagagtaagcttttccatctcagctaagaaaagttaaatcgataagtttactgtgtttattcctcttaaagttgagccttctttctccacttaaaagtattccctttacttccttccaccacttgttcttctaagtaaactcaggggatatcctatgatccacatcatagaaactggtcaggatgagatcatctcagaagtttcttcttgcagtcttaatattttgtgtatctggggttgctttgtttccagtcttggtgttgacaggatggctgggatatgtttgtaaggtcaaaactgttttgtataatattaagttcacaaagttactgtgaaccaagcttgattgtaacttcatgaatagaggcagccagaaagagggaaaaaattggctttatttctagaacccccagcccataaattctctctaggaggatatcaaactactgagtattatatcatcagaaaaagcatttgtgggctagaaagatctcaggaagtggggaagccgatgcaggcagctgtctttagaaatgattaagaaatcaatcatttcaagggttccatgaatagcatgaagtaccatccaataatcacttctgtctgcatcaacagcttaagattttttaaactattaagattttgagattgcaatacttgtttactcttcagaagagaagggacaggttgggaaaataattaagtcttggatctcatctaataaccattttttttttatcccttgcatactgcagcttacttttttgttacagtgtttgcatttaaacggaaacatcatcgtccaggaacaaatgtggtcttttcatattatttgggagaacagcaggacttcagtgagttggtagcagtacaatagctcactcgggctactgcagtctagctgtagacatgttaattaatatatttctctgacacctaggtgattgaaatagcaattaaagagtaattaaaatgtttacttcttgtaggaatgtcaactaagatgtggaatatagcaattacctatgacggattagaggaagatgatgaggtctttgaagtaattctgaactcccctgtgaatgcagttcttggcacaaagacaaaagctgcagtgaaaattttggactcaaaaggaggtattcttttgatcctcatcttgaaatcaggagcggtcctggcgctgtagctcttgccttcaacagccaacgtgcttgataacaccttcaaatcaaaatgcttaatttcttgtcaagaaagcaccctcagtcgtgatgtaggccctttattctggtttctgcttcatgtggttttcctcctgctaagtacgatcacttgagaaaagcaacaagtcagtgccgtagttgtttttttcctacccgtttgttgttctcaccgagggggaaacagtgttggtgagaatctgtcgacaattattttccccagagtctgtagagctataattatctttctctgttaaagagcactcttaatgcctaaaatctgagcccccactgtagtgtgaccaggaaaattctaagagaggaaggaattggagaaaaatagatgtgaaagatgcagctggcttgggaatttgggagcagctggagaatattaatgaatgactttggatggcagcgccaaacaggtcctggattgtctatgctaaagaacaacctgtgaactaaataaaataaagaccagccagactctttggtgctctgatttttttccaccaaatgccttttagttacttgtctttttagcatttgacgagtgttcgtaccatactcaatcttacactcccatttttatacctgtcatgccctgtggtccatatttttttcttgcctggaatctattcccttctcttctctttcctactctataaaaaaatgggacctcccctcttttctttataatatccttgtttctgcaacatctctccccactacctttcctcaccaaatttatttcttttccagtagaattttctggtcacatgaagtacataaaatacatgatatacacaccttatatgtgaaatataaaatacccagacaagggttttgccctcaaattttttatgccttcccagaaatactaattggtgaggtttccaataggagccgctctattaagatttactgggtctttgttctacagcaactaagagaaaagttttataaatactacttaattctatgacatctttaaacaattccagtttctacctctaggaaatgattactttaaagtgcttgtggaataatgcttgatcagtgaataaacttttatgttggggaatactataataagagaagtgagactttccccccagtatatgatatgataataaaatcataacagtgattttcatttggggtttatgaaattgatttcatgactttataatcactcaatagatgtgcagacgagcacagctttcctggatgtaaactgatgaagagtaaaggagtttctggcaaatggcaaaaaggcaacatctggtgggaaaaccatccatctaggtttaatgacaagctgctccaggagctgtgtcaatgtgataccttatctgtttgtgtaaaatgaactgaccgcctgccatcttgcatgcctccaggacaatgccatccttcatattcctccaaccaaagcaagcacagcacatgggagaagggcatttggcatctgctgcccccagggtcttcctcatccaccacttctggttcctttcatctggaaagaagacctcttccatcttccatgcagctagcagtcatcaggggagacaccctgcggggctttgattctacagatctttctcaaaggaagcttaggacccgtgggaatggcaaaacagtaaggatggggaccttctgggaaatgatgtgcaaaatacatattaaaaggatcagaagatattaataagtattctgaaacactgaagaagctgttttgattctcatagtgagtgggggccatggttccttgcacagttatgcagtgccttctgtatacaaagatcttgaggctgccttgcttctttaattgtactgaggtgatagatatgctgattcatccatatgatttcttctttgattccttttgtgaccaagacaaatagggaatgatccatgaccctgaaatagagtgagatgaaatgatgcgattgggtgtggaagccatggctttgaccttattaacacagcattctaaccattgcatactctcatatgtgcacacgcgtgtgtgtgtgtgttcttggacctgtgtactatagatataccaaaaaataaagatgtactttttccctgactggaactctgtatgtgtgaatccacacaacaatcataaattctgattaggcctagtgatttttgaaattccaatgatttgggcgtgggaaatcttaagattacatatgttttgtaattgttcagacattagcaagatcttacttggtggttttaccctattgctagttattagtcaatccaattctgttcatattttgttctctgtcaatttcaggttcgtccatcctctgtttatagaaatggaacagacatcatctataatgtaagtgtagtcacagaattgctaaatttcttatatttatggatgcaagtatttaatgaagctattattttatattttttatatttatacatttctcttaaaaaattgttttgaaattagaggcttgggtgttcagagaaacaaatcctcttatctttttgctttgactgaatttttgaattgctcatttttttgtttgctatcttgatgtttgttttttccttattgttgttgattgttggtttcctcaagtatcatgggatagtttccttgaaactggaggatgacagtttcccaactcacaaaaggaaggccaaagtatccatcattagtcagccacaaaagacaatcaaagtggcagaactgcctcaagcagataaggtggaatccacaactgactcacacttccccagacaggtatgaaaatctttgttccttcttactcaccttataacaagttgtttgctgggccagaaacacacttaattcacaaaatagcctccaaggttggggggatagtttacccaacacaaatgcttcccaacaaatgaagacccaaaggaggtgaatgtgtgagcaactttccttaagtcaattctaaattgctaaattgcctttccttcccaaaggaccagttgccctcatttccaaagaactgcactctggaattaaagggactcttccattttgaagaaggcatccagaagctgtatcagtgcaatgggatcgcctggaaagcctggagtccccaaaccaaggtaggaggcaggctgagcagccaagcacctttattcgcaatgtgctctatgataagctaatagaggggaaccatctggtgcatgactcaacccatgctacatcttcctgccattgttaacaacttgaaggccaagaggaaaaaatggcccaaagtggctttttaaaaatcacaaaatatgttagttaaatcaataccatttaagaagatgtttacttattttgttcagttatcagagtgtcaaagttgtaacaatgaaacgttgctgactgtggtagtgttttctgtaagaagccattgtatttctcaagatggagaattgggattagggctgactccctttgtggtaaccaaactacttgactgaagttagggaactcgtaggactccttatgctgaaccaactccagattgtaaagaccattatgatatgaacacagacaactgtttttcaggatgtggaagacaaatcctgtccagccgggtggcaccagcactcaggctactgtcacatcttgatcacagagcagaaaggcacctggaatgcggctgcccaagcttgcagggaacagtaaggcaccctattgcacatttgattggtgttttcttttctctatttctctatttgctcatggaagcggagagctgcttcattcattcaacaagtattgagtgcctaatatctgcctggctttgttttaggagccctgagggagttccctagttcagaatggatttgtgatgggccttgataatgtatttggttggtgcaaaagtacttgcagtttttgccattacttttgcaccaacctaatatttgactgagctcttttctgttaaagctgcaccattgccatgtttctttttcttttattttcttttcctatctcagtctttgtgaggaaatcagaagattttctgagtcagcagcattgcagtttctttttttatgtgataagaattcctgcccatttaattgaaagtatatagtaatgaaaagccttataacgtcgggcctctagcaatgcgattatacagcaatgattataaagctgggcaagtaagacaaaggctcactgggtaaaagaacattcaataaaggataacttatggtcagagaatgacaaccaatgtatgtagtccagaaggactttaaaaatgcatatgtacctatccctgaccctcctttttgtttgccaatctggatattatctaaacaacacaattagactaatatgccctatggctggaaattgagactagggaagtctctggttattattgatctgatctcgtacttcataaaatttaaaaagttatacacatctaaagactccattaagaaaatgaaagagcaaaccatattcagaaaaagctgttctcaaatcataaacctgataaaggtcttaaacccagaaaatacaaacaacttcaacaaatcaatgacaaaatgacgattcaaacaataataaatgatttggagtcttcgcaagagtagatgtccagttggtcaataaataaatgaaaagctgctcaaaaccgttagatattaggtaaatgaaaatgaaaaccacaatgaaataccacttcacacctactagaatagtttgaagtataaatatgacaatccaaatttgtttttaatttttaaacttttattttaagttcaggggtaaatgtgcaggcttgttacctgggtaaatggtatgtcatggggtttgttgtagagattatttcaacatccaggtattaagcctattactcattagtgatttttcctgatcttcttcctcctctcactttccaaactccaatagaccccactgtgcgttgttcccctctatgtgtccatgtgttctcatcatgtagctctcacttatgagaacatgcagcatttggttttctgttcctgcattagtttgctacagataatgacccccagctccctccatgtccctgcaaaggacataatcttgttcttttttatggctgcatagtattccatggtggacaataccacatgttgctaaagatgcagagcaaatagaattctcatgtgttgttggtagaagtgtaaaatggtacaatcactttgtagaactgtcttacagtttcttataaagttatatgcatctaccctatgacctaacatattctactcctaggtatttaactaaaagaaataaaaatacatactaaaaaagcttcataaaaatgttgtataataactttattcataataatactaatttgggtcatttgttttttgttattgatgtttagaaatacttgatattttctccatcagcaagagaataaatttttgataaattattttataagtgatggaataaaatactgaagcgtccaacaatgtagataaatcaaaaatggaacatagagagaaagcagccctacacaaaagaatacttattatatgattgcatttatataaataagataatataatctatgttgttagaaataaaaaattgttatctttggtaagattgtggaatgactagaaaatagcacgaggtaacgttctaaagtaagagaagtgttcaatgtcttattgtaagtggttattaaatagatgtatatacaattggcaaaattcatcaaattgaatatttaaaaatctattcattttattatatgtaaattatacccagattttttttaaagcgaataaaatgttttaaaagtgtgttcaaaaactagttaaaccacctttttctctactggtgtatttcatgttttaactgtgagtagagtcaccagagaggttaatcagtggctttcagggtttttttggttgataagttggtggtatcaaataagataaaatattaaaatttttacaaataataattgctttaaatacatatatttccttagtgctacatgttaaagaacaaataagacattcttccgtcattaagatggttaagctgttaaaatgacatcttaactagatgtcatttagtttgtcgtaatgcactgaaagctccagtagaagtagtggtattggtctttttttctccttgaggaaagggctttgatgttgatcaaaagctatctaaactagcaagaagatgattgcagtatgcaacaaaagggagaatactatggtgtctctgcttacaaaattaagggaaagagtagttatactccagccaaagttatcaaggttaggtgattgctgggatttgttgataaaatgtagatgaacagaacttcccaccttgaagtttagaagctatcttttgttcatcttccaatggttcttaaaggccaatgcaagtaactggtctataatgaagctttcattggttcttaatgtatgagaaaaataaggacagtaagtattgagaaatatctttccattcagtcatggatggtggtgtcacattgccaagtgtgtttttttaaaggactgttctttattacgagattataatagtctagctttttattgtcaaaaactactttttatgaaataatagcaacttataacattgtcgatgccctcatgttgacaaacctacatcagtctcccatcatcttttgttttcattttattgttccatctattaataattgtgactaggttctattggtgagtagcaatgagttcttcacgtatctatgaatactgtaccattcgatcatcacaataataaacttaaggcctaaattaatttaaaagcatagatactttctcatgcacttaatctaagatttcatctgcagcttggttttaagcaccttcacccatgacccttttatattagcctgactgtagttctacatgcctccttgtcaataatgtcttacttttatatttatagtatatgaaattgtttcacatgcattagcttattggatccttccatcacttctcttatctacagtttatggatttattttaaaaagaggttcaaggaagcgaaatcacttgctcacaggtatacaaggaagtaaatgaaagagatagaatttagtttttcatccttatactctctaaaacaggtcccctaagtatagcaggtttctcatcataggtgtactgacaagtatgtctattttaactatgttttgaggtaacccaaagtagattttcaaaattatgtgttaataattgtttttctctcactgcaaacacatataagatttttattaaattatggatcctaagtttcctctggatttgaatcaaactaacctttcaaggcgaacctaaggtatgatcaaattcctagtttatagatacattcatttaacaaatatttctgaaagtcctttacagagggtcattcacaacacccatatttccacaaggacagcaaattttgctttatcctttgtccctaaccagattgctaactcaacttaatctttatctctagtcttctttcctccccagtggtgttttattatttttctaagtcaaaggagccagactcctagattatgcacttcttgaatttacatgttgtaatctcatctgctcatttcctcaggcagtcattgtacatttggtaattatattattatagagcattatctatgaagccattttgttttcccgcaggagtgtctggaacccctgctggcctatccttagagttaccctgaagtctacctatacttaatcaaaaattttcagagaagtagatgtttatttctatagccagaaaaattaaagcttctgtttctaattctatactacaaatatttgtgtatgtgtacctatttataattttatatccatatatacacctatacagataatacccaccacattttatatgtatgtgagcataaaataaaaggagtgatatttttctaaaataataaacatatgaatacctaaatgtttcttttgcgaataactatgctcttaacattttacctgtcttgaagcagagctatcttcccatctcactcttttggaacttcttgctttctggagagtcaaaaagaaaaccgaaattgtacttgggcagctaaaatggattttaccaagtttgttttaaagatagcttcaggaatcttcaagctagagaagatgttaaatatccttgaataaaacccattatatcctgatgctgaagttgaggctgcaaagttagggaatttcagtaagcaaattagttcaataagagaattagggaattcagtcagggaattaaggggtaatcaggaagtagaatcctagtctctcatgctctgtacaaaatgtcatagtgactgggacagtccctcaagccctccctcagcttatatttaacccaagtttcatattgtgtgttctaagcctacagcgctttagagtgagcgtgttggatgtgttggggaggggaggagaggagatgcctcatcatacctgctgtaactgtcagacaggagctgagagtcaataatgaggtcagagccaagtcacaaaacccaatccagcggtctaaggccattcagtggaggggcaaagagccttatatatctaagaaggcctagaaatcatcattgcatcagacagcagcaaaatactgttattagtagagggaaatcctttaaaaatagacaaattatgttcaccatatctagtctggaaaagcagagaaatagatctgaattttgaaaagacataggcaaaataaataaaattaaatttaacagctatctgcccgaatgtgttgctaattttgtttcctacttttcttttcatatcaatggatattaaccaggcaaaaagatcatggtgatttaatttttttccttgtttgattttttaagtgtttaaaattattttttaaaatttaattttatgtttaattgacaaataatacaaattacattgtagggtacaatgtaatgttatgatacatgtatacatgatatatttgtttcttgtttgaaactttctgttttttttatttttaaagaagaaagaattacttagtggcttcttacttaaagcatttttaaagaggttttaatgagcactgctggggaattaggcacaatcaaatatcgcttctaggaataactcagttagctgcaaaaataatttataaaaaattctgttttgtgaaaaatattttacatatgtttgtaaaaacaagcactttaatttctgtgcattatatgaaggtttgacagttggggctatactcatttcattgagtataatgaagtcataataatgtgtttatttggctaaacccactaagctccaaatttaaacctgaagtaattttatctaaatagttagtttgggttaacttactcatcaaattaacttggtatttgccaaatttataccagctagaaatacacttatgagaagaatagtattttgtcattaaataagtaattgttataagtaggcagttgctgattttccaaaaagatgtttgaaacctactgtttatgtttgaaaacctatcgatgttttttgctgtaaagcccagatattataataaaccatcactttctttgatgtcacctacccccaccctgcagatactttttaaataaaactgcactattaaaatcttagaaagtttttttaaagacctacttttttgtgtattttaaacttacttttatttctgttatgcatttcgtatcagcagaaatgttaactgcttgttgctgatactctcattttcatttgcatttagatacctgggcaaccttgtaactgtattctccaggcagcacatgcggtggctctgggacattggtgggagaaagtccttttggataggcaagtatctgggagggaggctgcactgaggagggaggcaaggacatgaaacaaacaggcaccaccaccctgctacttccttccatgggttaaatgatagtggtttacaataataggcaaccaatagatctagccatttatcttttaaaactcatcttaaaccttttttttgacacactactttcatttttagacatctatcccaaagaaataaataggaatgtggtcagattgacaggcaagagaattcaatgcaataacatttctaaaaccaaaaaattagaaattgctataactaaagaatggttaaataaattatagtacagccacatgaaggaatatgtaagatttaatgtttttgcaagccattaaataataaagacatgaaaaattgccttacgtttattaattcatttaacaaatatatgttggatgcacattatattacatataaaatgtaaagtgtattccatttatggcaaggtgcaaagtgaaaatgcagggtccacatccatataaagtatgaaataatttagaataaaaacaattatatgcatgtggtgtatgtataaatataaatatatattatatttgtatatataaatatatataatatttacatattggaatatatacatatattcatatatatatgaatatatatatatgaattatatatatatatatatatatatatattccaaataattagaaatgacttacctccagtcaagaattataggtaggctgggtatggtggctcacgcctgtaatcctaggactttgagagaccaaggctggaggattgcttgagcccaggatttcgagatgagcctaggcaacatagtgagaccttgtctctgtgaaaaatttaaaaattagccaggcatggtggcagctaacagtagtcccacctacttgggaggctgaggtggaaggagtgcttgaggctaggaagttgaggctgcagtgagccgtgattgtgccactgcattccagcctaggcaacagagcaagaccctgtctcaaataataataataataaatataggtgattttaattttattccctcttttctgaagtcttaatattttctacagttttaacaataataaatcttttttttttttttttttttgagacagaatctcactgtgtcacccaggctggagtagagtggtgcaatcttggctcactgcaacttccgccccctgggttcaagcaattctcctccctcagccacctgagtagctgggattacaggtgcccactaccacacctggctaagttttgtatttttagtagagacggggtttcaccatgttggccaggctggtctcgaactcctgacctcaggtgatccacctgcctcggtctcccaaaatgctggaattgcaggcatgagccaccgcacccggccaaatgacaaatcttttaaaccactttaaaaacagaattttcagggcgcatcaaagtcagtatccccactacttctctttaaaggcgttgtatttgagggaactgtaatagttccctctcttggctttcactatttctgcagtgctcagtgggtccctaaattctgaaatgaactgagtattaagagacaagctggaggataagttttctctacatccataatgactcactgcaaggctctgtcctcacaatatgcttaggcagaatgtcactaatcaataattcagggagggcattcctaaccaaaagtatttcatttcattccacccaaaaatacagactgaaaaacagttggggaaggtaaaatgttatgtatctaggactgttttcatggtcaaatttgatttggggaatgtcggatcatgctatggcagggagttcctttctcattttattcttttttatttctattatgaaagagagtgagtaggggaatgcttaagaaaatattacagaagctttacaacattaaagtgtaatttgcaaaatttgccagtggaggtagagaggcaagtcgagaaaatctgctttttattggaattgtagcagattgaaacatcttaagctccagactcaaaataatacatagtaagctactttcaaatatgaaaaccaggacatttaaataatgaggaagaaaaataatatgcaagagaatatctgtttccctgtgataggagttctgcatgtaggatgatatgaataataataatagctgccatttattaaacacttatatatgccaagagctttacatgcattatcttttttaatcctcaaaacaaccctagatgtactatttttatgcccattccttagatgaggaaactgaaactcagagaggttaagtaacctgcccaaagatgctcatctagcaagtaagtggtagagctagaattggactgggatttgtttgaccgtttgtgtcttagagtattccaagttcctatcccttgttttagaacctgggcccacacttgcatgtgataactgagcttagagcaacagctggatatgatatctaagtataaacgcaataaaagtaattggtacattcttttggttcacattaggtttgaacgaccaagtgcatgctggccactgggagtggatcggtggtgaacctgttgccttcaccaatgggagaagagggccctctcaacgctccaagcttggaaagagctgtgttttggttcaaagacaagggaaatggcaaacaaaagactgtaggagagccaaacctcataattatgtgtgttccagaaaactctaaatataacagaccctacagggggccacctggagtttgtcacctatttattcacaggatctgtgaatattgctccatagaaaacaaattgttatgattgagtgggtatacctttgtgattctgtctagtgaaaatgggacatttttaatagtgccagaaagattgataaataaatattttttacaagataagatacaa

SEQ ID NO: 15577 - DNA, 173035 bp, Homo sapiens
ttagtacaaaactagtagtgagaaaggaagctgggaagagactgggaagaggcaaccgacctcattaacaaaagctcagttttgtccctgcggacccaaccagcagaaggcacggggctagcggtggctgtccgccagggaggtcgggctctgtgtaaacagtagaaggcatctttatcatgcccttctcacagggagtcctgaggcttggcgctcaggaagtttgcaaagctgcagcagctgccttggagaagaccagcaaagaaagtggagtgtgtatgtgaacttcaattctgtattttctgtgaggtgggttaatggatttttagtaaaaagaaatctcaaacacagctgacctgaaagactggaatttcagctctcttccttcccggggttctttttcctcccccttcctctcaaagccctttaaaccagattgctgtgtcagtgactcttatcctgcccgccagttccaagggtttctaactttttgtcttggaaaggaaaaccactacctgtaagtatctgttttatgtgtttcttttcattgtgactgtgaatgttctgttagcagaatgccccagagattgtttgtgtgatatcattaatgccaagtaacaatgcaaagcatctgcaagagtaggcttgcaaaagtttaactctcctgttaactcagaagatggcaacttgcagtgttaacaaaccaaatgccaaaactgagattctttttattacgtgacacaaatttctaactcttctcagtccatccgtgctggcacttgccaatgaaataaccattttttaactgtgtaattgtttcctctgaaattagaatgtttcttctcagctaaatgaaatggcaaagggaaaagacacaaaaatgaacagaacagataatatcctcatggtacaaacatagagaaatttggatgagataatgtctggatacctttgcttaagtttagttatatttggagacatattttcaaaaacatgatttctgtttcattgtggggaagagagatagtgctggggaggcaaagaaatggccttgttctgaagtttttggactgatttttaggctctctctgctcagtactgagatttggtccagagactttggtgctgttgtaaagagtttcttttcattttattttgaaatccaggaaacaatttttggcttatggaaattgtttattgtttttaaggtatttaattttagtttctgatttttttttaaactattgcacccagtcttgttgcttggtgtgcattacaaagcttaaaaagagcatttctgggagccaattggtgtttatagcctgggaatcttactggagagattaacctctgtggtgctgcttcacagaacagagctagtgattcgaatgctcttcaggtttctgctctggaaaactgacacccgctgttcctgactctaggtaaagcttgaagagctgtgcctcagccccctgcttacatttgataaaggtgccttcagtgcagctctaggaaactttgctgtttctctccatcaggcattctcaaaactgactgtgtgtaagaacccccatttgcttggtgaaaggcaggttctcagttcccaggcccaaaggattttagacctggagtggtgccaggaatcttcccaggtgattctgaagcaggtgggtcacacttgggtaaacattgctctacattgtccttgacatgaaattcttgtcatgtacttggttaatattaaaccttatatctaaataagaaacctgagtttgagctgttgttgagcataacttaatgtgcaacatggttttgcatgcttggctggcaaaccagggctttttaatcagttttccaccaacctcatcttttttttttcttgcttcccttttcatctctgccttttcattcccacgagggaaaaaaggagttgggcaaagggacctgactaccatgttccctgctttcacatgttgggctatatggcctgatctgcccccgcatggctaagcaatgtttgttttggaaactttaaacccaggactgttcttaattctttcccagcctcctggggctgctgggctgtaggggttgggcgaggctgagtttgggtaaactgagcttgatttcatggaatggttcaggagcctcattcctagaaaatgatttttggattggaccatcccacagggatgagaagaaacagaaaatgattcttccatggtgttaaaattctcatttcacaatatgtgaaagtcagagctcagcttccatccccatccttgcattttctggcgtttaatatttatattaaaaagaaaactggacatggccatcagagccccttgctttcttttctttcctcattccaaacatttaggtgcacctgctacatgccaggctctgtgatagtttttaaggatttcagaatgcccactggggatggcatgcacaggcagggtccttgtcctcatggtgtttcaaatcttagttgttgctaaccagccttggaagagccatctaacccctcaaagcttcacttcctcatcagtaaaataagttgaattaaatgagttttggtatcttcctagctctgatattctgacattgatggatatgactcagtcttctaaacacagatatgggctatgagagcttttcagcatttactctgagaataggcctaaagatttcgctaattgcttttcttcaaaaattttcagatgtatttttttctctcacaaagcaccatgaccacaggaatattgagttagacaagtgtaatcttttcagggcatgtagccattccttacaatgggatcccgtaactccctggaaaggctgtttccctgcgccaggttacataggagggcagcctcttatcttgtctgaatctgatgtcgctactcctttggagagctgggtggtctgaacagggcttgacagcttccacacatgcacagcttgcaacctgaccctttcattcaagtgattcaacagcttttgtgctaccaggtgagaggcttaaacagacatctttgaggggccgagcgaaacaaaaaacaaagcaaaacccactccctaatgaaatactgtctatactatattttgtctgtaatgcagcttctctcactgcagtgactggggcaccatttcaaagggctctaaaacttggccatcaagataagaaattataggtgtgatttatgtgctttttgacaacatagcctctagctgtctgaagataatatgtttgagtggaaaactattgactggaggacagggatcttgctaagttagaatatttttaaacaaatgttctttgcctctcatgggtaagtttttacagaagccaaaaatagtttttggtttctcccttaaacctgcctatttatggaggtgatgatatttggggaaaatgtgtattaaaaaatgatgcccaaaatgctctttttgtgcatcatccaaaggctgctaagattgcatgtcacttttcactctcaggtttatccttgaaactttcttatctggctccccagcaacaaaggacagataaatgcccagggagcgactgagcctcaagtcctttactgggtgttctgctttcctggaactcttccctgctttctatcaaacattatcagctgcttagtacttacagatgctctgtgcactcttctcttaaaatatgtgagccacaactttgcctcattagcccacacccactgccatgctaccttcattctaaggcctacgtttcttgttagcataaaaatgatttatttggtaaattacaaactcaaaccacagtaaagttaggaagattgcagaaaggatagataccgcagatgaaaattcacccaaatatttaaaatttgttaggcgtttcctatcaaatctctttcatagtacagattttttcttttttgttaaagtgatcctacaccttagaaagacaacagagcaacaacacaacagcaatactttaattctgttttacataaatgtccctttttattatcacatggtaggatggttctatattacccaataagcattagtgattgttttaaaaccagaaggcagtattgacgcaagggccggaatgttaaatcagagaggtgcagtaggaaaaaataatggcctttgaaaaaatttcacctgggttctaatcataggctacaatgttctttggctctgtaatgttggccaagttactcagccagtttcctcaggggtaaaatgaggtcattgatacttacctcactagatgttcgtttatgaagcatgatgtacaagtgtttaataaatatttcttctttgggagacggctaatacaagtataatgtctgaaaagaaaacaaacatggcaagcgacttaatttatagatgaaaagaaaagagaaacaggaaataaagttacattccagatcccaatgtctggggagaacagatctcaacccaccactcccgtggcctttaactctgatcagcagcctggttctcactttattctttttttttttctttttttaaatttgagacagagtcttgctctattgcccatgctgcagtgcagtggcgtgatcttggctcactgcaacctctgcctccctggttcaagccattctcctgcctcagcctcccgagtagctgggactacaggcgtgcactgccatgaccggctaatttttttgtatttttagtagagacagggttttgccatgttggccaggctgctcttgaactcctgacctcaggtgatccgccagcctcggcctcccaaagtgctagggttataggcgtgagccactgcccccgaccctcacttgattcttatagaccaaaagcctgacacagatccgtgagctcaagactatgaaattgtttggtattgagaaatcaagggcaatgtgaaaatcattctgtcttcattttttactgattctcctcatataggtgttttagataaatgcataaggagatgcatcattttgtttttctcaagattttgctccattgtagcaaggggcccctcaggggtaatgtttatttgagaatttgaaactctgggcttgcactgtagtgagcctgcgaaccatcaccaaaggaaggacatattcattcaaacatgtggaggagtgtgcactctctctctctctcaccattttaaaaaataggtctggtatttgcatttagtcactcaactgatatttattgagcttctctgtgaaagattcaatgatcagcactaaaagaacttgggtgaacagaacagtcatggttattatcttcaaggtgtttatagaccaggagaaacagcagacttttttttttaatggctgcgaataatgacaaaatgcttatagatatgcaacatgtggcaaagtgtatttcaggattccatgtgagcagataaaactggtttgggagattgaggcctgaaggatgagtagaatttagccaggtaaatgaggtggttgatggcagtggggaagggcattcatggcagatggaacagaatggacaaaacctgcaaaggcttggaagctggggttggcaatatggtgagtttaaggatgggaagaagtccagtttgaccagcatgtcagtggcaaggaggagagtcatgcaagaagaggttggagaggtgtgcaggggacagtcggacacagttaaaagtgatcccggaaagtacctaatccacactccctctctgaaacaaacaaccctgttctgtgtctgtacctcagctcttgccattattggacagcactgagggaaagtcctttctgaaagttgagactttcacacattctccctggttctgcaccctggaaccatcaagtcactccccttcaaacatctgaagacagactattttaaaaaataaagtgctgcgaaagcagatctgctcttttccatacatatgcacttgtttttgggaaatgtagagttacacaattttgcttattggaagctaacttactggctcagtgcatcattccaggctctgattatcaaagctgtggatcttgattgtgtcctcagtgataacagttaaccctcttggatttgtgctttctgtgaattggataaagcttgtcttctatatctttgtttaaagatttagaaaaatgtttaaccagagagaaccaaaaacgagctataaggcacaactctaaatatttctaatgagaaaatgatgtccctaacctctcttttttgttcccttttaaggaggaaactagtcactagtctctataacccagaatcacagaaatgtctaagtgtttttttttttttttttttttttgagacggagtcttgctctgtcacccaggctggaggcgcgatcttggctcactgcaagctccgcctcccaggttcacgccattctcctgcctcagcctcccaagcagctgggactacaggcgcctgccaccacgcccagctaatttttttgtatttttagtagagacgcggtttcactgtgttagccaggatggtcttgatctcctgacctcgtgatccgcccgcctcggccttccaaagtgctgggattacaggcttgagccaccgcacccggccagaaatgtctaagttttaatagaaagagctcaaagatatcaatgtgtgttggtgttcttgttttttatgagactgcttaaggcacaataattgctaatttcatttatttatacaaaagttgaactcatattacatgcagcggacagtgttgtccttctgccttcaaaacacataggcatatacactaccaggtaggatgtgataactgccctgtgatgggtttaaataaaatatgattctcctgcaatcggaggaaggaagtctttccagatgaaatgatgaggtcttacggaatcctgaatgaggcatttcttgaggggttaataaatgggaaggatctcaataaggatggaagcaaagacattccaggcaatataaaatagccccttttaacatgaatccattgtcatttaatgtactgtgatataatgacccactctttcccagcagtcaagccatcaaccatccatttcaaattatagacacatgccttttgctttcctcatcagtcattcttcataattttctttccttttaatattttcttcatcttaagaatatcaggttcctgctgaccacatgtcatggctcagtaactttggtctcatgaatgactgtggcctctgctacctactttcacacattagatctaaatgagaccacacagcattttataaaaatgactttacttaaattttgaaaaatagtctatgtctcaagctcttagaaattttggaacaatcaaaaaaagctgctgctggaggtgctgattggtgattaaaatgtcactcgagggtgatttatcagtgagagaagaataggagttaaatggccatttgattacattaaatagtacccaaagagtttaacactgcaatttatatcctattcataatcctgtttaccatgtaattctgttaagacttcctcctggtgtcagtaagctggtcttccaaattcttaagacattactacagcaaaaggaagtaaaataaaatatgtagccacataaacccccatttaaaaatcagtttgtaatatactctggacttagagtttggcagcaggatggggtgacaaaattcctcagacaggactaaaggactagctttgcacttttacagaatctttcaaaaacctcagatggaaccaattttgtctttctcatttgtccgtagagcctctgtggtgctgatttgactgttcaagctaggaggtggcagtgcactgggtgtaccatttagcattcaagatactatgtggcctcaccatcactcatggattgttgctgaattgctttactggaaaatattggtcttcatttacccccagtagagacatttcctgatctgtggctttgtaagttgcttttgtgccagtcccttgatagcgcatggaaatcacaggctatgggattcactgatgggaaaactctggggtccttgcatatcccttcccccactttagtttttttctatgttaagaatggcaaatgatatcaaccatgtgagataatggagacacggtcagagatcatatagtgtttcacagcaggcttgaatattcacagcagtgctcagaggcatcaagtctgaattgttagctctgtggccagagagatctggcattaagactttaagagctaagacttgtccaggagtgatggaagttgaaattccatattaattaacaacagccaagtgtggtggctcatgcctgtaatcctagcacttcgggaggccaaggcaggcagatagtttgagcccaggagtttgagaccagcctgagaaacatagtgagatctgatctcttaaaaaaaaaaaaaaaccaggcatggcgacagatgcctgtagtcccagctactcaggagacaggtgggaggatcacttgagacccagtggtcaaggctgcagtgatccgtgatcaagccactacatttcagcctgggctacagcgtgagaccccatctcttaaaaaaaatacataaaaactatcttcacaaccccataaagtcaatattatgaatccccactgtaagatgatgaattcaaggctgagaaatttttaacaaatttaattatattgtagattgagcttctttctgcagacactaaagtgttcaaaaagtgagtcgttaaagtgtttatctttagttcagatgattaaatgaggtcttcctacaataagacatgtgaactaaaggtgacctgtgtcatgcattactatcatactgtccctttatataaaaaatccattttattttttaaaaaggagtcacttcctttttcccctcaaaaaattgatttttattttttgttattgagtagaaaaagccagactgtttatcccatggagaaagctggaggcagtaatatgggctgaaacgaacaagattgaggtccatgaacatgtcaaagaatgttataaggagtatgggataagggccattgtttcactgaaaaattaacagaagtaattgacacattaggaacacagaggggaattacacttatagaatgatttgagagacttttaatttacagatcagaaggtttaaatttttcttctttacagcagatgattaagcagatagccccaaatctccttctaatgtgctcaataatgattttgcattttatggttttagagagatctattacatactgcctaaacctaaatatccacttctaccttgtcttaaaacaagcatgaaaaactttagccttatgaataataaaatttattgttataatatatagacttatctttgtctttaaagagtcgcagcaaggaacaaagttaaaatgcaacagaaattagtggtagcacaaaattttagtagctaaactttatgttaatttctttcattttaggctttgcttcctttctgacaattttgctaatttagcaaagatttttctcaacataggaaaaaactaaagttggggaagggatgtgcaaggaccccagagtcctcctaccaaagaatcccatagcctgtgatttccatgcactataaggggactggcgccaaagcaacttacaaagccacagatcaggaaatgtctctgtgccactgacttgtgtacttacatctcacacatgggactggctttccagggatggccatcccagctaggctgccaatgaaacgtttgctcatgatgcctcccttggagcgtcctgtctttctttaccttgtgtcagactctgtctatctaggaccatcctatcttcctctcctcttcccagccctcccccaaccaaccaccaccacactgggtcttgcttttgggctcttcctagtgctgttcttggaggcggcatccccagccctagtcctaccgctgcgttccaccctgactaagagacttactgagtctgagggttgttttagacatgccaaagatcctaacttcagtctttggacaccaaagctccttttacctcttgtcatacttagaggagaataagataaaatgcagttattaatgcagttaatatttgcagcagtggttctccatcctggttgctcattagaatcacctggagtacttttaaattcagatgcctgggccccactcagacaaattaaatcagaaactctgggagtggtgactgggtgatggtaatatgaagctgaagagggggtcctctagatgaaggaggcaactcatcttggtgtgtttcccgttctcattaatagcgcagacccagtaatccctcataagaatggtttgcttctttctaggacagaggagtaggtctgaagccatgagtgtgaagtttatttgcagccagtgctttttcccaggccatgggactcagcccccacattgcacaactccaggaacaccgttcacgttatggtctgtataaacagcataaatggtgccctggaatttggtgtgctgaactgagcaaaaccaagtaaaggagtctcatcacctttggccaacacagtaaaggacagataagttagtatgtttttccacagaaataccttccaccatgatgagtttttgccgtgctcagggacatcacagtttgaactgtatttgtcagcctatctggatattgcgcctacagtaaatacgtttctacctctagacaaatttcttgcaaaccaatattttgaatatagcctatttgtgtcttggagactctaagaaggtattttagccaagactgcttgtgtgttccatactggtttcacttttaaaatgtttctctgacttactggtgtttgcagttcttatacgatgtaattttctacattgctgtatcctcctgcacatattttttcaacaaatgagacatctaatcagacattcagatactttatttgcagcctgtgatgtttatggagattttgtttttgaaccagtacttgaagcacgtttaatcccactgcctgagaacaccctcccacctgcattctccacaggccacccccaaattctgccaaagtgagcagatcaagtttggcttttcttaatgccattaagctcagtgagcaacactgcatcagagactccagcatgtgcagcagaatggacactggcacactggcatgggtgtgcagccacatgtggtgtctcactgtggggacatggcctgtgagccaccagggtggcccttgagtagctgtgggtcaggagatccccagaagagacagtcctcaaaagcccggaagcatgatgaacaaaaactctctgtgatttgccttgttcctttttgttactgatggccctccactactctagagaaaactctttagctgtgtgtgggtgtcacaggagagtcaattcagcctgaaccatgaggcatgtcaaaagatggctcaactcacaactttttataaattagtagactttaatttttgtgatgttttaggtttatagaaaaattgagcagaaagttcagagttcctatataccttctcacttcccaacccctactttccactattattaatgttttgcattagtgtcgtgcatttgttacaatggatgagcaattattattatctaaagcatatattttacaatagggttcactctttgtgttgtacattctatgttttgtttttgttttgttttgagacagagtctctgtcgcccaggctggaatgtagtggcgtgatcttggcccactgcaacctccgcctcttgggttcaagcgattctcctgcctcagcctcctgagtagttgggattacaggtgcctgccaccatgcctggctgatttttgtatttttggtagtgacgaggtttcgccatgttggccaggctggtctcgaactcctgacctcaagtgatctgcccacctcagcctcccaaaatgctggaattgcatgtgtgagccaccacacccggctgcattctatgggttctgacaaatgtttaatgacatatatccaccatcacagtggtagcttttaaaataaattttagaaaaatttttcttcaatagatctggaatagaaaggggcaggaagggaactaactttggctgagccttgctctatgtgtgtgctggcaactttgatttacattgacagatagtatcacatgtaactagtgtaacaaccctgaaaggtgtcaattattgtcttcattttgtagatgaggaaacagagcccaaggaagaataggaaccttgctcaaagaaattatggaaccaagataggtgcacaggtctggtagagctgattaacaggctggcctctgattttctatcacttcctctccaaacctgcatcaaagaattaaactctctcatcctccttttttagcactactgaatcataacattatttacaaagttatttgtaagaaagaaaaattatgaaaaatgaagtgtgtgtaagtcatagctgaagacctcaaaattgtgctaagatcctcaacaggaaagagcattaagactcttattagactccttggctaggcttgatggctcatgcctataatcccagcactttgggaggctaaagcaggagtatcacttaaggacaggagttcgagaccagcctgggcaacatactgagaccctgtttctacaaaaaaatttttttaaattagtcaggcatggtggcgagtgcctgtagtcctagctactcaggaagctgaggtgggaggattgcttgtgcccaggagtttgaggtggcagtgagccttgatgaaggaactgtactccagcctgggcaaaagagcaagactccgtctcttaaaaaaaaaaaaaaaattatcattacagttcgattaagcctctttgttggttttaggtgttgcgctttttttttctttactacatctcagtatatgatactatgctttacattccccactttgcttgcatcagtgggtaaagcaacaaccaattgtctaacctttgacaaatcacttagcctctttgggcccccgtttcctcatcttgatcaccctatggtagagcaaggaacatggtttcaggcacctgggctccccaagctgtcttctgggattggaatatgaggtactttagttaagagaatttgccttagacaaattatttatctatttccttagctgtaatataggaataataatagacttgagttcatacattgtagtgaaggttaaatgagttacaacagtgccaggtacaaagtgagtgcataatacatgcttattattgttattttacgtaaaatttggataagctccttctaattctagaattgtatgatttttcatatactgtaacttaggctccaataacatggcactttttgtcatttaccataaaatttcttaggtcatcgaaagcagatctttacatcagacctctttacaaaaatattcatggtggttgatctgttttctgctgcagacatctgtgagtttgagttttaatcttgagcaaggaatgcagatgagatgatcaaggttacctcacagcttgaggagcaatgctgaatagttttctgaatgtctgagcagcccttttcacaatgaagtgtttcaccctgaatagtggaagtttctttaagtgtatactggtgagtttgatgaaatcattagagcattttgctcctatgctatcacagcgaataccattctggtttttgttgttgttgttgttttaagccaaagcaagtttattaagaaagtaaaggaataaaagaatggctgctccatagacagagcagcactgagagctgctggttgcccatttttatggttatttcttagttatatgctaaacaaggggtggattattcatgcttctttttttttttttttttttttgagatggagtctcgctctgtggcccaggctggagtgcagtggtgcgatctcagctaactgcaacctctgtctcccccagtttaagcaattctcctgcctcagcctcctgagtagctgggattacaggtgcacaccaccactcccagctaatttttgtatttttagtagagatggagtttcaccatggtggtcaggctggtctcgaactcctgacctcgtgatctgcccacctcggcctcccaaagtgttgggattacaggcatgagccacggggcccagcccatgcttcccctttttagaccatatagggtaacttcctgacattgtgatggcatttgtaaacagtcatggtgctggtgggagtgggagggtagcagtgaggacgatcagaggtcacttttatccccatcttgattttggtgagttttggccagcttctttactgcaaactgtttcatcagcaaggtctttatgacctgtatcttgtgctgacctcctctctcatcctatgagtaagaatgcttaaccatctaggaatgcagcccagtaggtttcagattcattttacccagctcctattcaagttggagttactctggttcaaatgcctctgacatttcccccctcccttttataagagaatccttaatcttaagagttgtagagggatgaagatctgtattctgtaacttcttcaggctgaataggggtgatgatattcctgcctaactatgaggatctcttgtatttgggtagagaggagctcagtcagaaagcgtcagtatgtcaagggccactcataactctggagttccaacaaaaggtgatatctagaagattaataaatgtttaagaaaacatctagtaggcttattctgcatttctacacaaagagtacaacagcaatatattccacaacagtaaggcaaaataagtaaattatcccaagtaaactaaattagaagatttttcatgagctgggcaactgttggaaccaagcagatatggagttgttagctgattccaatatgtgcccagaattagaatattgatccagatttttacattacccatccttcttgtttcttctgagcagcagccaaagatcactggttggttcacaggaataagcagtcagtctaaattgcagaaaaatactcaaaaaacaactgatgagactagaatctaatcaggtgtaccatagtttttgaaacataatttctctctccagtttcccattttcactaaagacaagtcatggtaagaccgatttgctttattatacttggcctgattatttgtatgaagtgcagcaggaataattatttttcacataggcttttaaaattgactttaatggaactctgttccgtaaggaatctcaaataagacttttttaaagctgagaccggccatgggtttgtaccctcaaatacctgtgagttgggtaaattcctctcctcctgaggtcccaagataacctggagctcctgggcctgtcagaaagtgacattctttgtttaccaccaggtcaggaaccctgtacagaaactgtgtagacaaggtatgaggccatttttcccaaagggcttttattggctttaccagtcaagtttaattccttaaaggaaagcgcaccattccagtcaaagccttggtaaaataaccaatttctccaactgtgtcctgttacaaaagaaaacagattcttattgcacttatgcaaataactatattgccataagttaagaatactcacaactagtttccaaattctggcaaaatcaggtagagagaaacaaacatgctccaaattctgttcataggagtatactttactcaattgttaaaagctgtaaatagcttaatagaaaagttttcttggttctaaaaaaacaaaacaaaggattagcaccgttttaagcaaaaagtaaaaaaatcacttcagtcttctattagttcagtccatgcagttaactcctgtcctgcttgatatttgtgaacatttcagctttccatgagagtcctgaaagttgctttcctctattctaatgtgacaattgccaaagttattagaaacctgcatttaagaacacctgtcaaagtcctatagctgattataagctaccttttgaagaggattaaaacaagacaacaattgtcagtggatgataaaatgccttagggcagccactattaaagccacaattggcaaggaaattttgtttacttctgtggcatacaacaattttacataacaattatagccattaataacatatgctgagtcatattagaattataggaatttttccattattttggaacacataccagtaacatatttatataaatacagccctaagaaagccaacattgttttatatttgacaatgctttctgtattatttttataccaaataagccaaatgtcactgttgtattagtgtactattaatgttaaatccaattcttaataaaaccttatagacaatgtatttaatcttaatcagtttgaaccataaggtaagattctcataaatttttataaccctttaaaatatttgtgaaagagaagatcagtgctctaagaaaaacctgttgtgcttttatttcaatgttcaatttatagaaaaactgattaatacccctttagctttagccaatatgttcacacacacaatctcttttacaattaattttttacaaaccttccacaacttgcttaaagctttatcctatctaacttaaaacaaccctttaaccttttaatctaggcaaaaaaatccacatttccatgacttcttatagtcttttaccaaaaacacattttactttctttacacagcttacatgtcaaactgtttttatttcccaaagattaattaagtcacacaaactaaaaggcattacactttttacttttctagcaaaatatttcatttaagctcctattatttttaagccaattaacaaaagctcttttatattacacacacaacacatataactacacagaagacaaaggactcatttcctgatccaggaattgaaccctgaacccaggccaccaatgtgaaaagagaaagcagggccacatggttacaagatcaagctcccaaggacataactgaccagttttgctggactgtcttagacagcaggcttatggggtcctaggcccgcattctatcctgaggtatccctctttctgacagaaagatatggaaagacaaattcatagcacaaagtacaacagattcactacagtttaagactagcctcacgaattctttttcccactaatcaaaactttacagaggagataaacagtaatttttaccattcattcaaccacagagagagagagagagaaagagagaagtcaaaattcttacccttttgctgacatgccaggcttcagggtttcctttctctgagtggccctactgacccggctggctgcaccacagctctgggggccaagccgcaacacgaaggaaggccagagtaaaatacatgtgacaaaacacagacattagcccctctgcttagcacctagtatcaaactgacaaggctcaaacgtgcccccggctggaccctgccattgttaatccaacctctgaccaggaatttcaactcgtggtctctgggcaagatggtcaccctgagtaatagtaaagacgggaaaaggaaaggagagagagaaaagcattgcctggggcagagtggggaaggtgaagagcccagggaggccagagaaagacccacccattgcagcgacactgaaaagttcaggcggcagcttgtcagtagaagagggatctttcatggcagttccatcagctctcaagtttcccctttagggggaaacttgtccccatgtcccatgatcctgtacatgcctaattctgtcacccacagccatcagcaaagagtgcaaggcagattaacccaaagaaatggtggttaacatcctatagtgccaaacccgttcttagctgagagggactttactgggaggggcctctaaccccctaaatcttaggaaagactctaactttcataagttgggtctcaaacccaagttcggtcaagcgtccttgccttttattaagaggggcctttaacccactctatcttaggagagactctaactctccttagttgggcttctaacccaatcccgtcatttactctggtaaatgcaccccacctacccaaagtcagccaatttgtgtgtgcaaatgattttcctttgggttggaagcctcttcagtatcatccctttggggtttgcagaataatgttactggatcccaccacttacccagagttagcctttgggtcggggggttttttcagtattgtcccttctgtagtgaccataaagatgttacaggaaaggggtcccaatccagaccccaagagagagttcttaggtactcagaaagttcttaggtactcagaaagagggataccttaggatagaaagaattcagggtgagtccatagagtaaagtgaaagcaagttaattaagaaagtaaaggaataaaagaatggctactccatagacagagcaggcagcaaataccattttgtattgtaaaatacctgattataaatctccctcccacaagacctcaatctcttaaagattaaagttacctcttattgaactttttcttgcacagtgcccctgtactttttctcacaaaaactccttgcttctgacataacacctacttgttgattctttgactatgctacattctttctctccatcttcaaacatgcccttacttttcctatgcacctttctcaatactaatttttctttcaaatttaactctttccccttctgggaagcgtaccctaggcccagtttgagtcaaatgctgccttcctatttagtcctataccataaaatatatctcaccattactgcacttaccacccttgctgttttgttttgcttttctgaggcagggtcttgctgtgttgcccagactggccttgagctccctggctcaagcaatcctcctgcctcagcctccccagttgctaggactacagacatgttcccctgtgcttggcattactgcctgttttgaatcattagtttatgtttgtctttctgaattacactgtacactctctaagggcaagaatttttttttgtcatttttgtcttcacaatcccagcacttaacgtagcacttgtccctaagtgagtactcagcaattgtttgtacaatgaatgaacagatgatatgtcatactcaaaaagccaagatacattctgaaaattgaattggtctcaaagatgaattcctggacatgatttaatacgaatttaaacagaatctcacttttacacagtttggtgttgttctgttgtaaattaagaaatgaagaattcactcaagaagaggaaaattaatttcagttggcgtgacactggtggggaaggccctaggtgtgagttttggtacatgcccacggtaggtccctgatgaagaatggggcacaccatgatgaatgtgagtgtttttcactctgcttaagttattcaattaaagcaacctgttgtgaaaattgtatgatacaacgctctggctgaaagcaacatgattttaagttatggccatttcctaactaatcttcagggaaatgtttttgatggtttaagaggctttgatagtcattaaaaacagaactgtaagttgagggcacacattttttccctctgcaatcagttttctctacctttgaaggtagttttagtagaaggcctctgtagaaacaggcagacgtctggtttccaagggatatcctggaatttgaatttctgaagtagacttattaggtatagatttatcgggcatggccagaaatgttttagataccctctggccattctatattttagtcattttaagtctcttgaatgatttctcaaagaacccgttttgttttgttttgttttaatgaaaaagaacaaaaaacgttttccataagtttgcagactttgggcttaaaaaggctcctttctgcaagacttcttagaatctttaatatgctcatattatattgtgaatttttagaaggtgattttagcgttctgtgcttcaaatgtatttgggtatggtgaactttttttgtggcaagcttttaacgtctccaaaatattcattttcacaagcacagtttgcaaaacatggcagggtagagtttgagctattggaaatctaaggaaggaaacctaatgaatttgtgttgtaggcaaaggtatgtctgtctttgcagccttggtcatcatggggttcagaacatggtatccccaaatagggtgccttggcacattgaatattttgaactggaggaatttgagaagtggcatgtggtggaaagactctctgaccttctcccctgaacagcaggttacagtacccttgtgtgagagaagtgccctcctgatacccagaggaaaggagtatccttagctccaagaatggagggacacaatggggaatctgcacaggcaggtcttgctcactttcccccagtttaccaccctcagctcacacatctttgtcctaatacattttcccataactttccactcttcatcaagcttaggataaaaatgctcacgcttaatgtttctttctgtcttcatttttttaatgaaggctcccacgtcacatggcacttatattcaataaattttatgttttccctttgttaatttgtctcttttcagtctaatttacaaggccccggacaacctaagagcatagaaggaaaggagttttcccttccctctactcatgacagtatagcctgagggagggctccctctccagagttctgagtctggcagcttcctgaagatctgggaaggaaatgctgaaaggaatatttctggaataagcatctgtgatttaaggaagccacctgggataatggacatagcactagtctagtgtcagaactgagattcccatccagccttggtttccaggtagctgtgtagtcttggtaggcatttaacgaccatgggtcttcctctcttatgtaaatgaaagaattcctagaagagaacacacaaatggctaagggacattaagataaaagggaaaaaaactaaaccttccacataaacaaaggaagtgcaaattaaaacagtgtcagatacatttcacttgggagatgaataaagattaaaggggcaatgttgaatgtgaggaaggctggtgagggtggaaattggtaccagctttccagaaagcatgcatatcaagagcctcagagtaagttctcacccttcagctttacaattccacatctggaaatcaatcaaaagacataaactagagaaacagaccgatttatacttaaggatttttttatcacaatctttgacatagtaactacttcaatgtagcagtgagatgattatagcaactatagtacacccatctagtggctataatgcacaaattaaaagcacaattgcaaggaatgtttagtaatacagaaaatgcttacaatagaacattatgttaataaaaagggatactacacaactctttgggggtattgaaaaggatattttttttctatatgtttctgtgtttttgtcctttaattaatgagcatgcctttctttcatattttaaaaaaagttattttcagaaaaagcaaatacattgataaatgaactgaagaatatggcctcgatgatttctaaagtttctcctaaaatcatacattgtgtgatgtaggttatggattagaaaacattgtagagaagaggaagcagaatgttatagacagagtcaacacacattttattgatttaaatgtgagtcaacacacatttaattgatttaaaatagaattatgaagtggcctatttgacttgagacctttaacctgggcttgtagtgtaagcagttggaacatgaagatgctggtagacagggtatctctcttaattatttgctcttaaagcagcagctacttcctttagagaacattgtttctagtgaaacattaacttctggaatagtatctattgctgtctggaaccataaaggaagttgttaaatttcctgcatactataggaataaaactttagggctagtgaagtgattgcaaagagtataaggttttggtgtgatgtgaagcagtgtatatataacagtagtggttaagggcaagggttttggagttggacaaaaccaggctctaattgcgatgacaaggtcaagctgatgacattgggcaagttacttaacctctttatgtctcattttccaaatctataaaatcattatctacctcctaaaaccatagtagggattaaacaatataatatatgtaaagtatcttgaagaaaacctactatatagtaaacacgtataaatgttggttttggccagacgtggtggctcacacctgtaatcccagcactttgggaggctgaggagggcggatcacttgaggtcaagagtttgacaccagcttggccaacatggtgaaaccctgtctctactaaaaatatgaaaattagctgggcatggtggcgagcacctgtagtcccagctactatggaggctgagacaggaggatcccttaaatctaggaggtggaggttgcagtgagctgagattgtgccactgcactccattatgtcacttaaatcactgtatatttatgtatgaaattaaaataataatagaactaattaggtttgttgtgaaaaataaacgaaaagatgcataggaagaatgtagcccagtgcttctgtatagtaagtgaaagcacattaataagcaaagtagaaaggaaggaatttgcacataggggagactaaaaattgtttattaaagaaaaaaaaatcttagaagtcacaggctctttctcatgattttattatccctgtctgagaacattcactctgaaaatcttgtgtttggcaagatcacgaagactttccatctttgtacagtaattgaacaattaaagctcgataagaggttatgggcttcttgaaagagaagaatctgctttacagttgtgtcttcccagtgctgctttgtagtatgggcccaccaaagaaatggcatgagattgtcaggatacaggggaaagggcacttggccagaatgcccgaggcttgtttctcccacagctctgctctcctgctgggacctcaggcaagtcacttcgaatgtttactttttattgcctatataacctcagggagttgtaaggtcagtaggtgccatggctctgaagtcttgataaagactatctaagtcttgatttcctcaattaaaacacaaagaagagaaccactttctctaagtttagacagctggttgttccctgaggacacagttctgatttccagttcattgccccttgatgaatcaatttatggcacatgtgatttggatgcaattcagttgtcctgtggataactatattcacctaaaagtttatgcttaaaactttaaatttgatttatattaataactttggaaattcatttgtatgaaaattttgatgatttaaaaaaatacatcataaaaagtcaattgatagcttcttttttttttttttttttttttttgaaacaaggtctcactgtctcacttcactttgtcactcaggctgcagtgtcactctgtgcaacctcgatctccaggctcaggtgatcctcccatctcagtctccccagtggctgggaccacaggcatgtgccagcacaccaacctaatttaaaatttttttttgtaggagtggggtttcaccatattgcccaggctggtcttgacctcctgggctcaagtcatccaccttccttggcctcccaaaatgttgggattaaaggagtgagccaccgcccctgtacattctattgataacttctaagtttagcttctgactagcattttaaagattataatgtggagtagaagtcagaaaatcttcattggctttcttcaccatcttgttgaggatttcaaaaatctcttccgtttgggtgggttcatcctgaagtggctattttcagttaaaatgccatttctctgttagcgtattttatttctttttccttttttttttttttttttttttttgagtcggagtctcactctgtcaccaggctggagtgcagtggcacgatctcggcttactgcaacctccgcctccagggttcaagcgattctcctgcctcagcctcccgagtagctgggatttacaggcgtgtgccatcatgcccaattcatttttgtatttttagtagagacagggtttcaccatgttggccagaatggtctcaatctcttgacctcgtgatccgcccaccttggtctcccaaagtgctgggattacaggcgtgagccaccgcacacagcagtttatttcttaaatgactttagggtacttgtaagacctaaagttgtgaaaaagttgttctcatagaagtagagagtagaaggtggttaccaggggctggggaggagggaggactggggaggtgctgatcaaaggatacaaaatttcagttagtccaaaggaaggagatgtattgtacaacatgactactatagttaacagcattgtattgtatagttgaaaattgctaagagagtagattttaaatgttctcctcataaaaagaagatatgtaaggtaatagatatgttagttatttgatttagctatttcacattgtatatgtatatcaaaacatcatgacacaacagtgtatgtatatattgcaaaacagctaaattaagtcattaacctggtggctcacacctgtaatcccagaactttgggaggctaagatggaagaatagcttgagaccaggagttcaagaccagcctgggcaacattgtgagactcccatccctatgaaaattaaaaaacaattagccagatgtggtggtgcatgcctgtagtcccaggtacctgggaggctggagctgaggcttgcttgagcccaggaattggaggctgcagtcagctatcatcgcaccactgcatgctagcctgggcgacagggtgaaacccctgtctctaaaacaaacaaaaatcatgttgtacatcataaatatacacaattttatttttcaattaaaaataagtaaaaacgaacaataaataattgtgtgagtcaaggggtaataactgcaagcctggggaagacaaaaatgttccattgcttatgtcatctttagtcaaatggtgataactacctagatcactaatgagaagagttttgggccacatatgaattctgcaaaaagcaaagaaaataaaaagcaatgatggggaggccgaggcgggtggatcacgagctcaggagatcgagaccattctggctaacacggtgaaaccccatctctagtaaaaatacaaaaaattagccgggcgcggtggcgggcagctgtagtcccagccactcggggggctgaggcaggagaatggcgtgaacccgggaggcggagcttgcagtgagccgagatcgcaccactgcactccagcctgggcgacagagcgagactccgtctcaaaaaaaaaaaaaaaaaaaaaaaaaaagctatgatgaattattgatatcttgataactatgctgggcataggagggggaaggcacttgccttgtgttgggtagctaccattgcaaaattccagagaggaagaatagtaaatattattttcatcaaggcacgtcattaccattgaccgttaagaatttccattgcattgagagctgtacagctgagatccattttttttcttgttgtgcacagattatctcaaattagtgacaggagtatcatgtttatatcaacatgaagaatacatgctcatatagttaagctgaatgtgtaattatgaaataaatactagctcacatttcccctccaccaattatgttactaaattattttcttctgttcaaaaaatttcccaaaaagtttggttgaagaaatctttatgaattttcataagaattcaaaacagcgtgttttttcacatttcagaaagaattttcacacagctttattggcgtttattggcttatacagatatactgtacttagaatacatgattaccatgtaaagaaaaaaggcaatggtgggaaaatggtcagggagagcagaactgatttgcagtcatgtcaggaggatttcgaaatgttaagaaacagctgagccacacaagcaagccaagacaggatttgtttcttgttttttttctttttttcttttttcttttttgagatggagtctcgctctgtcgcccaggctggagtgcagtggcgcgatcttggctcactgcaacctccgcctcccaagttcaagagattctcctgcctcagcctcccaagtagctgggaatatgggcacccaccaccacgcccggctgatttttgtatttttagtagaggcagggtttcgccgtgttagtcaggctgggctcgaactcctgacctcaggtgatccgcctgcctgggcctcccaaagcgccaggatttgtttcaaggatttgaatcaagtccgaggtggctaaaagtcagtttacaagctcccttggggaatatggccaggtgccctttctacttccacttctagctgcccccaataattctgccgaccctgagggtgcccatactagcaatcagagcaagctgtggacagatggattctgaggctctgacttagccctatgctgggactaagaaaataaaattctcaagatgtgctaggcttcccattagagtgttgtttttcatgtagaagttggctgtcactggacatagtaattttgtgtcagagacaagacagttattaccgtctcattttgaggtgttaaaagacccatcatcactgtgaaatcttgtttgcttcagaattttgctttgctttgctgttgttctgtttttcttctggccctttctcggtctgctcgtctgaattcttttctctttcccctcccatgccaccttcttgaagccaaaaataagagcagtattttccatggaatgtccacatacttggtgtttcccaacaccaagagaaaaatacaagagcaaaattagaatgcaaataaaaccaaacaaagcataccctttttgatctttattgcttctaattctgcagccttcagtctaggctcagttgattgaaggatgagttttgtttgattttgaatttggaaattgttactcttgtacttttcccccctcctaactgtgttgcttcaggttgtttttgaaatatcaaaatttagttttttaatatgtattctgttgtaagactatgagaaagaaaaaattagaatgtaaataaaacagactctatttgacatttattgaacctaattttgccaccttgccaccttcatccaggcccaattccttctactctgtttttcctgagaaagctttactttcttgtctctttgatatattttgtaataataatgttaacatttgtatgggggtttgtaattaagaaaatatttccacatagattattggtctgacaggggaactttggaggcaagatgggtgattccttttttttttttttttgagatggagtctcgctctgctgccctggctggagtgcagtggcatgatctcagctcattgcaacctctgcctcccaggttcaggcgattctcctgcttcagcctcccatttttgaaagaggaaagtatgttcataaaaatcaggattagaatccatggccaggtgcagtggttcacacctgtaatcccagcactttgggagctgaggcgggcagatcacttgaggtcaggagtttgagaccagcctggccaacatggtgaaaccccatctctactaaaaataatacaaaaattagccaggcgtagtggcgggcacctgtaatcccagctgctagggaggctgaggcaggagaattgcttgaacccaggaggttgcagtaagccaaggctgtgctactgcactgcagcctgggtgacagaacaagaatccatctcaaaaaaaaaaaaaagataagaagaaaattaaaaaaataataatcgggattagaatccagatattcaaaattcaagtctattctttcaacagcattgtggtgcagggagccataagaatagatatctcctctcttctcttgtctcttcctggcagataaacattaggatcttggactttgaccttatctctcagttaagggtttactatgatataattagagaatgaactattgtcccatatgctgttaggtaggaagttaaatctttagctgattagtgactaaacaaaattaatacaaaaacttgaagaagaagtgattattaaaggtatagttaagttcagtcatgagtcacacacacacacacaaaataataacagtgagttaaataggaaagaagtttacattctctcctgtgtaaaattctggatgaatggactggtatggtggttctgctttgcaaatggcccagagacccagggtccttctagctcacagctccaccaacctatgccatagcctcattttttcatgtgcaaggcagcaccttccatcttggcaacaagatggagggaagcataaagaaaaagggagaagaggcacaccgtaactacctcttaaaggaggtttctcagagacaccatgtgactgctcttcttcaattccattggccagaatctgatcacatagccgcagatagctacaagagagactgtgaaatatagtctttgttctgggtgactatatacctagttaaaatttttatttctatggaggaaggtgaggttggatgttgtgggacaaatagacattcctgtcagagatagatattggaagagagttactaagttatcataagtgaaacgaaggaaacatttgctatattattttaacaatctatctgagaggagcttatttggcattctaaattgtttacatgaaatagaagattttgatcaagttgttccattttggtccacattgcctttcttaagtcagtgctaaaccaaaacatatttgaattcattaaacacaaatttgtaaaatatggcaaagcctccaagatagctttttttttcctgttgagattgacttattcctatttatacccagattggctgtaaaagtgtgggatagtaactgagctatgatcaattacaaaaggtaaggggtgtggctggtctagagacaggctgaccagtgatacacaacatgtacaaagaccaggaaattgactctgaatcaaagtcttcgttttatgtgcctttgcataatacaagatatccgtggggtttcaaaggagatttgtttcagctgttggctgagtgggcggcaggagaagagaattccaggacaacatacatatgcctgcctctgccaaggactgttcttgcagagcctgaaacacactgctgaccaaccatttggagataactgttgggtgaaatcccaccggtgcctttgtattttgctgcattcttcagtttcatttggaattaataggtggattgccacactgagaagaaagatatatctgccctttgtataccttgatgggctggtaccagggaactaattatattggtgactttcttcaatttattttcggttaagcaacataattacatgatgacatatttacctctgagataggattgctttgcgctggctgtcagaagatgcatctttaatgagttagtatgttttgtccataaaaaatttgttcataaaaatgtttattttcaagttatctacatatatttaaaaagcctttaaacacaataagatttgtttcaaagtttctgtttatgtcaacacacatgcaattttacatgaatctcatatgtaatttttgtacttttttttttttttttttttgagacagtctcactctgttacccaggctggagtgcagtggcacgatctcggcccactgcaccctttgcctcccgggttcaagtgattctcctgcctcagtttcctgagtagctgggattacagatgcatgccaccaggccctgctaacttttgtatttttagtagagacagggttttgacatgttggccaggctggtctcgaactcctgacttcaggtgatccacccgcctcggcttcccaaagtgctgggattacaggcatgagccactgcacctgacctgttgttgcattttttaattgcatgctcttcttttcctttttttaaaaaaatattgctgtttgagtctgctcaggctgctataacagaaataccgtagacagggtggcttaaagaatagaactttattcctcacagttctgaaggttgggaagtccaagatcacctcttcctggtttgcagagggaaaccctcttgttgtaagcctcacatggccggagagagagtgctgtaatcttttcatcctcttgtaagaatcccatcatgaggactctaccctcatgaccttatgtaaacctaacgcctccacaaggccctacctcctaatcccatcacattggaaatcagggcttcaacatataaatttggtgaggggacacaaacatctagacatagcacccccctcatctttcttcagtctatctatactatattgcccctatcatattgtacctaccaacaacctaatgcttgtctgtccatatttttctccatgcccatttaattacatgttaatacaacacatgtctccatctacatgtatgcatatacatagatgcagcctttagagttgctttaccgaatggaagcatgcttttctccattttattttttctgactccacaataccttgtagaaatcccgtcaaattgaatgatttatctctaattcaaattctaaaagttacattccattccatggtataagtatatctacgctatttaaccatccccttcttgacatttactttgcttgcagtttccactatggacactgctgcaatcaacattcttgttcatgtattcttgtagacgttgcttttatctctgttggatagattctcagtgttgtgtggcaataatgaaacaaacagtgatggattttgatttttacctcacttcttctttcggtgtttgactggaggtgctgcctgggaaagactagttggccaatcatcaggaagtctcatggtgtggcattttccagagtcaagaatctcaacctcctcaacctcagtgttatgggcacagaaaatggactttttccatatatcccaggatgatgtgcctttttgtgacagattctcagtaacggaattcacgtggcatcttgatccatggctaatggtgcccgcttatgatgccagttcttttttttttttttttgagacggaatcttgctcttgtcacccaggctggagtacagtggtgcaatcttggcttactgcaacctccgcctcccaggttcaagtcgttctcctgcctcagcctcctaagtagctcagattacaggcgcctgccacgatgcctggctaattttcatatttttagtagagacaggggtttcaccgtgatggccaggctgttctcgaactcctgacctcaggtgatctgcctgcctcggcctccccaagtactggaattgcaggtatgagccaccgtgcttggcctttttgtttttgttttttctttttagatataataatattcctgggttaaactataatcagtataagggaatttaaggcattgttttctccaatttattcacttagttaacaaatatttattgatatatcaggcattgttctagacactagggttaaatccatgagtaaaaaatatagaaattaacatcttcgtgagggacatggcagtgactaatattaggttggtacaaaagtaattgtggttttttgccattgaaagtaatggtgaaaaccacaattactgttgcaacaacctaatataaaggatcaaatgcattatattaggtggttagaaagcactaaggttaaaaactaagcaggaaagtggtaaagaatgctaggagatgagactgacataattctaatggggttgttaggtgtgaccacactgcaagtgtgacatttgatgggaacttgagagtagagaggtggagggagggatatctgggggaagaacgttcaagtcagagacaacagaagtgagaggctttagtgggggagagaggagggaggaatggatcttgatttgtttgaggaaaagcaaagatattagagtggctgggacagggtcagcaaagggaagacaaacaggagatgagctgagagagagaagagggaaacagatcacatactgtcttctagatcatcaccagggcttcacctttattctaagatgagacactactggaagttttgagcagagcagtgacatggtataagtaacatttaatcaaaatactgactgtgatgccgagaaatgcctagaggaaaggcaggagtagaagtagggagatcaaataggatgctattgcaatcatccagcagagacttggtggtggcttggaccgggggatcacaatggaggtagtaagaagtagctggattctggatatgttttgaaggaagagtgtattaactttttatttttgtgtaacaaatcactataaactttgtggcttaaaacaatacaaatttatctcacaatttcccttggtctggggtcagattatggcttagctgggttctctgctttaggttgccaccaggctgcagtcaagatgttgacggccttcattcttatccaggggcttgacttaggaagaagccacttccaagctcattcagggtgttggcaggattcatttccttgtgacagtagaatccatggaggcttgcttcttcatgttcagcaggagagcccctggttccagtctgccgagagagtctcctgtataacaaaatgtaatcataggagtgacacccatcacctttgttcaattctgttggttggaagtgttacagattctgctggcactcaaggggaaggaacttttggatactaggagactggaattatttggggggtcacctaagatctgtctaccataaagaaacaacaagattttttgtctagatttagaatgtgtgatgaagaaaggaacaactgaaaagttggagttgctgttaattaaggtaaggaagactgagggagggaagattgagagctcaattttggcttcataaagtgtgagatgtcttttatacaccacccagagatgataagcagacagttgcatgtgcaaatctagagttaagcaagagggtccaggctagaggtgtaagtttgaggtccattagcacataggtggtatttaaggccaaggaatgagatcactaaggaatgagtgtagatacaaaacaggtcctacaactggactctagggtcccagcattaaagagtcagggagtctagaaagaaccaggtaaggagacaaagtgggatagagtgagataagaggactgcaggagtgtggagtccttgcagcctccatgtgttaattagtttaaatctcagaaagcaaagattcccccttacctcccagttttgggagacatctacctatcttcttgcctctcctctccctgaatgtgctgttgcgttagatgccaaatgtgaatggaaaaaatattgtatcttgtcaaagttcaacaaccatattaaaggggaggcagccaagatggctgaataggaacagctccagtctatagctcctagcgtgagcgatgcagaagacgggtgatttctgtatttccatctgaggtaccgggttcatctcactagggagtgccagacagtgggcgcaggacagtgggtgcagcgcactgtgcttgagccgaagcagggtgaggcattgcctcacttgggaagcgcaagggatcagggagttccctttcctagtcaaagaaaggggtgacagacggcacctggaagattgggtcactcccaccctcatactgtgcttttccgacgggcttaaaacatggcgcaccaggagattatatcctgcacctggctcagagggtcctacgcccacggagtctcactgattgctagcacagcagtctaagatcaaactgcaaggcggcagcgaggctgggggaggggcgcccgccattgcccaggcttgcttaggtaaacaaagcagccaggaagctcgaactgcgtggagcccaccacagctcaaggagacctgcctgcctctgtaggctccacctctgggggcagggcacagaaaaacaaaaagacagcagtaacctctgcagacttaaatgtccctgtctgacagctttgaagagagcagtggttctcccagcacgcagctggagatctgagaatgggcagactgcctcctcaagtgggtccctgacccctgacccccgagcagcctaactgggaggcaccccccagtaggggcagactgacacctcacacggccgggtactcctctgagacaaaacttccagaggaacgatcagacagcagcatttgcggttcacgaaaatccgctgttctgcagccactgctgtggatacccaggcaaacagggtctagagtggacctctagcaaactccagcagacctgcagctgagggtcctgtctgttagaaggaaaactaacaaacagaaaggacatccacaccaaaaacccatctgtaaatcaccatcatcaaagaccaaaagtagataaaaccacaaagatggggaaaaaacagagcagaaaaactggaaactctaaaaagcagagcgcctctcctcctccaaaggaatgcagttcctcaccagcaacggaacaaagctggatggagaatgactttgacgagttgagagaagaaggcttcagacgatcaaactacttagagctacaggaggaaattcaaaccaaaggcaaagaagttaaaaactttaaaaaaaatttagacgaatgtgtaactagaataaccaatacagagaagtgcttaaaggcactgatggagctgaaagccaaggctcgagaactacgtgaagaatgcagaagcctcaggagccgatgcgatcaactggaagaaagggtatcagtgatggaggatgaaatgaatgaaatgaagtgagaagggaagtttagagaaaaaagaataaaaggaaatgaacaaagcctccaagaaatatgggactatgtgaaaagaccaaatctacgtctgattggtgtacctgaaagtgatgagtgatggggagaatggaaccaagttggaaaacactctgcaagatattatccaggaaaacttccccaatctagcaaggcaggccaacattcagattcaggaaataaagagaacaccacaaagatactcctcgagaagagcaactccaagacacgtaattgtcagattcaccaaagttgacatgaaggaaaaaatgttaagggcagccagagagaaaggtcgggttatccacaaagggaagcccatcagactaacagcggatctctcggcagaaactctacaagccagaagagagtgggggccaatattcaagattcttaaagaaaagaattttcaacccagaatttcatatccagccaaactaagcatcataagtgaaggagaaataaaacactttacagacaagcaaatgctgagagattttgtcaccaccaggcctgccctaaaagagctcctgaaggaagcactaaatatggaaaggaacaaccggtaccagccactgcaaaatcatgccaaattgtgaagatcatcaagactaggaagaaactgcatcaactaatgagcaaaataaccagctaaaatcataatgacaggatcaaattcacatataacaatattaagtttaaatgtcaatggactaaatgctccaattaaaagacacagactggcaaattggataaagagtcaagaaccatcagtgtgctgtattcaggaaacccatctcatgtgcagagacacacataggctcaaaataaaaggatggaggaagatctaccaagcaaatggaaaacaaaaaaaggcaggggttgcaatcctagtctctgataaaacagactttaaaccaacaaagatcaaaagagacaaagaaggccattacataatggtaaagggatcaattcaacaagaagagctaactatcctaaatatatatgcacccaatacaggagcacccagattcataaagcaagtcctgagtgacctacaaagagacttagactcccacacaataataatgggagactttaacaccccactgtcaacattagacagatcaacgagacaaaagttaacaagggtacccaggaattgaactcacctctgcaccaagcagacctaataggcatctgcagaaccctccaccccaaatcaacagaatatacatttttttcagcaccacaccacacctattccaaaattgaccacatagttggaagtaaagctcttctcagcaaatgtaaaagaacagagatgataacaaactgtccctcagaccacagtgcaatgaaactagaactcaggattaagaaactcactcaaaaccactcaactacatggaaactgaacaacctgctcctgaatgactactgggtacataacgaaatgaaggcagaaataaagatgttctttgaaaccaacgagaacaaagacaaaacataccagaatctctgggacacattcaaaacagtgtgtacagggaaatttatagcactaaatgcccacaagagaaagcaggaaagatccaaaattgacaccctaacatcacaatttaaagaactagaaaagcaagagcaaacaaattcaaaagctagcagaaggcaagaaataactaaaatcagagcagaactgaaggaaatagagacacaaaaaacccttcaaaaaattaatgaatccaggatctggtttttttgaaaggatcaacaaaattgatagacccctagcaagactaatgaagaaaagagagaagaatcaaatatatgcaataaaaaatgatattgtggatatcaccaccgatcccacagaaatacaaactaccatcagagaatactgcaaacacctctacacaaataaactagaaaatatcgaagaaatggataaattcctcgacacatacaccctccgaagactaaaccaggaagaagttgaatctctgaatagaccaataacaggctctgaaattgtggcaataatcaatagcttaccaaccaaaaagagtccaggacctgatggattcacagccgaattctaccagaggtacaaggaggagctggtaccattccttctgaaactattccaatcaatagaaaaagagggaatcctccctaactcattttatgaggccagcatcatcctgataccaaagcctggcagagacacaaccaaaaaagagaattttagaccaatatccttgatgaacattgatacaaaaatcctcaataagatactggcaaaccgaatccagcagcacatcaaaaagcttatccaccatgatcaagtgggcttcatccctgggatgcaaggctggttcaatatacgcaaatcaataaatgtaatccagcatataaacagaaccaaagacaaaaaccacatgattatctcaatagatgcagaaaaggcctttgacaaaattcaacagcccttcatgctaaaaactctcaataaattaggtattgatgggacatatctcaaaataataaaagctatctatgacaaacccacagccaatatcatactgaatgggcaaaaactggaagcattccctttgaaaactggcacaggacagggatgccctctctcaccactcctattcaacatagtgttggaagttctggccagggcaattaggcaggagaaggaaataaagggtattcaattaggaaaagaggaagtcaaattgtccctgtttgcagatgacatgattgtatatctagaaaaccccattgtctcagtccaaaatctccttaagctgataagcaacttcagcaaagtctcaggatacaaaatcaatatacaaaaatcacaagcattcttatacaccaataaaagacaaacagaaagccaagtcatgagtgaagtcccattcacagttgcttcaaagaggataaaatgcctaggcatccaacttacaagggacctgaaggacctcttcaaggagaactacaaaccactgctcaatgaaataaaagaggatacaaagaaatggaagaacattccatgctcatgggtaggaagaatcaatatcgtgaaaatggccatactgcccaaggtaatttatagattcaatgccatacccatcaagctaccaatgattttcttcacagaattggaaaaaactactttaaagttcatatggaaccaaaaaagagcccgcattgccaagtcaatcctaagccaaaagaacaaagctggagacatcacgctacctgacttcaaactatacaacaaggctacagtaaccaaaacagcatggtactggtaccaaaacagagatatagatcaatggaacagcacagagccctcagaaataatgccgcatgtctacaaagatctatctgatctttgacaaacctgacaaaaacaagcaatggggaaaggattccctatttaatgaatggtgctgagaaaactggctagccatatgtacaaagctgaaactggatcccgtccttacacctcatacaaaaattaattcaagatggattaaagacttaaatgttagacctaaaaccgtaaaaaccgtaaaaaccgtagaagaaaacctaggtattaccattcaggacataggcatgggcaaggacttcatgtctaaaacaccaaaagcaatggaaacaaaagacaaaattgacaaatgggatctaattaaactaaagagcttctgcacagcaaaagaaactaccatcagagtgaacaggcaacctatacaatgggagaaaattttcgcaacctactcatttgacaaaggctaatatccagaatctacaatgaactcaaacaaatttacaagaaaaaaacaaacaaccccatcaaaaagtgggcgaaggatatgaacagacacttctcaaaagaagacatttatgcagccaaataacacatgaaaaaatgctcaccatcactggccatcggagaaatgcaaatcaaaaccacaatgagataccatctcacaccagttagaatggcaatcactaaaaagtcaggaaacaacaggtgctggagaggatgtggagaaataggaaaacttttacactgttggtaggactgtaaactagttcaaccattgtggaagtcagtgtggtgattcttcagggatctagaactagaaataccatttgacccagccatcccattactgggtatatacccaaagaactataaatcatgctgctataaagacacatgcacacgtatgtttattgcagctccattcacaatagcaaagacttggaaccaacccaaatgtccagccatgatagactggattaagaaaatgtggcacatatacaccatggaatactatgcagccataaaaaatgatgagttcatgtcctttgtagggacatggatgaaattggaaatcatcattctcagtaaactatcgcaggaacaaaaaaccaaacaccgcatattctcactcataggtgggaattgaacaatgagaacacatggacacaggaaggggaacatcacactctggggactgttgtggggtcgggggaggggggagggatagcattaggagatatacctaatgctaagtgacgagttaatgggtgcagcacaccagcatggcacatgtctacatatgtaactaacctgcacattgtgcacatgtaccctaaaacttaaagtataataataataaaatgaattaaaataaaaaaaagaaaccatattaaattgatagcctttctaagggtattttttctattgataaaaggatacactgattatgtaacaggaatattaccaagtgtgtgacatttacattttgcagagcataataaaaggcattttaaatttaagaaaaaaaacaaagacaacagcaacaaaaaacaaaacaaccagatgtgcattcttgcccaaataagccaacctaagtcagcttgattgtggacaatagagtcagttggagtgtgagaacagttttactctgggactgataccataaaaaacaggctgctctgtaaagtgtacacccctcaggtatcaggtgacacaagtcaggcactgcctcaaaagtgaaaggttgcaaacagtgacaagggaatggaaatagattagatgtggataatggaggcatttgttcttctacaaccttctgacaaacattcattttggtatctactggttatgcacagaaatttattgaaattattaacatggaaggcctttctttgggcataacaaaccactatttgttcacctaattatactgggaatttagggatatatttcagtgcattttactttagataaaatcttttcatttcttatggaacacagagaaatcatcatgaaattctaagtggataaagtggaaacaaagactctatttgtgcaagttgagtacatgggaatgtaattagcattgtagatagtataaatacgcatgtccatatgctgtgtcattagctgtgcgtgctgaagctatgtcacctcattcgtagtccctttcacacataaacagaaacttgaatgttcacttagaaaaaagcatattttctgtaattaccactcaaatgtttcttaggtgtcttcattgcccagcaaagtcagaagtgtgcccagtgtgataaatcattaaacttctttcttatccaagtagcactgatttagaatgaatcatgttttcaaacaatgtgttaataatcctatcagctctctgaaaaaaattagattataatcctcatttaacaaatgaggaaagggaagcaaagagtttgacaactgtctatgaactcagtgaacaaaagccacacttgttggcaataaggctggctgtttcctcctggaccacacagttgacatcccggttgggatatgtcaagtccggaagcggtatgtcaagtccggaagcaggagctataagcagggtaatgaaatggctgctttgcctttcagatgggtctagaggtcaagttagtttatttgtttttaatttagctgaactcataggctggttgaaagatccctttgttggtagcgatcttttgaatagccacataaaccttttggtctctctctcgctttactccaaccccttctcccatttgcaggattagaaaagcacttgggaagcccattaatcttgccggcgttgtcaggagtgatcagcgagttttattaaaagccctgggattgcctgaaaggcccccttgtctgactttgaaatgaaaggggcatgttaagatctcggggcacattgtcaggacccctcaccctgccccttggactatgagctgaccctccaggaggaagcacagaagccctcctttgttaaagggatttcgccggtggacagagaagagttgggccctgtcagcatgaactctctgagttggggggctgcgaatgccgtgctgctgctgctcctcctggcctgggccagccccaccttcatcagcatcaaccgcggggtgagggtgatgaagggccactctgccttcctgtcaggagatgacctgaagtttgccatccctaaagagaaagatgcctgcaaagtggaagttgtgatgaatgagccaataacccagagggttgggaaactcactccacaggtaggtcctatctgcgattttctgttcagtcgtgtgtatgaatgcaagtgtatgaaaatgtgtggggggacagagaacagatgtaaaatgtctcccctcaagccatcaaagacgagtattagaagatgttcacatttgaaatggtggacttgcaattagtaggcatagtattgcgctgcttttctatgtgaggtgaaacctatttttaaacattcttggctgacttcagattacaagcctgaaaccagcaggatttaatcctgattataataacatttatagaggaaatcaggttcaaactaatatggatgcatgtaatttttttcttaataatgcactgtttcagtaagtctttccaatttctcctctttcctgaagataactctggtatatctcaccagctgcttgaccttatagagtagctaattatacaggaaaaagcgcaaagcatcatgtaagagaattacattggagttattcctgccccgagttatcacatccattgccagtcagagtggctttggataagagatcaagatttcaagacatttttaggacatacctgtgaccttagcatagcaaaggtaaaacttgaagatgtttcatctattaacatcacttaaacattttttctgagtaagggaaaagaagtagaaaagagatgtgaagatacttcactttaaatattcactgttctttgaaattatctgcttaatttttttccttttaatcaaaatcttggagacctttatatttaagggtattctattgtcaatcttcttgtagagtgaagagttacctcctaattcattgggtttaaaaagtctatattctctaacactgtttttgcttaaagtaggagttaccactatacataattttaaaaaattgcttctgattttattacttgttcccactgtcctgtaactttgctcccagtgcaaacaatcttgagaatattcaacactagatgctgctgctgcttctggaaaaatggaccattctcttttgctgaactatgaactttatttccttttcatttggctaaagaaaactaatccacgaggttattgaaaagtggtactaggtattacagagagagaaaaaaagacttagatggatactagctcaactggtgtctctagacactccatttaccacacttcaagttatagacccattctgaaacacatcagaattctttggaagagggtctcactttgcaggtatttctgatgtggtagtaaccaaatgtctctgcctagttgcttgtaagattttatcgtcagtcaaagagctttagatgggtatctaaaacatgttagaattcaacaatggctccacatattagccattgtattcccaagtgtttggtagttgcagtgtctcctcagttactcccaattatacttgcattctgaatgtgttttgattggcacttacgagtcagggaaaaagaagatacctgggattgctcatactagaaccccaatgtgctacataggatgaggaagcaatacaaataagctcaggagtgggtgatagagacccaactacagggactggggtcgaaaggaaaatgcaggctggttgcagtagcttacgcctgtaattccagtactttgggtggctgaggcgggtggatcacttgagtccaggagttagagaccagcctggtcaacatggtgaaactccatctctactaaaaatacaaaaattagccaggcgtagtggcacatacctgtaagcctagctactcgggaggctgagacacaagaatcgcttgaacccgggaggcggaagttgcagtgagccaagatagtgccactacactccagcctgggtgatagtgtgagactctgtctgaaaaaaaaaagaaaggaaaatgcagcctgtagagttttgagagagggtaaaataggacacctgatcctagaggactggggtgtttgataaagcaggaacccagggctgtactggcacatatgggtgtcttataaagactggtgattgataatatggtacctcttccaatcaatatatttttaaaaatcattcaacatttatttagaagtgggcctgagtatattgtgaaaaagagaagaaggaaaattcccactggtagctcgcaggagcaagctgtctaagctgtcttccagtttggacctcaagcatgcatgcccaactgagcaaaacaaaagccctgcagatgaccagattctccttagtaggcaatttggagataatctattgttacctaagccagcctctgagagctctcctctccctacctcaaatggcctatgactccttaccgtatatggcagtctctctgagagaaataaaattgtccccattatatatctttagtgatgttttaatggtcctgattgcttggcctgctccaaggcactgaggagcaaaaagggatccaagtgactagaactaggtaaaaaacatttgttcacaagaatcaaggattggaataggcctgcaagtcatctccatctcacactctctgattttaaggtaaaactccagttactagaaagacagtatagaggagaaaccacaaattgccttggttgctgagaaacacctctgaatatactgattccctagcctgctattgctcattaagaaaaagtagaatcaagtcatgaatacttagtgtatgtatttccagaggcaaatatgacatctcaaatggatttatagcctctaaagtcggtatgggatttatatcttctaatatttattctgtggtaaaggagttcattaaaatatggagtttcagtactttttttggccaaatattaaaactgtgtgtgagagaaatctatatcatgggagaactttgtttctcaaactgccaggtgattgttcctatttgttattctcataatttcaacaaaaacaagattcctaagtctgttttgttttgttgaatttgtgcttggtttttaacgcaggctggttcagtccttccctaggggttcgttccttatggagttttagaaattaagcatagctaagtgcatgtgcacacacacacacacacacacacacacacacacacacagcctaaacattattctttaatagagcttagtaataagctgaaagccaagcttatgtgaacccatttctagcaagacgactgtattaacaacaccctgctgtgtaatgaacagtttcatgtgacttgcacagaaaatgttttgtttaacatctgttcaattagtgttttcatttcattactgaagtttgtcttaggatcaacaggttcattttcctgttgaatatttggaaagggatttcagttgatgcacaccagtgccttctgttcagataaccctcttgatatagtcaattagatgaggttgatggcaatatgttttcctcatgttttaggacaagactccctcacacatggcacttctcacacctagcccaaagcaagaaatttgctgggtggaaagcaccccaggttagcactaaacttgcttttttgaataggaaatatagcggtaagaaagtatctctactttgaaccattttactgtcattaaagtgagtaatgagctaggaatgtgtgacaatttaattataaattgtaattgaaaagcagttgaagtggaaaaaaacaaagctagacagtaattagaaaaggatttagctctcctttgttttagttagtaaatttatggacaattatggttgtcgccttttataaaaggaaaacatattatgaaacataaaacagatgtttcttttaacaaagcagactgtctctttattaccatgactatttgtcaatgatatggggaaggtctttgctttatctccttcctagttgtcaatttaaaagaggaatcaatgatatctgcgggaaaagaaaatcgtttgtattagtggtaaagtcttctctgagtgaattatgttgtctgaaaatgtttgaggctgtgaaaaggtacagacgaaacaccacgaacacaatggtggacatgcgtgcatacctcaagggtattagaactctaccagagtcagattgggcagaatgaagggcatgatatgggtgggagagatgattcttcctctaaaaatcaggttcccaaaatataacagttaacaatctcctaataattctgagtgagttgagacagttcattataattttatttgaatagaggaaattgcttttagatttctgtttttctcatctgccatttctgctattgcctaactaatgaaagcagttttttgcaagtatgcaagacacaactctgggtcatgttaggctctgattaaccacagtagtgtccatagtcagtggcttcatctttgaatatgagaatactattcggaaaaaaaaagaaatgaaaggagaacacagatatacagaaagaatacagtgtgtttgtgggtgggttaaagcatgccttttcatgcagacacacagaaagaactctctaactcaattgctgtgaacccctgaaaggggtaaataaaatttcgaaaaatgaaagtatgttttaaatgcactctaggtggtaaaaagacacttatttagagacgtaatcatcccttaactaattttcttgaactgctttggttttcacaacttagatattctcaaaacaagagacagctgtataagtaggatggtgactgggtatgggggtagggtagaggtggtggtggtgaagacacacacactcacacacatacacacattactaacagagcatattttctccaggcagtgctctcctggcaaaatgttaaatcttgtaccaattttctcatagatatttatccaattcttcatgtgaactaggtctttgactgccatttccttcccaacgaagtcaagtatgttcacaatggttgtccaattcttgatgaagacacagtgaagctcagactttacaggtaagcggcacgggaacatcgctcatttgctgccaagtaaccattctgtgttcttatgagggcttttcttgtggatatgtattgtcatgaggggagttaatagattccagacaagaaagtaatcaacagaaactggaggcctgagtggatcaggcaagatttgtagccaactttcagttatttccacttgtgtcatcttccctaggattcttctgtggcaaatttttagccgtatcctgtttccctctagtgtccttatataggtatctctggtgttccaacccaccacttatggtagaaaatggaaattataaactacaaattcttaatgaaaatcagggagaaaatatattccaaaaatgaatgaaattcttcttttttgttaccagctgtttagttacagaaagtgcaatatcttccatttttaaacatattaaatatttaaaattcctttttttttttttttttgagacggagtcttgctctgtcacccaggctggagtgcagtggcgcaatctcggctcactgcaacctctgtctcccaggttcaagctattctcctgcctcagcctcctgagtagctgggactacaggcgcccaccactacgcccggctaatttgttgtatttttagtagaggtagggtttcaccgtgttagccaggatggtcttgatctcctgaccacatgatctgcctgtctccgcctcccaaagtgctgggattacagggatgtgccaccatgactggcctaaaattctttaaaaatcaactatggagttaaacatggaatgaccgtaggagacagcagttcttctcctacgcatatatataagaaaaatgaaaacttatgttttacataagaacttgcacttaaagttcaatgcaacattattcataacagccaaaaaatggaataaatccaactgatgaatggataaacaatatgtggtatattcatggaatggaatatcattcagccataaaaaaacaacgaagcactgataaaggctacagcatgaatgaaccttgaaaacattatgccaagtaaaagaagccaggcacaaagtgtcacatattgtattgttccatttgtatgaaatgtctagaactggcaaattcacagagacggagagtagattagtggttgccagaggctggggaagggaaatatgtctcttttggggttgatgaaagtcttctggaattaggtagtcatgatggttgtacaaccttgggactacactaaaaaactctgagttgtatatttttaaaagatgaactttgtggtatatgaattatatcccagtgaaaattaattttaaatttaagctcacgattatggtatatctgacttcataaaagtcactgagaactgatgtatgtggagtaggcctttatagggttttttatttggtttttattgcttttaagaatatttggttagatatgttggtgtgaatttcctttaagcattagactaatgtaaaagacttttgtacaagacattggaacagtgaaccattctacaaacatttatgaccacctattacaggccaggctgtacgttgagcataatcaacaaaaggatgagaatacacagattattttagtgcttgtagtctaaggcaaaagatgagcaggtaattatgatgcagaacaagcgccaaaagagagtcacaaaatgctgtgttgagaaaatgaagcggcactcaaggattccttaggaagatatgaaatcagcatacagggccatttgatctttctaagactttagagttaaaaaacaaataacttcaaagaacttgcgcggagcgggtgggaagggtagtggggagttgcagggaacatggggatggttaatgagtacaaacagtagttagaatgggtaagacctagtatttgatagcacaacagggtgactaccgtcagtaacaattcaatggcacattttaaaataactataagattataattggattgtttgtaacaaaaaggttaagagggccaggcgcagtggctcatgcctctaatcccagcactttgggaggctaaggtgggcagatcacctgaggtcaggagtttgagaccagcctggtcaacatggcaaaaccccatctctactaaaaatacaaaaattagctgggagtggtggcaggcacctgtagtcccagctattcgggaggctaaggcaggagaatctcttgaacctgggaggcagaggttgcggtgagccgagattacagcactgcactccagcctgggcaacagagtgagactctgtctcaaaaaaaaaaaaaaaaaaaaaggataaatgcttgagggaatgctcaataaatggataccccatttattaagatgggattattacacattgcttgcctgtatgaaagtatctcatgtaccccattacatatatatgtgtacatatatgtatatacgtgtatatatgtgtatatatgtatatatatgtgtatatatgtatatatgtgtatatatgtatatatgtgtatatatgtatatatgtatatatgtatatatgtgtatatgtgtatatatgtatatatgtgtgtatatatgtgtatatatgtgtatatatgtatatgtgtgtatatatgtatatatgtgtatatatgtacatacatgtgtatatacgtatatatgtgtatatatgtatatatgtgtatatatgtatatatatgtgtatatatgtttatatatatgtgtatatatgtatatatgtatatgtgtatatatgtatatatgtatatatgtatatatgtatatatgtgtatatatgtatatatgtgtatatatatgtatatatgtgtatatatgtatatatgtgtatatatgtgtatatgtgtatatgtgtgtatatgtgtatatatgtgtatatgtgtatatgtgtatatatgtatatatgtgtatatatacgtatatatatgtgtatatatacgtatatatgtatatatacgtatatatgtatatatgtgtatatatgtatatatgtgtatatatgtatatatgtatatatgtgtatatatgtgcatatatatgtgcatatatatgtgtatatatgtgtatatatgtgtatatatgtgtgtatatatgtgtgtatatatgtgtatatatgtgtgtatatatgtatatatgtgtatatatgtatacatgtgtatatatgtgtatatatatgtgtgtatatatgtgtatatatgtatatatatgtgtatatatatgtgtatatatatgtgtgtatatatatgtgtatatatatacatacctactacgtacccacaaaattaaaagtaaaaataaatttaaaaaagaaaaaaagctgatgaatgcttgcttcttctactccttccttgggtttctaggctgctgggaggctggaagagtatacatgaaatgcagggttagaggagcttcttcccctcttggtcttcagcacatttgaaataaaatattcaggggagtaggcagcagaaaacagggagcatgtttgttcccctcttactgcttctccttctccagcccctttggcaagctacctgagcccgttatgcctgagtttcttcctccataaaatgggattaacaatgtctggatatcctaggtttttataaggattatgttatatactatcatagagaatttagcataatgcctgggccataataagagcacatcaattagaagctgcattattgatgcatgcatatcactcattaatcttctcccttcaaaaaaaatgacacccctctattttagactcttcaaacaacctgagattaaagttgctaagtggatggagggaatggaagtggcaattgctgaatatgctttttacatgccaagcactgagctgggcacccaaactaggctgcaaatgaccacctatgtagtggtatttctgaagggcaaaaaggcctgaatgcttcagaaaccactcaccccttcactcctgaattaaaagtcaatccagaaattatataggcttgagactcttaaattacacatgtgctagaagtgagactctgagatctcagcagtcattaaatatccacgtgcatgatgagtttgagagcaggtgttgaaagaaagatgttgggaggaagaagtggcaggaaaaggtgttgacaccagggtaaagagatgaagggaaaagaacagagaggctgggagtagagcaagaaatgaaatccaaactcaatctgtggcacaaatttggtgaaggccaatctttagtcttccagctgagtacatgggtatcagaaatacctgagcaccaattaatattgcttttgccctgtgttctccacagatttactgaaagagataccttcatagaaacttttatcctgtgggtctatctcctggaaccagactgtaacatcatccatatgagtaacaatgtgctggaggtgcctgaattcaatggcttgtcccaagcgattgataaaaatctgctcagattcgattatgataggatggctagcctggaatgtaccgtcagcctggacactgcgagaactcggctgccagcccatggccagatggttctcggggagcctcgaccagaagaacctcgtggagatcagccacacagttttttcccagagtcccgtatgatgtcttttaatgcctttctgggtattaccaaaactgacaaaaatatccatgcatgctcaccttccaccatgatgaagagttctagttaactagtcattttagctggctgaacagtgtcagttagtggttaagagcacagactttacaatcagaaagacctggttttgagaacttcatctgttctttattttctgtgtaattttagttattaacctgtctaagcctctctaaaatgagaaaggaaaatagctgccctgtagggttgggtaaggataagagtaaatgaggttatacatacacacagtacttaacacagtgtctggctcacagtaggtactcattgtcagctgttattagtaatagcaacagtagtagttggtgcatttatggagtattattggattatgagcaaatttgaagtaaagctagtgggtagcagtgatagacgaaattaggaagagtttatgggtaacattccttctgctattcactcaatcaacctattttgggcacctcctgttctctctagaaactatgagaagccaagaaatataagggataatcatagcaatagtagtaatactttgaattttggacagaatgacagttaacggcacatttgttctattttgtacgtctgagaaatgagactccaaaaaaaaaaaaaaaaagtgggtggctgggcatggtggctcacacctataatcccagcactttgggaggctgaggcaggaagactgcttgaggccagggtttcaagaccagtctgggcaacctagcaagacctcatctgtacaatttttttttaatttgaaagtggcttatgagtattatatactaaacaagagtggaaatacatttggttagagatgtgaagactgttggagagacaattatggttttcagtgagaaagagcatgttggttcaggtggtcaaagaatgtttaagggaaggcttagtaaaaagaccaggtggacctggaaggatacgcaggatttgagtgcgtgatagccacatggggaggggatttcagtgagtagacagcctagtagagattgtatgatagagacatggaagctgattctgtaaaggaaagactggagctagactgtggaaggcctgcagtgagtcactggtctatttgtcagagatgttcaagcctcagacaacatattttattattttttctctcagtttaacttttggtgggtgagggcacgatgagacaactggtcaaccgtttttcagtaaaggaaactacaagctttcagaataatgacaacccactcagtgaatgattggaaggtacatgagtgttcctgaggcagtgagagggaataagtattcatgggacggagtactggtttctaaattttacaattgttatgtttaagtgactctcttaatccagtgctgtacattctagaactgagagcaaaactgaagtgtccaggtgggagctgtaccccaggattaaagaaaataggaagcctcaaagtgagctgtgaggagttcctgctgatgggccttcgttatcagcatctggatcccccttcacccaacattgattatatctccatccaactggacctcacagataccaggagcaaaattgtgtacaaggtagagtttggggttatgtgtgggtgcccccaggattcacagtaagagagccagttacacaggcttactcatgctcgcccccatgccagggagagttcctgtgcttttgggggtaaaactgccagcgactcattggaactgcaggcttgttggttctgctagtaagtgcttaaaacagtaggttttgtataaaatttcccttctctggttctcttctaggtccaccatcagtacagcaacttgggaaggactggggctagttacgtgctaaccttcttcctcctttactcccaatactcttcagcttgtcatttgaccttttataacaccttctctttgatgcttccttttgtccttcttgaaatcagggggtccactctgcaaggtcacaggaaactagggggagggaggagaatctcagtcccatggttatgtttgtcacagatttgtcactcttccaggctttgggatgaagggctagctcatcaaggagacaggctcccaaagacctcctgcgtcttccaatctcttttaattctcttgtttttctcctattgatctctatatattgaaataatgacagaaagtggattccatttatttgaaatatttaacatgcagtgctgctgattcatgaactctataatttgtttattggggaaaccggggaaactgcacctgctgaaacagctgagatttttttttttttttttttttgagacggagtctcgctctgtcgcccaggctggagtgcagtagcgcaataatgtcggctcactgcaagctctgcctcccaagttcatgccactctcctgcctcagcctcccgagtagctgggactacaggcgcctgccaccacgcccggccaattttttgtatttttagtagagaaggggtttcaccgtgttagccaggatggtctcaatctcctgacctcgtgatccacctgcctcaccctcccaaagtgaaacagctgagattttgtgctgaggaaagatgatccaagatgatgtttggaaatacttctatctttcacaatctggcttctcactgggatttctcctaaggggcccagtcaaatattgaacattattaccccaaggaattgatatgacaaggaatcataaagaaatgataaaacaaaatcatagaattaagatctggaaaaaaactgtgaggcagactagtcaaattgatcaggtaaatcacttgggtagcttttcaaggataaatttctgagtccaaataatagttaagagcatggacgctgggcccagattgcctgggttcaaacgtccacttaactaactgtgtgacttttggtctcattttcttcaacttaaagtgggtttatagtacctatttcttagagtaactgagaggattaaatgataaatacttattatgtgcttgacataaaacctggcacatagtagcactatgcatattgctggttttaaaagtcacccagtaaaaaactcattagccaggtttgcaaaaccaggctgggtttagctcaagcttcctattttatagtggtggccccgagaagtgacataccttgttcatacagacctaaacactaggtctatagacaactaatagatgttttctgtttgttttaacacaaaactcctttcacttttaatgatttattatatccattgaaaaaaaattggagccatttttctttttgatcaaattttctcatttttttcttactatattgaatacgcctttatttgtttatattttaaaatctgttttattgggagtttatccctttaccttcttgctttgtttatcattaacctattccatagcttatttggcatgtcataaaacagattcatttatgaatataaaagtaataggctcactgcagagaatattaaaaaaaacacagaaagcaagataagaagaaaataaatatagctgtatttttaccatttttacatacacacacatgtgcatgagtgcatgccagagttggttttgttttatggaatcgcatttatactatatgtgaagttttgtatcttgttcttttgttatttttatggttgtacagtcaattctcatcaagtgaccaaatgatccttcactcataatttcttctagatttttaaaggtcttcttccttacatttgcctttttaatctacctcaaatacaattttattatatgatgaaatacaaggaacagttttttccaaatagcccaaattttcaacactattcattgaacaattaacttgtttcccattgattttagatgatcttctattgtatataaggatataacgtatacaatttcaaggctagctcttttatttcttagatttacctacttattctttgtcagtctcatattattctaaacataataggcctataattttcttacagacaggttcttccttatcacttctcttcaaaattttcatggccattatcacctagacttagttccaaataaatataattaaatcatttatgttagtttaaaaaaaagcccctaaggatttttatcagtatccaattagaactataaattatttggggaaaattagaataatggaacatttacaatattaagtcttttcatccagaaatgaagtatctcactttattgaacaaaggttcttttataggtttctgtaaagttcgtagtttccttcatgtaaggtgagcatacttattaagtccagtcctaggcactttgtttttgtgaacctatggtgaatagaatatttttctcccattatatcttctcaatggttattgatgataaacagaaaagctatttttggaataattttcttttatctggcttctttcctgaattcaattattttaagaagttctcaattctttgggcttttaaagaccataattatatctttcactagtgatgataattttgttctttcttttcctgtaattattcttcttatttttgctctattccccactggtttgagaagaacaatattaaatataatgttatttgtaagaatctttgtcttatattttttacttttatcaactgcccacattgaattcatctttgaaattatgtggtctctctgctttttccattaatgatcaatttgtatcacccttttccttttaatctttctatgtaattttaagtgcctttcttgtaaggtacatataattggacatttttgttgaatttcagactatttgtcttgaataaggaaatataaactttatatttgtggtagtaatagatacacttttttctatcatgttttatgctttcttgctaattaaaaaaatttgtcttgcaaaataaatgatgttttctttgcctttatcttatttgacaattccttatcacagttgatgttttatttggacttaattctaaacttaaaaatattcttaagcctatatttgtaatatgtacggtgaaaaaatgaagtgagctctcttggctccttcctatgtatgatgataactgatccaattgatcctttctcctggcaattgctttgtttatataatttgcaatttcagttctagcatatgattgttatactttattacaagcagtaagctctttcatcatttgtatccactttattaacatgtttaaaataacgtacttatttagacttgactctagactcaattggtcttagcattaagcaccagtccttctaaatcacaatttacccctcttgagttttctaattatgcatcttcaaataatacttcttcccagtgacacacgaagattagatactctaaaccctgggacatctcagtatcgttcacctgccttcatcaaccatgcagtgggaagggaaggggttgattgtcttctcctctattcctctcttgcaattctcttttctctgggcattgctggttagtttcttaattttcagactggtggcaggggtggttttggggaatgggagagagggatcttatttgatcaggcattgatgacatatgatttcatgctctctgagcctggtagatgtctcaagctgcatctttgtcttagggacaaatttatggtttctctggagagtcccattcattgatctatcactcatagctctcttaagaggattatttctaacctgagtgatcacttgcaatttctcctgcagctcctaggatttgattctatctccagcattttcctactggatttttgtcctctcaagagtgcactctgaagttcagggtccaggagatcccagaccagccctctgcccactaggcccttaactggaaacatttatatgtcccttgttgccacaaacaagaacagactgattttggcacagccatcattttttttgcttccagccagttagcttcctcagatatgagccctgcatcagctctctgtgtgtgtttcaactgcaagaaacacattttaagggacaggagatatggcattgctctgctcttcctgctccgtgccaatgtttggtgttgaaggtcaggaaagtgactgaacacaacgcagcaaagcactcctctctcctaatcaatctttttcttacctttctcaatctttttatattcttatatgggcaagaaagttctggagtctggaattagttccagacaacttgctttgtaaattctgcatattttactacctgtcttacattcagttgcacatctaatctcttttattggaactttagcattctgttatacacagattacaactcctagcccaatggcaagtgttcagcagtatgggactaatgtgaatttggtaactgagcctggttctctcagcaatgggctagatcaaatcctgtgagaactagcatctacagctatgaggattcttttcttttctttacaaagtctcactctcttgcccaggctgaagtactgtggcatgatcatagctcaccataacttcaaactcctgggctcaagtgatcttcctgcttcagccactcgagtaattggctataggtgtgcaccaccatgcctgtctaattttattatttttactttttttgtagagatagggtctcgttctgttgcctaggctggtctcaaactcctggcatcaagcaatcctcccacctcggcctcccagagtgctgggattgcaggcgtgagctaccacacctcaccctgtgaggattctttctgcccatagcacttgttgagatcttagatcttgtggcacaatttcatggtttctttggagggtctcttgctcatagtgctctcattttgggaggatgcatgcctagcctcagtggccacttgcaatccccaatgcccaacccttgcttgaagatccagggtcttaactagctagacaaccaagcaactattcttcatttgcatgagaaccaaatcataaagacatatttccttcatccttctcctgccccctttaaaactacatgacaggaggtgaggaaggcggctggaggaggttgttggtgagtgccagattgctaagtgcctactttggctatttcatttgtcctcacttaattcttggtagtctagtattaatattttcatttacagctggaaagaaaatgagactgaagagttaagtaacttgtctaaaatcacacaaattaaaagtgttggagatagaatgataaacacagttccttctgatgccaaagtaggtgctcccttcttcacctggctgcatgtaagagtcaccagggagctcgagaaatactggttttctggtcccctttttggaacaattaaacaagaacctctggagacagatcctaggtaccagcatgtgtttaaagctccccaggtgattccaatatgcagccaggcttcaggtcactgctagacgctaggctgtggctgtattaaatattatgctattagccctgtatgatatcacctcattcatattatttcctcctttatattttctctatccttcaaaagtcagagagtgcgtggctgcctgtctatatcagagctggaattccgaatcagattccaaaggctgcattcatggccgtgtttattctggaagtggatcagttcatcctgacctccttgactacatcagttctggactgtgaagaagatgagacccctaaacccttgctggtgttcaacattactaaagccccgctccagggctatgtgactcacctgttggatcacaccagaccaatctcctcattcacctggaaagatctcagtgacatgcagatcgcctatcagccaccaaacagcagccattctgagaggagacatgatgaggtaagaaggagagacaaagcttccagcctagttagaagtcacagggttatttaagaaccccctaccctaaaccctcaggttcctttgtacattcattgcctcagaaaagaatcaatcactgtaaatcaggatgcacactcactgcccagaggagccaggcaggtggggtcaatgagcaaaccccactgaggggcactgtggcaaactgaagaaagagccatcccctcaggaagcagctgccactcagctcatgcccaccactgccctgcaaggatacaagtgtgcccactgttgctgtagcactcatgtgccaagagaaattggaaaatgatacatttttggtaaaatgcttaaattcttgaatatagaaaacaattaaaacttgtagtgaaacgtattgtgctagctaccaaatatttctgagggccacatttgacccagggctcaccagtttgagaactgcagcagccttcgacagccttcctgaatcacagagaccattgaagttagagatgacttttgtttacaattcttttatttttaacaaaatttttttggtgtgtttaagttctggggtacatgtgcaggatgtgcaggtgtgttacataggtaaacatgtccatggtggtttgctgtacctatcaacccatcacccaggtagtaagcccagcatgcattagctattttttctgatgttctctctccctccacccccaaccccgacaggccccagtgtgtgttgttcacccaaaatatggaacactttccgaatttgtgtgtcatccttgtgcaggggctatgctaatcttctctgtagcattccaattttagtatatgtgctgccaaggtgagcacacaattcttttattaataaattcttttattctttttttttgtgagagctttttatgggaatccttaattttaattaataacacggactcaggataggacattccgtagtcttatttgataactaatttcacagtgaaacacagtccatcgggaaggtcctacttctatctaatttccttttgctgcaggttccacctctctcctctgttttgtagttagtgggaggggaggacagctggttaaagtcttccacataatagtgcttcacatgcttaaagaactaccagcaacttgattcaaacagggtggaaattgtaaacgagcagactgatagagacttgagctcaggtttattaaggaaaatgatcgtccctggggttatctctattgtaatttcggcattttcagcatgtagcctcaagggaagacaaaggacttcaggctataaacgctatgctttgccttctgcttttatttcccccttttcatcatagtctgtggccccccatgccttccctgttaggaagtaatttctcattgcacatccaatcttagagcactgcttttctggcctcttcctgtgtgtagtttctggcattgtataatgtactcttaaagcagaacctgtgcgaatgtgtgatttttttcgttagacagtaactctcaattttttcagtggagatcacacagttttcaggttgtgtggactggaagccctgggccagggcccaaccgaatgcattacccctccaaaaaagacacctcctgcccatgtagtttcctgttcagtctgttgctttggcagccttgaatcagtttcttttgttatttagtgtttgctgatatagtgctgtttgattatttatcttatcctcttccatggaccacatgttcttcaaaagtagggagtatgccttgcatttctgtgttatacctcattcttctctgtcaacatctggtgcaatacatacacagcacataataaagatcaaaacttatcacgcagcccctacttacttattagttatgaatttcatgaaagcaaataaagttgagatatttaaaaatatgtctagtgaaatacatgtctctagatcagggtttcttgatagtagcagtacgacaattgccattttgtatcagataattctttgtttgggaggttgtcctgtgtacggtaggatgttagtatcctggcctctacccactcgatgacaatagcattttcccacacaccgacttctgaaattaaaaatgcctccagacattcccaaaagtcctgtagtgggacaacatcacccctagttgaaaaccacttctctagatcctccacctttgagaaagatttaagtgactgaatgtgggaaggggttggtctcctaagcaagtgcagagacacttctccagcatattaccaattttagattaataaattcttttatgtagaagaaaatttaaaaataccgttaaagtaaggaacaagatctagaacctgaaaaagtcaaatcaggatgtctaaatgagatgtgggaactgcagaaatgtgaatccccgcagaaaactgaatccactgtgtgtgggtataacccagaattaatgctactttaccctgtaacgcttcagtgtgtggctcctttgcctctgtttgtttacaggtagaattggaggtatacgacttcttctttgaaaggagtgcacctatgacagtccacatctccatcagaacagcagatacaaatgccccccgtgtatcctggaatacaggtaaagctcaatataaggcatagagcaacatagccctgaagggaatacaagaaagtagatgggtcaggaaagaaaggtagttttattcctatgtcatacatgtggcaactgaaacccagacagattaagggcatcacatagtagcttttgttgttgtttttttattcctcctggcagcgtgagaaatttaaatccaggatttctgcgtcctgaggccaagttctttcctctgccggagataagacaaagggacacttttcaactgaatgaagcaaaaaactgactatttgtgatattgagctgtagtgggactgaaatctccaactcaaattgttccaagggattggagaaaggtttagcttttataatctatagtctatttttatgttgggctgcatggaaactaaaatatgtaaataagagctttaactgctttaaaatatggctttctatgcctctcaattctgagtggacttatgtgatatatatatgtatatgttgatcagatgtaaatgtggaatgtaaatggagatcttttccttctcactgatcccatcaataccatttgaaacatacttataagcagtggtggtagatagtattaaggaaaaaatatctgtgtctgatttaaatcctcaggtggcagcttaaacgagctgcctcgtgtgtgtacacatagatatgtgtttgtatgtgtgtgagtttcagcagagatagagaacatcaggtgagcagccttgatttataattctggctatacatcctactgtacctctgtcaagggggtaatgagagaaaagatggaatcagtaacctaaagtttaggaataatcacatgttgcatgggctcctgcctgagtgtagagatggaatagtctgtacgtgtatgtgtgatcggtgacacccaggtttgctcaatgtcattttggctgctttgaacatcagaatcccttttaaaataaatgtttgcttattatgaacttgatctgtgccatcgttgaaatttggagaatgcatctaaaattattatttcgccgtgaagatataaccaatgttaatattttgctgtatatatttctaggcttctcgattgttcctctgctgtgctccgtgatgccttgtcctatgcactcctggcttccaaacccttattgccagtcacagagattcttcttatgcacttctgtccatttcttctccctcccaccctccctccctccctccctccctccctcccttccttccttccttccttccttccttctttttctctctccctctcctttatatatgtattagcccaatttccctagaaaacagaccccgaggcagatcagatgtactaaccctatactaaaagcaagagtaaggggagaagcaaataaaaacgcatggctgagctggtgtcacagctttacaataagataaagcagattgctctgcagtgttgatgtctccagggagaagatgcaactgctgtgtctggtaagagttggaagtggggttgggaaaaggtcaacaatctattaatggtcagttatttcccatctcctgtgtttaatgggttaaagtttacttcactggctgttaactccccacatgcccagattgtgttatctggcccctcttagcagccattgcacacacttcctgggtcccctggtgcagggcctgatcagccacaaggttggtcctgccgccactagagggcagtggaggtagccggctgcatcagaagatgaggcagtggtggcaggagggctttacaattttggagactgggaaccctcatggggcggctgcagctagagaacagtcagttggtcgaggccgggatggcaggtgaagctggcagatgtgagagaagcataagataagtccagcagcacgctaccttgcaattcgaccagcttgctctgctccctttcaggattatctgtaatctgttgtaatattggagttaatagtactaaaaataaaaatagtactaaaaataaaagctacattccagtttcttgaaaagcttttatagatgcaatattcagatggtttcatgagtggaaattcactcatcttttcttaagcaggcacgttggcatgtcatagaacttgccaatacccttttcttatctttttttaaaaaatttaagttctggggtatatgtgctgaacgtgtaggtttgttacataggtatacatgtgccatggtggtttgctgcatctatcaacctgtcatctaggttttaagcccctcatgcattagatatttgtcctaatgctctttctcccctttcccctctacccccgaacaggctctggtgtgtgatgttcccctccctgtgtccatgtgttctcattgttcagctcccacttatgagtgagagcatgtggtgtttggttttctgttcctgtgttagtttgctgaggatgatggtttccagtttcatccatgtccctgcaaagggcatgaactcattattttttatggctgcatagtattccatggtgtatatgtgcctcattttctttatccagtctatgataccaacacccttttctcctttctttcataggtctgagtctccttgaggggcagtctcgagccatcacttgggaacagtttcaggttgtcgacaatgacgacattggtgctgtccggctagtcaccgttggtggcctgcagcatggatggctgactttaagaggtgaatgatccaacttggtaacctagcaaagaatccaaaagtattttcttcaaaagtagatatatttaacagatatatgtagcatctcttgggcccaatttctcaatgaaattgtcaaatgcagaaaatctggagatcttgaaatcattgacttttgtgttcaaatgctcagatcaatgtctaaccatttatgaatggtaccttgtacgtggctcattgtttaaacctcagttttgctttctggatgccatgcatggcttcttgtaagtatactccttaactagttatttttttcccagttggaggacagaatgttttttatttctctgcttcaaagaagtatattgaaaaattaggccgagcgcagtggctcacgcctgtaatcccaacattttgggaggccaaggtgggtggatcacctgaggtcaggagttcaagaccagcctgaccaatatggtaaaactccgtctctactgaaaatacaaaaattagccgggcatggtggcgggcgcctgtagtcccaactacttgggaggctgagacaggagaattgcttgaacctgggcggcagaggttgcagtgagccaagatcacgccactgcactccagcctgggtgacaaagcaagattccatctcaaaaaaaagaaaaaagaaaaagaaaaattaatgcttaattaatactttagtaataatgatgttatgttattagtagtagttgtcatggtttaaaagaaataaatttataattctatgggatgatagttaacaaggtaataatctaataaaagtaatatttacactttatgataaaataagtcattccttataatgaactcagaggatttaattcaattatcttcttagtttccctaactgtaatgcagaaagataactctcaccatcatttgtgagcagggaattctggaatcaaaaacaaaataataaatgtatgataaatcctcctgcttaatctcaggacagtgggaggccagtttaaatctgggtataccagtcaggttgggtgttcgcttgtatgtaagagaaatccaagtgtagtggcttgaaaattagttattttcttcatgtatttgaggcttgaagacccagaaggaacaatgaaagaagtcatgatctaagtttgctgtatctaacaagttttcctaggagcacaatacaacaatttccacttagatttctttatcaaactatgtcacatacaactcctcagtgcaagcaagtcgggaagcctgagtatttttaaatgaccatattgctatgccaaatacaactaggattctggtagtgaggaagaagcataaagtggatcttggtcaagacagtgttaaatcgtttattcctctaaggtctttaacacagccacgtggtgtgaagagaataatggggtgcacctgccattaagaattgtaagtctctggccgggcacagtggctcacacctgtaatcccagcactttgggaggccgagaccggcagatcacttgaggtcaggagttcaagaccagcctggccgacatggtgaaaccccatctctactaaaaacataaaaatagcccggcatggtggtgcgtgcctgtagccccagctactcaggaggctgaggcaagagaatcgtttgaacccgggaggtggaggttgcagtgagctgagatcacgccactgcactccagcctgggcgacagagggagactccgtctaaagaaaaaaaaaaaaaaaggaagagttgtaagtatctgaagaaaacaaagcaatgtttattaatactacagcaatgaaatggagagtgggagaccataatgcattgatggtctgggttcagaggagacacaaaatagtgtgatcatttattaagctttactttgtgacagacactgtagaaagcattctgtatactttaacttgttatctcatatcaactttatgatattagatactattattattcccattttacaaatgggtaacctgagacttagaacaactgatttatctaaggttgcacacctagaaaatggcagaactgggatttgaacccagactgttagatattagagctctagctcttggtctttgagccagtaattttcaaataggcttgataacactggttgttgcctccctcccacccacccctgaatttctgattcagcaggtccagggtaaggcttgagaatttgcatttctaaaactttccagatggtactgaggctgctggtttgagaccactcctctaagaactgctgccatgtaagatggtagcaattagctgaagaataaccaacatttattgtaggcttactgttgcttaagttctctcattcttgctgtggattatgaggtaagtatttgtattagtaagggttccctagagaaatgaaaccaacagaatgtctatctatgtatgtatgtatctatctgcctacctacctacctacctacctacctatctatctatgaggtgatttattctgggaattggcttatgtaattgcggaggctgagaggttccttgttaggctgttggagaaccaggaaagcccaggaagtcatgggtattagtctgaaggcccgagaaccagggaagctgatggtgtaacccagtccaaagccaaaggcttgagaagatgggcaaggggagtggagaggggtgagtggggtagggaaggtggagggtggaggcacaaatgagggtgttagaggatggctggtttatgttccagagttcaaaggcccaagagccaggagctccagtgtcagagggaagaagatggaaggaagtctcagctccagaagagacagagcattcccctttcctcttcctttttgttctattcagtctatcaatggattggatgatgcctgcccacaatgatgaatgtgatcttttctcagtctgctgattcgaatgctaatcacttcaagaaacactgcttcacagaaccacccagcaataatattttaccagttgtctgggcattccttagcccagttaagttgatggaaaaagttaaaaccatcacagtagtattatccatgttttatagatgagtttcataaattaaataccttgctcaaatctgcacaactgataaatgttggagccagtattcaaaactagatatgttctcccagaacccactaacaatctgtagtttttccaggtgagggaaatacgggctgcacactttccttagcagcctctactgtattgatgctttccccacagctgctgcttctgcactcccttgctcaatctgctccatctctgctctctccctcaggggggaaagggtttctcttcaccgtggctgacctccaggctggagttgttcgctatcatcatgatgacagcgactccaccaaagacttcgtggtcttccggatatttgatggccatcacagcatccgtcacaaattccccatcaacgtcttgcccaaagatgatagtcccccgttcctcataaccaatgttgtgattgaactggaggaggggcagaccatcctgatccagggatccatgctgcgagcttcagatgtggacgccagtgatgactacatcttcttcaatatcacaaagcctccacaggctggggagatcatgaagaagccagggccaggactgataggtaagttctgggcagttaagatcatttgaatggaattcactcttccatagagaaccttctatgcatccttctgggtttgctgaaattgtgtccgagtttgtcctaaggtgaacatcaagtttctgaagtaagatagtatttttattcccatttcataatgaggaagcctgagatttaggaaagttaatttgatctgtccaaggttgtgcatctacagatttccagagctgagcctcaaagtaaccattacactatgaaaaattaagtcagccgagcaaggtgatagaacaaattagtctaaaaggagattttttgactattctagattattgataatttcatgaataacatttgtttacattttgttagaatcattttgtaactacttcttaaagtaggtagatccggagtttgacaaaatagggatcaagtaagtagttagtgttactttgtatatttgaaataagagtaagtttcttgaaaatatttttctaatgctaatttttccatatatcaagacagatatagtgactttagttttcctgctttattatttattatttttctgctttattatttatctttgatgaaaacatttaatgcagattccttgggtacatagaatgtactagacagataagacttttgaagataagtccaatatcattgtccctcgatatttgataggcttgtacaaaagtatgtggtgttttatggacccaataggctatcctgtccatggcttccttcagagggatttgtttaatggaatcatttattatcgtcattttggtggagaaatctttgaagattcttttcaatttgtcctgtgggacagccatgaacctccaaatctttcagtgccacaggtaagagactgtttctgaacactttcccaaagtcttgtgcacaggtgtcaattctaggagatgtggttagaaaccacatgaaaataggtttcaaggtttaaaatttgaaaaacaatcgattaaacaaaattaagcagatttctttgcaataggactactcaaatgtttcctttttgaaagacttttatagatatctatgtattcagtgtttcaaggtcatttaactatgggacccttttatgtagagcaactcacaaaatttgcttgtctcccgacactcaagaaaacatttattttatatgtggtgattaaattataggctctagagttaggttgcatgagtttccctcttgatcttgacactgactgactggtcaacccatgctccagtttccttgtctgtaaaacagataataatagaaccttcctttagagttattgtgaaggtgagataatgcatataaagtactgagaacattttggttcatgggaaacactcaataaatacattagctattatttattgttgtctttaaagatctaagagtctcttctaccactagaggatataatttaaatgtgtagaatgcagaaagaagtttaagcaaacattgccatatagaaattacagaaagtggagtcagggtagtgtctggacaactataatagagtagactccttgaaaggagaggctggttgataatagagattttaaaaaaggacagctgaaattaagtaatcacctactgatatggtttggctgtgtccccacccaaatctcatcttgaattgtaactcccacaattcccacgtgtcatgggaggaacctggtgggaggtaattgaatcatgggggtgggtttttcctgtgctgttctcatgatagtgaataagtctcacgggatctgatggttttaaaaacgggtggtcccctgtacaagcttgcgcgctctctctctgcctgctgccatccatgtaagacgagacttgatcctttttgccttctgccatgattgtgagacctccccagccatgtggaactgtacatccattaaatctctttcttttgtaaattgcctagtctcaggtatgtctttatcagcagtgtgagaacaggctaataaacctactatgtacgtacattttgctaggcattttgtacctattatcttggaagatagcctgtatatggatccaagcaaatttccaacctgttctagaatgactgcttaaagcaagggtcctatttgtcacataatgccttcccataatgtcatagacactgacattagctaatgcatagatgattgagctattcatctgtgtgctaagaagagtataacagaaggagatgatcaggaagaatgattccagagagctcagaaatggaaggcaataggtaatccctattaagaaggaatagagaatgaatgagaaaactcagttcatctgctctttgactaacaggtcaattccttttcaaataacacctccctctttttatcaatgtattatatgtcatttctagattaagtttttgcttgaaaccttagtttatttgatagttcaaaaaggtaacagttaataggatttacttctaagtcttctgtgtatctatccaatctgagttatgtttctgactaggataccgtatcacttttagtggcctatgggcctttttaaaaatgaaaaattcaggacttcttttttcttctttcgttgttatatattttataaatcatgctcttcatatacacaagtatagatgtcagatttctctgtaatgaaaactttagtgcagcataattatttctgaatctgggcaaattggtcaaactaaactctgtagatctagttataagtttattccctgtgatggataggtttctaaagatgcttatcatgtttttctctgctttcatcttcttaatttatgttagaaagagaaagagaaggggacagagggagatctacaaatttgctctcttcattaccatatatctttggcccctaaatgtttatccagctcagatgtgtgtcctacctctctatctgacatctttacatgtatgtatcatcagcgttttaaacttatgaccaaaatacatctagcatgtgtccctaaaaacttgcacaaaataactagctggaatctctgaagtcatccctgactcctttctctaatgtcagcacaaccaatcagtcagcaggtttactaaatctgcttgacgagtttttctgatctatctctacctccccacctcactgccattgcttcagctccaaccttcatcttttctgggctagattatcctcaacccctcccatggccttttacaaatagaggtgattaaccaaatccttatagttgcgataaattaaaactcattaatatagtagcagtattcttagtgaaattaatctagcatctgtttttcccattctccctcttctggttggtggtaactttgtcttagtccctctccagactatggacttgctgtcagctctaacatcagctgttccaagaatcctctgacgaccccattccacaaaccctcaggcaggatcagcttgtccttttacatgctctggcatctgtttacacatatctttgttgttgaactttctgtaaagtaagaccactatttcttttattggatcagctctgatctccttgacagtagggacccggaattattcatttcaatgtttctagacctaggtatctgactcattgtagacccttacaaactgcttattgatcaccaaatgaattctggttctttcaacatttactgaaactaggaggaaataagacccaaacatttggtagggactagggagggagtgagatggggcggtaataagtgtaaagctttattcagagtttctagaaataagtgtgtgcatgccaatgaaacaagtattgtgtgtatgtgtgtgtgtgtgtgtgtgctggcaagcatttttatatttaaaactccgatatcagtgaaacttcaatatttgaggaactcaaatgattacctggtctgtttgatgtttacattctcaatttggacaagtatctagtcatgtcctacagataaaaatagatttaaaatattcaacaaaattcataactttcagctgctcaactagaagtccagataaaatgattacttgatggtagctttcgtgatcagaatattccatggttttgttttattttgacgttgtaatggaagtacagatgagcaatgccaattttgtctacaacaatggcattcagaatactcaatttgaaaatgatgagaattccttttgaaattgacacacacagcaaaactaaattatgattaagctttttctatgacataaaaaaggctagaacttcagctcagccacctacaagctgtgctccctggggcaaatcatttaacccctttggggctcaggtttttttctctgaacattgggaataataaccatggctattattagtgaagtgctatctggatcactcaagatagctagtagcacagtgagtactcagtacttagtaggtgctcaataaattaattccctgtctctatcctttcatgactgttgccaaagtttacagcatgtttatccattatgaagcatttcaataattaaaaattaaatccggttatcaaaataaacacaatggcagtcatttttctattctcctgcagtctgtgtcatgattttttccccccaattacagtgtttcgctaatctacaaagttcagaaattctctgtgggacttcccagccatagtgtggatcagtgaggctccacttaattggaaaactggatttaataaggaaacaatagttattgtgccttcaaagagaccattttccatgctaatttattctccaatgtgttctttgtgtaagaagaatgtacagcatgcttttttatacccctgtaataattcttagtgggcacatttgtgtgtgtgtgtgtgtatgtgtatgtgtgtgtgtgtgtggttttaaggagtggagagagtttaatatacaagacggggcaagaaggaagggagaagacagaaggaagaggctcccctgtacagagacagaggtgggaatggggctctaaagctgaaagaggaggtccccaagtatggtggacaccagccaggtatatatgcagaggctggaggaggtggtgtctgatttgcatagggctcaggaaataggtttgaccaggcatgtcattcatgtagcccgcgaaaaagctggtcctcccaccctagccttttaatatgcaaatgtgggcaccctgatttctacacatgtggggatatgtgggggcggccatgttgccaggagcatatgggccaagggcaagaaggccaagggaatcgccatgttgggtggacccagtttctaatggccggcatttgcatatcaaaggttgcccacctgactaagagctggggctttacaagaaacttttccggatatgctttaaaagacgaaaactacccaaggaccccttttcctctctatctgcataaaataatttctttttcttaataactcctaccacattcctccctgcggcaatatcacactaactgcagttagggggttttgggcgaagactctttctggctacttcctacttaaaaggggcgttgaatggggaacagcagttagggctcctcctgggattgatttaagggtcctcggaagaatggcatgtccacatgcggttcagtttgcagcaccatttggagtttgattgcttttaggcgagaagaaacaatttgagtcatagtactgaatatacaacgtccaaatatcaattcaagacatataagcaagagagggcttaataaaggggttaaccaattccagaaagaagactggaatttattaaagagggattgtagccgcccagggctgaagccggcattttccctgagcctgttaataattttgatttgatttttaagtacctgtagattttcctttcctttactaggtgttaatccaaaagcagcatgtttcatttaaaagtgcatcactaaatccaataaaaaatcctagcagacttagtgatagtaaaacttttacgctttctttttgtcagtaactattatcccagttataaggataataattaagcaaaatactacagcaatgaaaactctctgtccaatattttagtttgaaggtgctaccgtgtataaccctattgcaaatagtagagtgaggacagcaattcccacaagtgtggtgtggtagataatttccatctaaaattttacttgccaagatagagaactcccctttgggggtctatgaagttccttggttttattttcccaaacaaagaaagctcagagttatgggcaccttactcacttttcattacccggcagaagttgcaagataattgcccagaactagcatattgattcacattttgacgttacccgtcccttttttcttttttccaagctgcagatcaccagttgattcacaggaataagcagggttcgtctaaaacgtaggcaaaaagctgaaaaacaagagactaggatttaatgacaaatgtatgataagttttggagcaaaatttttctcttcagtcttcacttttggtaaaaagtaattatcagtaaactttagtcttatagttggcctgattatttgcataaagtgcagcaagaatggttatttttacataggccttttggattggctttgatgaaacgctgtttcacaaggaatttcaggtaagacttttaaagccgagcccagccatgggtttgtatcctctaatacctgtgagttgggtgatcctttcctcttgaggtcccaagataaactcatagcttccagacctattagaaagtgacattcttcactgaccacaggttaggaactgtatagacaaggtggtaggccagttctccctaaggggctttaattggctgtacatgtcgagcttgattccttaaagggagacacaccccttcagtcaaagccttgataaaataaccagttttccaactgtgtcctgttgacaaagaaaaattgattcttattgcactgatgcaaacaactgtattgccataagagtacttacagatagtctccaaattctagaggaatcaggcggagaaaaatgaacatgctccaaattttgtttacaggagtataccttactcaattattaaaggctgtaaatagtttaaaataagtttccttgactctgaaaaactaaacaaggatcagcaatattccaagcgaaagttaaaaagtttgctttaactttgtgagtgcagtccacttagttaaattttgttttgcttgatatttgtgaacatgtcagttttttaggagtcctgtagattctccctccatttcagtgttacaatcttcaaagctattacaaacctgcatttgagaacacctgttaaagtccttaatatagcttgattataaaccatcttttgagaaggaacaaagcaagacaacaattgtctgtgaatggcaacattcccaggatagttacagttaaaaacatgactggcaaagaactttatttatcttcgtggtttacaataactttacccttaattatgattgatagcacatacttaggcattagaattttagaaaacccatacaatttttgaacatatattagtgttcaccaaaatataacttaaaaaagattggacatcattttggcaatctcatgtgactaaatatgtcagataatcctgtttacctcttttctgaatgtttcaggggccctctgaaccattcaaaaagccaggcatcaggaaggataatttccagattgccataaattattttgccaaaatgatgactcaaaaggcaaaaacattttattagtctttactatgatatgaaaattcggtttaaagctaaattttacccttgcattagtttatttgttcaagtgaaaccttatagattattccattttatctttatcaatttgaccatgaggtgaaatttttacaaaccttttgtaacccttttactaaaggacagagtagtgtcttaagaccttcttgctatgcttttatttcaatgcttaatttaagaaaagaccatatagataccatgggagaagaaggtgtagtgcttctaccatgcacttcatttcaaggcaacccaaagccaattggcttattttgtaatcagcccatccctgatgggagtctcatccctcagtgtggggtggagatgttgccttattttccaggtggctaagagcgtgcttctctgatttataactactattagccatctcttacagtgtattttctacctagttattactcaccaaagctctctcataatgcgaagtaatttctgatactcccaaaactcaaaaccatcagataacacaatgcaaaacagaacagagcctttgattttgagagggataatttccttttaattcctggggttttatgaggaaaacagaggatcccccccaactgccccacaaaacggggtctgtggcacctcctctgtttttcccaaggagtcccatgctaccagaagttatcttagagcctttcaggcatgcattaagagtggtaagacaaaaaatggagaaaaataactcagttgactgagaagaaaagagcctttttccagaaaaacaacatccaaaaaaagaaaaacataaaggccttttaaatatacctctaacttgaatatccactcttaattaagctgagcactctttaagaaaatccttttaaatcccttgttacttgactttagctacaccaagcagtaaagattttcagcttttgaatgttacaaaaaagtaacctcacagatgaaatcaatgagccttaattaggttatgacttaaccatgagtgtgcaaggtattttcaaaggagtgataggcagcttttgaaactaccattacaaaattgtgactgagacagtgaaagagatccgacccaaacaactccattttatttttagcccctaagctctcctcgaccatccctgggtgtaggctgaaccgactttggaaggagcctggtttataggctgtagtctaaaacaaagatgataacagccgcttcccaagatatacttccctcttgcctggggaagaccaagaaactagccacaagattagaaaccatggcccaggagccatgcagctggaggctacaagattttgaccctccctaaaccactcttaagatcagtgcttaagatattttataaaccctgcccttgatggatcggctggcaccacccagagtgacaaactggcttatttgattttgtggcccttacccaggcactgacttagcacaagaagacagccaccacggtaaaatggcagagactaaaacaaagtattgccacatggttaccgattatgttcctaaggacatgaaacaagttggaggcccatagccaagtttgttactgaccgttctgctgggctggctggaacagcaggcctatggggtcctgggcctgcatcctaacctaagataccttttcttcggtagatccatacagaaagacacgcaaagcatacaagattgtttacagcttaagaccaaccttacaaatcctttttttattaattatacatttactgagaacataagcagtgatccttattacccctttttcaggtttgcacagggagagaagccaaaagcccaactggtgagaaatttttacccttttgccagcatatcaggcatcaggcttctgggttccctccccgctagctcaactctacatcaagcattttaaggtttggaaaattagtttttcccaggttggaagaacattataaaagagatagaagccattttaaactgcaaaagaaggaaaagcattgtagaaaggaattcaattagggttgttaagaggtattgcctctcttcctattgggaattgtgtttcccctgtttctttgccttccctattttttctcttcccttttggcctactataggagacatattgcttatctccaaaattctcttctgcgtgcagagctgcctgttttagctgcagtgagggtttgccaactctgtgtacggtcaaatacctaagttacattttggaaagcttctatatacctattagggtagttagaaaatcggcctaagtctgcctttacttgcctaaggtcctgcaatgagaagggaacttgaaggggccccaaataagggggaccctcagatgacttccctgaaagttacctttttaattttgggaaactgttttccctgggcctgcccaatatggctgcaaaagaaaataaaccactttttcttcaaagtttcaaggtcgaaggagtcccagtgcttcaaaatatgttccaggggagtgcatgttgaagacaatctgttacccatctagaaagagaagtgagaataaaagcgtcgttttcgtctccttcctttcggtatgtgatccaggatggagatgaaaacagtagagggcgtccccccagctattctctgtccgtcgctcttggattcccggcacccgcttaaatgtgccgcacatgacttgcaggcgtgaccctccgagccatggcgccagaggaactgagttttgggccttagtcactctgtccccaagcaatcagttctctgccttttatttccctttgacctcctagacttgcgtggcctgtgtgccttccaaaaaatagattccaagaaaaatcatgtaattgggcaaggcccctttaagggagggagcaagctagattgaactctgtatcctgctattatagcccaggctaaagcatttacccatagaaaaatggttctggttaacttccagaattaaaatacccttcctaattaagtactgtcttaataggagacaaaataggtgccttaaaggaatgtaggaaccaaatggccattttcctgccagtgggacaatatcgagattaaaatttggctgcagaagacgttttactcttaattgttaaaagcagaaactttccattcacagaagaggcctagagcctgatttctaccaggtggcttagaaataccatgtgctcgccagagaagtggtatcaagtaacctcgctgtaactttgttcctagactgtaaaaatctttgcacatttcatgcagagaaagagtaagaggctgcggacagaaagggaagaagagttttgcaacaggatagttgaggttctctgccaacacccagaatgggctgttggaggctgtgtccggtccagaggcctttgaatcacacctggccagaaattctcagttgcctcagaacttttcccagcctcacgtgatggcaaggtcaccagtgaaaagaagctacttcaagcatgaccaacattcccaatacctgtgggtaatggggggttctccaagttctccccagcaagccttatatccgtgacttgagtacggtagccaacaataagcgtatatactaggttgatggatgcctgttgagttatttgatttattttaatatagaggcgaagagtgcctcagaatgacagaacagattttaagcttgctcccacagtcgccactctgatgaaggaaggctgtacctcagattcctgtacctcaatgcaccaaagtgatatggcttcgatgagtgaaggaacaccaagggtcttggccctcatgccggtttagataaaacgacacggacacacgtggagtggttttaaggagtggagcatttaataggcaagaaggaagggagaagacagaaggaagaagctcccccatacagaaacagagcggggggagctccaaagccgaaagaggaggaggtcttccggtgggcacatttttttaacatgctttatgatggcctaagttgatatgtctttacatatttatgcatgttcaaacaattattattctgtgggtgagaaaagtcccattttaacaaactccattgagaaataaagtgttctcaatgtactgaaatctgattgtaacaaaagcattattaaacacccaatcccaggcaaacagtagaaaactagtgctcaaatcaattgctgggctcttgcttgctgccttcccccgtgtccctccagcctgcttatggctacagacttataaggaatcagaatatgaagtgataaatcagtacacaaaatgacaaaacctggccttggtcttcatattcaggctcacaatataatactccaccagctggtatctgactttcttgtgggaatgggttcttaatcctttctctgccctgattctttgatttctgctagctctttcttttgcatcttcccttgaaactatccagtgctatttctcacccccaggaactacttacactgttagttttgcccacccactttcttctctgacttgtggtaaatatgcaccccccaggtacctgttctctcctctgggcatgtttcatttctcccttccacttcacccatgtgcttttgtgtcaccttcttccattctttcctcgttttctggtcctctctctgcatctctcatctatccttatttttattctccctttttcttctaatattactctctcctggattaagatctcttaaggcttaaggtctataaagctgtctaccaagtagaatagagttggaaatgtttttcaaaagcaagttgagtgagtgaagctgtcttagtccattttgtactgctacaacagagtactacagactgggtaatttataaacaatagaaatttatttggctcatggttctggaggctgggaagtccaagatcaatgaactacatcttgtgagggccttcttatgacatcataatacagaggaaaacatcatgtggatgagaagagagcaagagcttgaacttgcagcctcaagcccttttataatgatcattaacccattcatgagggtggagccctcatgacctaaacaccattgggcccctcctctaaacactgttgcattggtgatgaagtttccaacatatgcttgttggaagacacattcagttcatatcagagactttatttgatgacagtcatggcaaccaagatagaaaaagttcatggagcaggctgtggaaaagacccatgatgccaggcaaagcaccattttcagacagtaattaatagcttttccacaaccaatgatggattattataaaagaaatgttataataaaagctgtttggcaagtcctccttaccctctagcatgataccaacctgtaagtgtagttttaagacttaaaatctcaaacaggacatgacttactcagtttgcaaacattaataaagtgcctcctacctacaaaaaaaattgtgctagatgttgtggagatacagagacgaatgtagtatttattgggcacctactatgtgccagacattttacctacatagtaatatttgatccttataacagctctgtgaggttgtattatgcttaacttactaataagaaaattgacactaaaaggttaagtaacttgtttaaggttaaatagctgctagtaagtggtatactcaggactataactgtaccgtcaaattccatgtggtttacaccatattgtaatgctggcctcatggaactttcagtctgggagagagactcatttgtaaactaacaatacaaaacattagaataagtatgctagttgagggatgtctaagtttgtttaatctgctataacgggataaatgactaatttagaaataatagaaatttatttccataaataaatttatacataaataagccataacattctaccccggcacctcccccgccccgccacaatttatgttcttctcccatacaaaatatactaattccatctcaacagcccccaaagtcttaactcatttcagcatcaatgcaaaaaaataaagtctaacatctcatttagtacatatttatgtactaaatcaggtatgggtgagactttaggtacagttcatcctgaaacaaatttcccctcgagctgtgagcacaataaaatcaaacaagttatatgcttctaaaatacaatggtgggacaggtataggatagacattcctcttccaagagggagaaataggaaagaagaaaggatccaaaactcaacagggcaaacaatattaagtcttgaggcttgtgaataatcttctttgactctgtgtcctgccttctggacatgctgaggctaggattgggcccccaaggccccaggcaattccacctttatggcttttctgggtacagcccaggcaacagctgtcagaggttggcgtcaggtgcctgaggctttcctggatggcgttgcacattggtggtctctggggtggccctgaccccatggctctgctgggcattgccctagtgggtactgtctgcagcagccctgcacctgaggcaactctctgcctgagtcccgaggctttctgaggcatctcttgaaatctaagtggaggcagctgtgttttcacagctcttgcactctgcacacaagcagagttggtatttgtgccaaggcctacttcttgtgttctccagagtggtggctcaagtggttcctgggcctgcttgagccacagctgggatggccaaggattgcatcagaatgcagggagcagagacttgaggcagtgctgggcagagaccccacaggtccctcccttgaaaccattctgtcctcaaggccctggcattctgaacctgtgatgggaatggtggcctgatgtctaaaataccttcagggtcatttttccattgtcttgataaatagcagctggtttctttctattcatactaatctctctatcatataggcacttggtcacaccttttgtggcctctcctaaagatgcttttttattctttatatggtcaggctgagaatttttcaaatctttaagttctgcttcccctttgacaaaaaattctggctttagttcatttctgtcttctagtattttactataagaagtcaagaaaagccatgcaacgtgctcaactgtttgcttagttatttcttccaccacgcatcctacctcatccctgctcagttctgccttacataacgtgttagaacacaggcaccatttagccaagttctttgccactttataacaggaagatctttcttccagtttccaataagatattcctcatttccatctaagaccttatcagaagggcctttactgtttgtatgtctaccaatgttctgattatgaccacttaggtaatctctaagaagattgaggttcttctgtctagagcacacctcttctgagccctcaccagaattgccctttatgatctattcacagcaatataggctttttctagcctacttctccaaattcttccagtctgtacgtacccattacccagttctaaagctacttccacattttcaggtatttcagtacctaactctgtcttagtccatttgtgctgctatggcaaaatacctgagactgggtaatgtataaataatagaaatttatttctcacagttctggcagccgggaagtccaagaccaagttgccagcatgttttgtgtctgatgagggctgctctctgctttcaagatggtgcctcgttgctgtatactccagagggaacaaatgctgtgtcctcacacagcgaaagggatagaagatgaattcattccctcgagcccttttataaggcacaagttcattcatgagggtaattagaccctcatgaattcaacctcatggtccaatcactactaatggccctgcctcttactaatcttgtattggaaattaagtttcaacttaaattccagagaaaacacaaacattcaaaccataccaaggggtaagtaaaattcaggaacaattccaactgaaaaattggagaaaggtctaagaagagccgttaagggtgagaaagactcaggttgctggataaaacaggaggaaagcattctagaagtgtggtcaaggaccagtacatggtcagtccattgtgtataattagagtgttggattgatgttaaaaggtagtaaaagatgttgaaaggtggctgggtggtggctcatggctgtaatcccagcactttgggaggccaaggagggcggatcacttgaagtcaggagttcgagaccagactggccaacatggtgaaaccccatctctactaaaaatacaaaaattagctgggtgtgatggtggaagcccgtagccccagctactcaggaggctgaggcaggagaatggtgtgaacctgggagtggagcttgcagtgagctgagatcgcaccactgcactccagcctgtgtgacagtgtgagactcctcaaaaaaaaaaaaaaaggttgagaaagagtgtatattgaaagtcttggatgccatgctaaggagtttggatattctataaataattccacactttctgagaagttgttttaagatttttgaaggggtaaattaacttatttcatttgtacttttttgaagataacacgaggtatgaaaagtctagattagctcttggatttagggctaacaggcagcagttgcaataatgtaaggatgaaattatgaaaggtaggccagtagcaatgggaatgacacttgggcgtgggatgtggagtatggtcactgcataggaaattttataagtagaaagtctgggacttggtgatgtgttatatgtgggtggagaaggaggaaccaaaattcatgtcaaggtttctaagattgatgactgaatatagggaagtattaaagaaagcacaggttgttggtagaagagagatgtaaaaataaaaccaggaacatattttgtgttttatgtgcccattctgtagcactcatgactggattcactataattgtggtatatatatatatatatatatatacacacacacacatatatatatatatgtatgtatatatatacttttttttttttttttttgaaatggagtctcattcttgtcatccaggctggagtgcaatggcgtgatctcagcccactgcaacctcctcctccaggattcaagtgattctcctgcctcagcctgccgagtagctgggattgcaggcacccatcaccacacccaactaatttttgaatttttcgtagagacggggtttcactatgttggccaggctgttctcgaactcctgatttcaggtgatctgcccacctcggccttccaaagtgctgagattacaggggtgaccccctgcacctggcctgtgataataatattcttaaaatataatattaaatgagtagaggatttccattttttggctcatattcttaatagctcctgaatcatttgacagaagtatattataaatgacagttttagaaattatcttaactgtgactaggtgattgtggggcattttctttgttgtttttttggtatttcaaattaatggtacagacatttttattccaggtggcaacaatccatataactccagtggatgaccagcttccaaaagaggctcctggagtttctcggcatttggttgtcaaggaaactgaggtggcctatataactaagaaacagctacattttatagattcagaatcatatgacagggagctggtctacacaataactactcctccatttttctccttcagccacaggtatctgaaaagtcaccatttgggctactagttctaggattgcaaagttgaaagtgtcaatatagagcaatatatatatatatagtactgtggtttacttgctccattggtcaggcatgaaattatactcaattaagcgtttacttttttctcaaacaacttcctatctccctttgaaagctgtattagttggtaagtgatctgcagcttgtagtgtcttcagcattggtaggcttaaaacagtctttaatccactttttgaaagacaatgcttatttttcttttagtacaatttattgaggtcttcctaacattagttttgcatattactgccatgaaatcgttacattctatgatctcaatctagaaaaatggcatgaatatacgttatgctagtatcgtatgcatgagagcaagaaaccatttttaacatgagtgtaacaattcccttacatgatgccaagcaaaagattctgtacataccttttgcagtcatgacaaggatgatgttgatgaaactggacttaatgctagaatctcccaacataaagagagaatataaagatagagcacccaatttcttctcacaatgaagtctttcagtttttgattgtgggctattcgatttcatttttcttacctaaaaatgagctgatgtgctcctctgtatttctctttagacacttggatgctgggaaattatttatggtggacagcataccaaaagtagttaagaatcctacggccctggagctgaggtcattcactcaggtatgaggatatgctaaaatgctgacaaacatgatgcaagtgtgcccttagaaggtatggcatgcctagtattgtgcctgagaatgttggtctttgacatccacaaagacttgacatctttatacttgctacttgtatgtttccattaagtgtgtggcatctatttcaaagtacttgatcaagttgaatatggtttcacaatcttttcagtaattttactgaaaacagacttttgtattgttttgccatcagcaggactctagtttgggtatctggtgtatacgtttttattccacaaaattcagtttattcagtatcttactgtattagtttccaagggctgacaacaatataccatgaactgggtggtttaaaataaactgccaggacataaaggactatgagctttattttctcatagtcctggaggctagaagtcttaaatcaaggtgttggcagggccatgctccttctgaaaccctgtaggagaattcttccttgcttctattagtttgatgcaaaagttattgcagtttttgccattgaagtaaaaatagagcttttggtaatcttcaaagtgatgatggtggcatttacagtgttcaatatcaattaacatgatggttctcttggacctctaaaagcttttgatccttgcaagtcagcacccacatatccatctcaacttactttgcagcatgctgtgaactatatgaaagtggcctacatgccccccatgcaagacattggtccccattgcagagatgtccagttcacattttctgtcagtaaccaacatggcggtactttgcatgggatctgctttaacattacaatcctcccagtggacaatcaagttcctgaggtatgtacaatgttctatatagaggatgaaaaggaggaaaagaaaggagagacttgaagacctactagaaatggtaactttcctttaggctagttttttaaacttataaaagaaatttccatctatggtgtagtaaaaaaaagaagaaaaaagcagggagaagggagtcttttactcccatgggactttctatgtaaaaggtgagatttttcagctactaaatttaacattattttcaaagctttatcaaattctttttcacttcctcttctttctgctgagtttcacgtgttgatcaagggaaggggattaaattatgggtctcttagccactggaagggcttatttaccctcactgcagcccaactatgctgctctgtaatctaaagaagctctttaattttccaaaatgaatcaagatggacccttctgtcatactttgccccactgccctgtgtttgtgtaagcctgaaaggacttgggtcttttcattaaaaccgaactacaaaggcattgctaccttgtgcattttttctgggaagctgggatttgcattgagagtatgtcccatacctacccggttcccctgcccaccttcacaatgctaggcttaattagtatggtcattattattcttattatttcccttaaaagcaggaagacaaaatagcattacccattcattatcaaccagaagggaccagagcctacacatgcctcatccttaaggaaagaggtcactttcccgggtgcctacttggactatagcctgcactggcgttctctttcctgactcctcatcatctctatacctgcccaaggttgtggggcagaggtcttaccctgagggcctaaaagggctgcccaacctgcagaagttttgatgggtgtattagtctgttctcacgctgctaataaagacatacccgagactgggtaatttacaaaggaaaggggtttaatgaattcacagtttcacgtggctagggaagcctcacaaccatggcagaagggggatgaggagcaaagtcacgtcttacatggtggcaggcaagagaacttgtgcagggaactctcatttataaaaccatcagatcttgtgagatgtattcactaccatgagaatactatgggggaaactgcccctatgattcagttatctccacctggccccatccttgacacatggggattattacaattcaaggtgagatttgggtagggacatggccaaaccacgtgaagaggtcaaaacaatatatgaaaataatgaattgccaacatttaaagatcagaagattttccatcaaggctgattcctagcttcccttgaaactctggcagatctaataaaatttaacccgcacaccctacagcagccattgcatagggcgtgctctccagaccatctaagcccccatccaactcaccacacttatttctatcactggcctgacctcccacacctgtggacttgccatctttggtagaaaacctgccaaagggctcacacggaggattttaaactaactccattctttgacacctttcctatcagggaccagatcatattcccggtggtgaaatagtttagaatgcttatggagtcaacttgattagattttattcagaccattcttttctatgtatgagatacaggccatcaaatagcctagcactaaagaagccaaagttttctctaaaacaatcatggagaaatgctcctttatgcaaagttattcaagcctcttgatggagaatgatgatctgagaaggaaactaaaaagtgtaaaggaaaaaagttaatttcactgaatagttttgaggagttgaggaaagaatggcagggtagcttctctttttttttatttttactttttacagtatatggggcaaatgaaatagtccctcaaaaagctgaggatattagaaacaaaattaaattagcagcttcagtgagacccaccacaggagttgatcccttatgtagaattcctgcagagagctggccaagtgataaccacgggaggatgttgacaccatgctaacctgagtcccagaaacctgagcactggatctgggcaagaattaaaaagctaatgactaatgagtcgggggaaattagccttatgcttttatttttttgaaagttgccctaaaatatatatttaaaaaatcacctaatgtagcaaagcatattccttgaaacattggaaattgaagattccatattgggatactaattcaatacagctcagaaaaatgaggttggcaagcatggacctttgttcgaagacaacactcctctctgagtaagagctccctctctttctttctcctacaaacagtgaaaatataggtttagcaaagtgaaagtgagacacttgggagaggtcagggtgggggtagttgtagggagagaagtctatgtttttgcattggtagttgattaaagaatagaaggcagtggtctcagaattgtaggtctcataatttccatgatgcaaggggctgcccttgtggcaccatgaatgccccaggtggctgtggcctggagttggtaccagcactgtgccgtggtgtccagaaggacacagcaggctcttgagcagaggctgcagcttcacttgcttccttccctttcctcttccaatttgttgtcatcctcctttaccagctctttcttcagggaacatcctccctgctgggaccagcagctgctctgagaagagtaggtgcttcctaggagaactgctgcatcctcccatggacagggcaccttactagaccacctgggaggggtcctcagagcccgtgatttggtaccccactgtatctgcttgctttcacttctgcgtagcaatacaagcgtgggggtaatgataggttaaacaaagttagcaggttttcctcctgcaggatctcagagccttgaatatgcttatgtcccttataaacctccatggtaaggatattttatgtaacttttttctagacttatttggccatagaacacttattgctccctcccaatgaggtgataaaatatcccaagccattcaacttgcttttaacttacaaatgaattattagtcgagcagtgagtttttctattatagcaaattatctttgtggctttaatatttaagtctaatgtttgaataaatctatttcctctggaatcttcaattttgccacactacttccatttctaaaatattcactgtgactgaagttctaaagctccaatccatttcccaagcctttaagaatttttaggatgaaaagtagatgaaacctttccttcaggggaatttgacatagattttgtgtattttttagactaagctgtatgtgtattgaacagtgatgggaatggacctgaggatgaaaattattatttcctcagtttagcagcacagatagtaatgattgccaattctactatacaggctatgcaataaatgaaaagtagatactttcaatcttagagatctgccttgtttccttgtaacacattaatgcttagaattagaaatagtaaaaaaaaatttttcagtcaaaatgtctagctatgaacttatcctcttaccacattcttgaaaaattagtttgcatgtgaagataatactggaagttttacagtgatgtaatgagctctgtcttcaggggtcatggaaaaaggctttgaatgtttccttcctttcttctttctaggcgttcaccaaccctctgaaagtgactgagggaggtcaaagcatcatcagcacagagcacattctaatttctgatgcagataccaagctggacaatattgacctctccctgcgggaattgcctctgcacggaagggtggagctgaatggatttcctctaaattcagggggcacattttcttggggcgatctccataccttaaaagttaggttagaacatttcatggtttttttatttacatgctttagtttcttatctagatcagttgtgaggcagagtaagagaaagaagtttgtccaatttcttaaaggataccaacatgccacttaacacactcaacgggtcagttgaaaattacaaatgatcaatttttcctttccctccagacattttatttccatctgacttgctataccagtggaaataactttatggatatttgaacaataaaaatttaattgccgtgaatattaaattggcagtaactgcacatatcacaggaggtaatagtcaaactagataaagagagactgaaataatctgtgaggctaatgtacataattgaacttgtgtcccagagaagcaaatttcataacccagaaactctgggatagaactctgttgatcaatgtccttaatgtaaccttattccgttctactagggcagggatctgcaggcaaacaagcagggtgagctgagtaggcagggcgtaaactaatacttgagtctccaacagggatggcacaatccctggcctcatggtcctagagaaactgcccttacctgaaggtctttcatttcctctacctaatgcagttctgtaagaaactttcctacaaaatctagtgaaacaacttctctggaaaacaatacaagctattcaaaagcaatggtcgggtagacccacacactcacttctcacctgtaaattcaagctataaatgggagcattagccctttagataaagtatgataggagatattatacatcagatgcttagctctgcacttgactagaaagttgaccagaaactaagatttgtacagaagaagatgagtttaatcctgacagtttagttccaccattgatttacagtccacgatatcttgatctttgcactcgcactcctatccttgttaaaaaaatgttttttgagatttcagctctcagctgtctgttagatagagagccctgtttaggtaattcttgctacggagtgaatgatggataaacagtaccaatatttgctagaactatctgttcaagcatactgtcagaggcttacaattatggtttttgaaaatttaatctgcatagtaatcaagtctgacaaggtatccattctcatattttaattgaagaactaagcacaaagagattgaggaatttgcccaagttcattcagctagtatatggaggggtcagattttgaaagaatatctgtttgactccagtcatcctttggatgtgtactcttagggccatttgatccttttagggattttagcatagtaaaatagaattagtaaaaaagaattatcactcaccaatatagttttgatgaaaattgcagggagcatggcaaaataaagcatagcgggtagtgcgtgagaggatcatggagggtggggaggatgtgggacttccccaccataggaagggaatcctcaacctcagttcctaccctgcctatgggtgaaactagtcctcagtaaaatacctttcagctctgactttttccccatagttaaagattatacatgttcaatatattatattattttttaatacaacttttattttccattcctaggactcattgatatgtttaaaatttggctcaattcacttcagcagctccttagaactttccaagcatcactgcaatgggctggagagtatgtggagggcctataattagacaatgccttcaagaaatgtggctgagaattagtggaagatagggctaaggctagacaaaggaaaggtattttttaagtctaagagatttaagaatttatatagattgagaggaagatagctagtcaatggaagaggagaaatgacaggaaagaggcaatacataattcattgatcaaggttttagagaaaagctgaatagatccagagcacaggcggaaggattagcctagccttagaagtagaaaaggggagaaaaagatcaaatccacagtgtcccacttttcctcatctactgctcagtctgagggttctcctggccctagtcagtgtattctgcaagcgtacagacctataccaaatggttcctgttgtcacagtggcatttgaagggctgctttttaatttgaggacaaattagaaatgcatataacacatttttccagggtggagcaattttacattcaaggatgtatgagtagttaaatatgtgacttcaggattatgctgggtttttgttgttgttgttgttgctatttatttatttagtgaacacatggccaaagccttggaagagctcatgtatcatgcatctcaatttactctcacactgttcctaagaggttggtgacaaatattatccccacaggtatcaacatgatggaactgaagttcttcaggatgacctactcttggaggtcaccgatggcacaaattcagcagaatttgtactacatgttgaggtgggtagaaagtttcttccctgggttattgtcttagtctgttttgtgctgccataacacaatactacagactgggtaatttataatgaaaagaaatttatttggctcatgactctggaggctgggaagtctaagattgggtagctgcatccagtgagggccttcttgctgcatcaccctatgatggaagggcagaaaaagagcaagagggagccagacactgagctatgagccttttatgatcagcattaatccattcatgagggtggagccctcatgacctataaacctcccacctcccaacactgttgcaagttttcaatgcatgcttttctggggacacattaaaatcatagcaatcatacagacatagaggatcttgttggaaaactctcaggtcctgacagaacttgaaacctacggcctccaaagtgagaggatacctgcttcgatccttgtatgtctcaggcctgccaatagaaaccaaagttgtaatgatgaagtagtagtactatgctattgtctctctctaatctatttagaggtagaattactctgacttcaaacatagatatttaattttaaaagtaatttattctatgtataaattatttctaatatctttgaactataaaactcagaaatatttgtttagcagtggggcaggttaggctagtatcactggggttttcctgtttacagataaagccatgtatatgtgtgtgtggtgcctctttgtgagttcctgtaccatatagtcctagcatgaggatttaatcatatttccccctcttgacaaatgaaaaatctgcacataaaattcgagtgcagagcgggcaaggtggctcacacctgtaatcccagcactttgggatgccaaagcaggctgatcacttgaggtcaggatttcaagaccaccctgtccaaaatggcgaaaccctgtctctattaaaaatacaaaaattatctgggcatagtggcttgcacctgtagtcccagctacttgggaggctgaggcaggagaatcgcttgaacctgggagacagaggttgcagtgagccgagatcatgccactgcactccagcctgggcaacagagcgagactctgactcaaaaaaaacaatttgaatgcatgcccaagggacttacaggaaccccctgaatttctttgttgagtggcatgcaagtccaagagcataactcagaggatttgcaggtatttatagttggtaacaaaagaaggtctgaagaaaaatataccatgttccctgaagagccactaattattttcattgttctagattatttttctttctgttggaatttttcagatctttgtgatatgaactcattactatattggtaataatgtctttgtaagatattttagtaactaataaaggatgttcacatctataattttaagaagcagtgaaggagttatccccattttatagctaaggatatttaggtacaagaaggttcaatgacttgcccaaaatcattgactagacagtgtagtcttgggctggcatctccactctttgttacctaggtcagtgttctttcctcctcaccctgccacacttctacatcactaggtgattataatgatcatactggccagtagttcctgtgcacctctctatgccaggaacaaggcaatctcttcctttcgttttcccacttagtcctcataatggcctttgggatctgaataaagagcagtatgttattgcagcttcaaaaaggacagttttctttgttggcagacttacagagagacaaaactttctgagttactttttttgtctgaaaagcaaatttgtggggaaaaaaccccaaccctatcttccatccatgacaataggcagtgcattttgggaaaacaatctgtttattgtttctttttaaacacaagaggatggtctttaaaagccaaacagaggcacagccaattttttgacaagtgtttgtgattttttttttacccagaaggaatattcttaattctattgcctttggactttattattcatttgaaagctgagactcttttgtgaacggctgcaagatggtcatcactgaatttgttggtgatattcctcagggtcaagaacaatactggagaaggtcttaaatgaattcactcaggggacttgaacaaagatggttttttcttaataagccaatagaaaagtagagaatattataggcttttaaagtctttaaataactagcctggagcttttgttacccattcctctatccattaaatttcatgtatatttgttttagagttttagcctgtttaaataacaaggtagtcaggacacatatacatagttgcattcactcattcatttattcagcaaatatttaataagtgctttctttgccaagccttaggccagatatttagaatatgatgatgaacaagacaaacaaagtcactgttcttctagaggtcacaggccagggatgaagacaggcattaaacagattatcaccaagataattaattgattaaaatttagatggttctatacgtaaataggatgctaaaatagagtaaataatagaagcccctaaattagctgaatagttaaggaaggatttcctgaggaatccccatgtaacctgaaggaggagttaaccaagcaaagagttggggacagaattcccagggggaagagacgtgggcagtggggagagagatgatgcagagaccctgtgatggtggggaatgtgtgtcgggataaaactggagtggagtggcaaaggcaccccatagcatgggataaggccagagaaatactagcagaatcaatgggaagccactgaaggtctccgaaaggcagtgacttaaagtccacacgttaaaaagatcactttggctgagcattagggaagaaggtgtagggttgagaggattcacagggcagacgtggcagccttgcagcacacaccaagttgtggctgtgaactcagaggggggttgtcctcactcccttttagaagatatgcttttccagatttctacacgatctttttaaatttagagtgccagcgtgatcccatgtcgcttttctttcctttttacttggagttttattttcgtgaaagtgagagaaaaacattttgtcgggatgaaacctggcattgattgaatagttacggagtttcatatttaactcaaactgtttgaaatgcagctgctgcttattataagtccagagaaacttcctgggtggcaggaagttgagggtggaggaaagctttgtaatcaccaagtaatttgaaacaaaaataactttgatgcagtaaatgaaaatgccttggaccacaaggaccagaattcttctggaatatgtgtgagtttaatgaaagaggataggggctttggtgaagaatgccttatattacatttgtattttttctgtctagaaacaaatgagagttttgagtcctgaaccataaccatattcccccattcctacctaaaatgtctgtcacatggggcatttcttgcaagatggtttacatgggaaaagttaaaagacacagattacttggccaaatttcacggctgttgtttcatgtgtctgtaagatgaaaatgcctgtcattctgactatgagcaatggattacctgtcaaagaatttgtcatttctttctttttctgaaaacatgcattttttccattgcctaggtattccctgtcaacgatgagccaccagtcttaaaggctgacctcatgcctgtcatgaattgctcagagggaggagaggtggtcatcacctctgaatacatttttgctactgatgtggacagcgataacttgaagttgatgtttgtgattgctcgcgaacctcagcatggggtggtgaggagagctggagtcacagtggatcagttctctcagagagatgttatctcagaggccgtgacatacaaacacacaggtaagcagcagcatggtgaccagtgagggaatgcaagcaacatgagagtctccactcctcagtgtgggctcccataatcaaacagtcagaatggttacttccattaaaaacaagaagcagctgcagcctggcctccatttttccagcatgatcaccatatatggaagtatttctgattgtgttattataacgaatttcaaacagcggagaaaggcagatattacttgctttgttcctgacgctaccacacagaccttccattcaccctatgattctccttagcgtttttggtcagtttgatcatcgtagttggtgggtctataaatcatgacagaaatgcctgaagcaagctcctaaggtaattacattattaatttgcaaagcttactgatcaccacctagctcctaagaagcaactggtctgctttttgagttcctgaaaagtaacgataatgtcttacccagtatatgacttgcccacagcaaatgacagcgtgaacacaggttagatgtacagaaaatgttcatttattagcactgcagttacatttttggcattgctttatgttgtcacccaggtggcatttgttccactaaaaaatattaattcaacatctgatatctgtaacttatagcactaagcactgtggggtacacaggaatatgacctagaccctgctatgaaagactttgaacttaaatgggtagacaaaacccatttgcatgcaaagatgacagtgtgactgacactgacacactgcacatcatcacatcatctcaccttgcacatcttctgaggtctgggttggggaaacttccttggtaacaatgctgcatatttcatctgctggcttttgctgtactgtagtgcaatttcctgtctactcatccatatgcctctttaaactgcaagttccaatgcaggaagtatgatcaagtatgtaaggccaggtgagtggtataggaaataagaactttcagaattcaaatcattttcttatttgaagagattcaagcagtgaggcatgaaataaattcaaggaggagggatggagatagcaaaggattaattcagaaatgggagaaaacattctgaaataatatttgtcctatatactttggaaaacagtgatttattggaacaccagatgtctcgggacattttaatcacttcaccagacatcttttttctttaaatggtatctctctatcctcttatctgtgtttagtcttaggaaagctttcctgggtgattaccttgtcctgaggagcgtagttcgtatgtttgatgtccctcaggagttcaccactaggtactcatttttgatttccccagtggatctgaaatagactggcagaaaagggatccaaagaccaatgattgttatttattgcttaattatttaacatctctggcaggctcatgcagcacaggtaaattaggggtgagaagaatctgtcttcttttccagtgccttgttctaagtgctaaacaacaggtatacaaatttctaaatctcctgtagtgtagcagccatagacgggactattaactaattttttttaaaataaaacccagtaggacattggggcaaattatttcaaatagacggcttttggttatgttactaagttagaaggaatactcgattcaaagggtattttggtatttgaatgttaacgttttcttgtaatgattactcacttattcaattggtagttacccagccctgggctgagatcaggataaagaatcacagcattgtaggatctgaggtttcagtgagttttctggcccttctcttgcttctacgtgttgatttagaggccacctaagaataattttattagcattactttatttgctttctataagtataaaaataatacacactcattgcagaaaacttggaaggaatggaaaagtacaatgaagtttttaaaaatcaccttattacatatctaaaagagtcactgttcacatttcagtattatagtattttattctctttattctggccataattttaacatagttgcaattatgttgtaacatatgcagctttgcagattacttttatcatttagattatcacctgaaatgtttattaaaatatatattaaatgttagaaagttattataaagatgttttagtaatagaataacatcttactatatgaaagtccattaataatttgctattccccaattaacattatctggtcccagctacttggaggctgaggtaggaggatcgcttgagcccaggaggtggaacctagagtaagccaagatcatgccactgcactccaacctgggcagcagagtgagaccctgtcttccctcaaatttttttttaataacactatgattaacatttttaagtaccaatcatgtccttaggctatattccatttcaaggtaaagaatttcactacctatgttgtaggctttttagtggcttaatatttggcctgctttcccagctatttctgtaaatatatcctatgcttccattatagagaaattgtggttactcaatttgcaatttgccttctctgtttttaaagctgtcttctctttctagagtgacttttcatttctctcccccattgcctctccctacagatcttctatcccatctgtcccaatgttctaccttatctgcttggcaaactcttactcatcctttaatgctcagcacaaagccagcaaaggcatctggaaactttgctgactttccttggcacgtatgccctgcccctacgccattgtcagctaaaactcatcttctttcaccctcagcaccttgcacacgatcaggccggaatacataaaattgccatttaacaggtaaaaaatggtttaatagtagcaatttcatgtgattctacataatacatacatacatacatacatacatacatacatctgtgctattctaaccacactgcatttccttctctaccattagacagtatcggtgcctgacgcatagtgtggtcttttgacatttgacattcttttgaaatgtcttttgaaagttccaaaatgtgtgcctttttctctgctggtgtgctggaaacactaattatcacacagtaggtgttgaataaatatttactgagtgaattactaatgaacacatttttaagccagtttgcattttagatatatgaataggtgagaggtctcttatttttgactctttctcacattgacggctgattgtttctttctaattctctcaacttcaattcggtttttccttttaagcccagttttctcatcctttgaacacttggttgctcaataatataatctctagattttccttgtcatttttaaacgggaaataatggcaaccacagagctctgcagatttgaccagagtgtctgctgaaaagggaggatgtccctgatcttttgtaccctaggttcatcaaaactccaagcattaattcctccctgtattagtccattttgaggctgctgataaagacatacccgaaattgggcaatttacaaaagaaagaggtttaatggacttacagttccatgtggctgggaagcctcatgatcatggcagaaggcaaggaggagcaagtcacctcttacatggatggcagcaagcaaagagagcttgtgcagggaaactcccatttttaaaaccattggatctcatgagactcattcactatcatgagaaaagcgcaggaaagacctgcccccataaattcagtcacctcccactgggttcctctcacgaaatgtgggaattgtgggagttacaattcaagatgagatttgagcgggggaacaaccaaaccgtatcactgccttcttgagattttcatggtgatgcatgagaattaccaacagcacatgtgcaaaacttttctgtgtcctggatagcaagcactcttactccacgctcttagtgggtaacccaagagcagattgccctgttgctgataaactgtctaatcctgacattttgttccttcttcctgtcactgtctaaactggggacattttgaatcctacagatgtaagacctaaacagtgaaaagaagaaaatgaaaataaatgcctcttcttttccacagactgttgctatttttaaaaacatcctggctaatatataataagaagaatattgaaagaaatggcaaaaatgtggcctacttttgtatttcacctattcaacatcctcgtttctcataactgctctgtggttgatggttgttcatttaaggtggttaatgtaaatggaaagacacttaccaaagggaaaaggttgccttctccctctccctgaggttggtcataacatgaaatgattataagggaagaatgaaaccttcactagtgaagctttgtgcccttgctcattcataaactgtcagacccttgttggcccagttttgtccctccttatcatgatagatggctagtagggagttcaccagaggcaacagatgggcaagaatttttgcattattttcatgactatatttaatttcatagtgataaaattgggttttacatttattttatccacataacttcttttccttgctgtttcaatgcttgtagaagaggtgtgagtagatttcatcttggtattctatattttttaaaaggcaggtttcagctatagttgtgtcttccaggtggcgagattggcctgatgccttgttttgacaccattacattggtggtttcggatggagaggctggcccttttgtgaatggctgttgctacaatggacccaatccatctgttccacttcatgcgtcctttccagtgtatgatctcaacatcacggtatacccagtagacaaccagccaccttccattgcaataggtgacaatgtgtttttttgttccagtactattgtctgacctagtgtcatacctgtggttcagtgaaataatacatttcatttatagtctaaaaagaaaaccaccatatggaattgtccttcaataattacctcaacacaaattttgtggaaaacccaaatctgttaagattatggggcaaaagaatttacatgtttaaaaattttaatatttctgtatggagagagaatacgtgtgttggggtgtgtgtgtgtgtgtgtgtgtgtctttgtgtgtgtgttgggacaaggacaacattgcaatcctcaaatattctgattttatttcacatgggaaaatgtaatttgcttgctgaagagagagtaatttattttatccataataatttctattagaacagagtgagtataccggagagaccatttatatacatttaaccttatttgctttttagaaagtcatcttttcataggcattatgtatatgttctgtctctcagaaaaaaatataagcatacgtatgaatgttattgtaatttgcaaactacctcccaagcagtgttctggaaagaaagcattatcccagcagaataattaagcatcaagccacgaaaaaactcttcgttatgagcaattcataatagctctcaggcaattaacgctctgacaaacagaggtaccaactgatcttgaagagtacataaactacgtttagtggcttaacattaaaacagttgggcaattcttactttcatttgtcacttccatagagacacaagggaaaccagagttccttgagaatgactaaagggctgtgctggaacagttagtatttctgctggctttctgttatcttctgacttgcctggacaagaaaaaaatataattccataggtcaaagtaaattcactcattaccactcaagattttcactttaaagagaatgatgccaaagaaaatgaacatctcccatggaaatgtttttgcacgtgggaggcttctctgaactagaatttcagtcactgcattttgtcctacccagtctgtttagaggatttcatgctaagttgtaattgtgtttttatttgtatgcaggtcccgtgtttgttgtagatgagggctgctcaacagcccttactgttaaccatttgtccgccactgaccctgacactgcagcagatgacttggaatttgttttggtttctcctcctcagtttggctacctcgaaaatatactcccttctgtgggttttgaaaaaagcaatattggcataagtataggtaagctgtagcttcgtcaccagcaatgactcccttccttatatttatggaagcgattggccaggtcatgcttaataactttgtaaggactttcaaaatgtttaaagcaccgggcgtggtggctgatgcctgtaatcccagcactttgggaggccgagatgggcaggtcacctgaggtcaggagtttgagtccagcctgaccaatgtggtgaaacccctctctactaaatataaaaaattagccaggtgtggtggcatatgcctgtaatcccagctacttgggaggctgaggcaggagaattgcttgaaaccaggaggcagaggttgcagtgagctgagattgtgccattgcactccaatctggacagcaggagcggaaactccgtctcaaaaaaaaaaaaaaaaaagtttaaagcaccatatgtattcaatgaattattattactattatagctgatgcttttgaatcttaccatttttcatttaaatttttattctgacttcccccttgcatgcaaatttacttcaaaataaatggaattttacttatggaaaatacaagaataaacattgaagaaagaatggtttaaaaggccctcatagcaacacaggataccatgagagagtgaatctagcgggagctcacaaggtctcattctcacaaccttttagcattttgaatagatattggtggaaagggtgaggaaatatactatgggtgtaacagagagaaagcctgaaatgttgaagcagatgacattaattttaaagccaaaacgtgtcccagatacttaaataggtcttgtatttcaggcaaaaacagaccaaccaaaacaaaaacagaaagcaaagacaaagtcttccaaagacatataaatgattctccaaaccccttttgaagaatgtccattttaaatatgaaagagactgaatataagattaattgcattcaatgttactcagcttttctggtgacttaatgcacatctttaagcattttctctttggatttaagcccatgtcaaaatactaaaacagcaggttagctaattccactcaatccagcaccttgcttgatatgtacctcttcaagtaggcagatgattgattgactcttgttttgcgtttacgtgacggaggtggtctctttttatactcaagtgtgacagagactattcatgcaaaagtagtcatttaatcaagggaaggtctccgacatttattctaagtatctgaagtattcttgaagtccctgtgcatactggttaaaaagtattactcttcggttctccatgcaaattttattcttctgtatgatctgtggatatctgcctttatgttgatggttggctgttgtagcagcccttgatagcaagatacttaggtcaactgctatgatctcttatttgtattactgagaaattgactattattgggttaaggattaaggaccaataacttggaaaaattttttttttatttatctgttccatcttggtgtgctctagattcatttcagtggaaagacatgaacgcttttcacattaactatgtgcagtccaggcatctgaggatagaaccaactgccgaccagttcacggtgtacgtcacagatgggaagcatcactccttggagataccattttctattataatcaaccccacaaatgatgaagctcctgactttgtagtgcagaatattactgtaagaaacatatccaaatgttccatttctcttttatcattttgatttttattttcaattagtccatttacattgctccaagtgcattaacacattgcattggtgaggagtggggaaggctatgttatgtaatgcaatcatttgaaaattattaatcttcctgcctttcctcttttgttggcacatggatttctctggagagcccttcagtaattatgagagagaaaaaaaatctacagatgattccatcgatacctacctccattgtcttgtatcttgcctagggtcggggcttctgaaataataccactgggaagttgtcccttgctcttctctggaagtagtcatggtttttttgttttttgttttttgagatggagtcccgctctgtcgcccaggctggagtgcagtggcgcgacctcggctcactgcaagctccgccccccgggttcacgccattctcctgcctcagcctcccgagtagctgggactgcaggtgcccgccaccacgcccggctaattttttgtattttcactagagacggggtttcaccgtgttagccaggatggtcttgatctcctgacctcgtgatccgcccgcctcggccttccaaagtgctgggattacaggcatgagccaccgcacccagccaaagttgtcatggttttacctgcattccctagagagactactggagagtgaaaaatatgaagtcctgtgtgttacgggcaagcagactttaagcttcgcataatttttttttagataaccatattttgctttcttgtgagaaaatgcatttattttgtagatagctgggcttccatcaagttatgctgcaagaagatttgaggttttagtttaagttattataatccattccaaacctgtctactaatcaggtttggcattttatgtatattgatctaaaatttttgttgtcctaatctcaataatctattcaatctgcaagaaacaaccacacgttttagtcaagctctatgaagaaggatattataacatattttaagttgctttattaaagttcttggagaaaaaggcaaggtcctatttaaaatgttttcataagtataccattgtaagttgaactatgatgccactttaatatttaataagtagggctagataaaagaaaatcagcatccttttagcacaagtatcatatatggcaagtgtttttttgttaacacatgttcaataaaatgtggttgcaggagggtgcccttcaaagtcagtaagagagggtgaaatgaaaggatgctttaggccaggcatggtggctcacgcctgtaatcccagcactttgggaggctgaagcaggaggatcctttgagcccaagagttcaagaccagcctgggcaatgtggcaaaaccccatctctacaaataataaaaataaattttaaaaattagccaggctggtgacacatgcctatggtcctagctacttgggggctgaggtgggaggattgcttaagcctgggtgggtgagtgtgcagtgagccatgattgagccactgtactgtagcctgggcaacagagaagactatgaggaaggaaggaaggatggaaagaaggaagaaaggaaggaaggaggagggtaggggaggggaggggaaaagaaaaagagagaaagggaaaggaaaagaaaaaagggagggagggaaagaaagagaggaagagaggaaggaaggagagagaaagaaagagaaagaaaagagaaagaagaaagagggagggaggaagggaaggagggaaagagagaaagaaagatgaaggaaggaaggggaaaagggagaaagggaaaggaaaagagggagggagggagggaaagagaagaagagaggaaggaaggaaagagaaagaaagaaaagaaaaagaaagagaaagaagaaaagaaagagaaagaagaaagaaagggagggaggaagggagggagggagggaaagaggaaggaaggaaggaagttttcacaaattcaaaccatacatgtccttcaaggcttaattgccttctcagtcatgaaaacatcctgatctctgcccttttgtgattcttgtttatgaatatctagcagcactagacattttcttccttgagttatagttattgatggacctttgcagtcttacctgacttgggttgttgagaatactatgtagcatagtaacattgcagattaccaatatgcatgtgtagaatttatatactcttattatttagattttgctatatttcaaaatgggcaacagaaatacttttttgttctctcaatcctcgtgagaaaaaaagattgaatcagctaagtaacatattgtcaagttctaaatgactagatactacatgaaatgataaacatttaattgtctttgtgtttaaaggattatgaaacctgaagtgggtgtgagagggaatgggaagagtagttcaggaaatttggaagtataagaatgggagggagatgagggacccattatgaaaatatacataattatgcatccagtagcatcctttggcattgttgttgatttcagtggaaatacagaagtttttactgcgataacaaaaataaaaaccaccaaatatgcttagtgtatgtagcaaatatttgtatcacttataaagcagatggaaatgtaagacttgtagaagcaaggagatccacgaggattggtttatgaaggtgaaggttctagattcagttttacaactgaacttttccatgacttcttgaaagcaaacaccgtcttggttgcatttttcccctgacctttgacttatgaacaatacatattttaaaaattatatgtcctttgtccttcatggaaatgaataaagtgctttgaaatcttcagaaaaaaatgtaagggagattaatagatctgttacttcctttacattcatattaaaccagcaatttctttttaggactcatcctatataaatctcatagaaaatttgaagtaggatatattcaagtgatttctttaagcagttttccaaagaaagacaagttgtcttttatgcattgttgacttttctcatgtgttcttgctcaggtgtgtgagggtcagatgaaagagctggactcttccatcatcagcgctgtggacctggacattccccaggatgccctgctgttcagcatcactcaaaagccacgccatggcctcctcatcgatagggggtttagcaaagacttctctgagaataagcagccagccaaccctcaccagaaacatgcacctgttcacagcttttccatggaactcctcaagactggtatagcatgttccacttccatgcatttgttattgttgattgaataatttaacccatacttatatgtgaaatctaaaaaggtcaaactaatataagcagagagtagaatgatggttactagaggctgagggtgggaggattggggagatgttggttaaaggatatgaaatttcggttagacaggagaagtaagttcaagagatttattgtacagcataattaccatagttaacaatatattgcatacttgaaaattcctaagacagtagattttaagagttctcaccaatcaaaaaaatgagtatgagaagtaatgcatatgttaattagcttgacttaaccattccacagcgtggccgggcctggtggctcacgcctgtaatcccaaaactttgggagacgaagacaggtggatcacttgaggtcaggaatttgacaccagcctggccaacatggtgaaaccctgtctctactaaaaatacaaaaattagccgagtgtgatggtgcacttctgtaatcccagctactcaggaggctgaggcacgaaatcgcttgagcctgggaggcagaagttgcagtgagccgagatcgtgccactgcactccagacttccagcctgggcgacagagtgagactctgtcaaaaaacaaacaaacaaaaaccaaaataaacccatttcacaatgtatacatgcatcaaaacaccccattatatatcataaatatatacaatgtttatttgccaattaaaaaataaaaattttaaaataatttaacctagaaaaggtaataatacatcacagaaataggggatgaagaaatagcattcacctactttattcatttgtctctcaagggctctctctaggcttggattaatgtaggacaggaagccctaggtagaggtagtaggtaattgaaaaggcaacaacatgttttctttcacttttagactaccattaaaaatgatatttgagtttttattgtattttcactcaaacatttaatgctatagtaaaaaaaatcctttttaaaactattgagatcatgaaactacagtttaagagactggtctgccaaaatttccacagttgaaacaaatatagaaccacatataataatgctcattattttctgaggggataatttactctttagagaaatggcacattgcatagcagcctgaattattttttaattactcttttaaaaaattcaatcttatcccacttttcacatatgaaaatacttttaaaaatctgagaaaagtgtgcggttcctgaattactgcttcctcccattctccttccttaggtgttttcttttcccagcctgtaaggtccttccccctcctttgccaggctagccaaggctgtgccttcagaacgcacctttctgttaacctctgcttgagccccacccaaggtctccaaaccactccttctctgtgcttgtttcatcttagcacttgtttaacatttttccaacttcttttagttatttgtttccccaactagtgtgtaagctttctgccccaaaggtttttttgtaattgttgcaaaaatcatctcaggtttaaatttaaaaaatgcatttataaccaaacactgcatgttctcactcatagttgggaattgaacaatgagaacacatggacacaggaaggggaacatcacactctggggactgttgtggggtggggggaggggggagggatagcattaggagatatatctagtgcgaaatgatgagttaatgggtgcagcacaccagcatggcacatgtatacatatgtaactaacctgcacattgtgcacatgtaccctaaaacttaaagtataataataataaaaaaaaagaaaaaaatgcatttatatatttctcagcttttatcaattgcaaagaaatacattctaggacataaatgatgatattaccaaatcaataaaccacatgctacaaataatagaatacattgtttaaaatttttttttcaaatttgaccaaggaaaaaataataataattcaaattttactctcaagaaagtcaattttttaaaaaataacatttgttggttattatctagttaaataagaattatatgatcattgtgtacagtttggacacagtcattttgaagaaaaaataaaaatttcctacataaaaattagtatttgggttgatattttggagactttctcagaaattagattttcacctctattttatctgtggttcatttatggctacattttttaaaaactttagcatattctcataaacatccccccaaacaaatatacaaagtttataaaactcttcccatattatgtaatctgtttttcttcttaccttttttttttttggagacagggtcttgcactgtcacttaggctggattgtggttgtgcaatcacagttcactccagcctggacttccagggctcaagtgatcctctgacctcagcctcccaactagctgggaccacaggcacaagtcatcacacataccactggctgatgaaaaaaaagttttgtagagacagggtctccctgtgttgtccaggctggtctcgaactcctgggctcaagtgattttcctgcactcgccttccaaagtgctggtattacaggagtaggtcaccataactggcctcttcttacttttaaaacatggagaccgggtgtggtggttcacacgtgtaatcccagcactttgggaggccaggatgggtggatcacttgaggtcaggagttcgagaccagcctggccaacatggcaaaacccagactctattaaaaatacaaaaattagccaggtgtggtcacacctgtctgtaaccccagctacttgggaggctgaggcatgagaatcgcttgaacccaggaggtagatgttgtagtgagccaatatcatgtcactgcattccagcctgggtgacagagtgagactctgtcacaaaaaaaattgttattattaaaaacgtaacttttgataattaccttataaaatcatcatatagacttattatgctgtaattttttaaaagagatgactttgtcacccaggcttgagtgaagtgggatgatcatagctcactgcagcctcaaattcctgggatcaagcattcctccctgcctgagcctcttgagcagctatgactacaggcgtcacctggctagtgtttcaaaaaaaaaattcttttaaagacaaggtctcattatgttttccgaactggcctcgaactcctggcctcaagcgatcctcccacttgagccccgaaaagttgttaggactacaggcgctcaccactgtactggctcctgtgctgtaattttatacaactatctttaaaatacaactttaaaatattttatacaactttaaaatatccagatagttttcagtttcttgatattaaaacttatatttcagtaaacattttatataaatctgggtgcacatcttctagcattttagtagctttgaagtaagttttgaaaatgtgaaatgttaggcttccaattttgttctttttctaggctgttttggctgttctgagactcttgaatttccatttaaatgttaggtagatttaaaaaaaacagttacattgttaatatttaagttttgacctattaagaattcattttgatgattggctcgaggtagggatataactctataattttccccaaataattaactttctcagttttatttaaataccctgcacctttgtttatatagtttatttaaaaatatattctttcctaactgattttaaataacacccttaatcaaatactaaattatttaaataaaaagtctttaataggctaagaaggcactcttttacttcataaaacaagtttaatttcaccctactgcactgataaatgaactcttgctaatacccctgccttgaaaattaagacattatctgtgacatatgtcatgatggttcaatcataaggaagatttacttattttttttccttcttccaggaatgaggttgacgtacatgcatgatgactcagagagccttgctgatgattttacaatccaattgtcagatgggaaacataagatacttaaaaccatttcagtagaggtcatcccagttaatgatgaaaaaccaatgctgagcaagtaagctacctgaaaagagtccctttcagatttctatacaattctatgaaatctacaatactaggtacaggtgtgtgtgtgtctcccaaagaagcaagtcttcgctagctcctgtcacagcttgcccctgccactcaggcatgaggaacctttagtgcaaatgttagttaaggtaacctctccttaacaatcagccgtttaattacttgattttcttctaaacatactaattagttgtaaagaataagaatgactgaacacacagtatggaatgaacaatctactaaacatataaatacatgcacttacaccaacgtgactgcacacctaccaaagtgcaattaatatatagattcaactaaagtctaataacattaactgcagacagtccttacaacagatttgctgaaacttgtaactaagcgtggcggagggaaataaatcaacccacttctttcattatcttggtacttttttgtccaccagttctctactgtgttccatatgggtcaacaccccctcccgcctcacatcgaaatcatcattttctaaaattctgagcgatattattcaattgtaaactttctcagtatctccctgtattagtctgttctcacactgctataaggacatacccaagactgagtaacttataaagaaaagaggtttaatttactcacagctctgtagggattgggaggactcaggaaacttacaatcatgacagaagaggaagcaaacacatccttcttcacatggtagcaggagagagaaaaacaagtgcccagtaaaggggaaagccccttataaaaccatcagatcttgtgagaactgactcactatcacgagaacaggatgggggaaactgccccacgattcaattatctctacctggtccctcccacaacacatggagattatgggaactacaatcaagatgagatttgggtgaggacacagccaaaccatatcactctctctgtaagtgctcagagtttgatcatagggtatagagtattcattagttctatttctatagccccagccatttcttttacaattggcagctatacagaactgtacacagtctacagaactgaacagagttttaggggaccaactcttctctagagctataagtaaaaaagcatctggttcttggaacctccttgatgacttcacctcttttttcaatagtgcaacagtaagagacatgttgtagatagtctgggtttttatcagggagtgaataacttactgaaagcacccaaaccccccaaatctcttccactctgcagaaaggagggcctcaaacaagtcccttccttatctgccccatatcctgctgttccctatgagccactgataaggttcttaaaaagcattatgggaaatactgatgatagatttttggagggttgcatctcatacatcagtttgtctaaaagtattcaccaaaaaatttctattttcttatttcttagctaatatgttggattagtatagcctttatttataaatatgaaaatatgaaggctgtcatagtattacagtacctcctttttgatgatctcattttaagaggcagggaggtgaaagctggcagggtgagggccccggggcatccactggagaggggtaaaaactggcatttattaagtgcttactataggacagacagtatattagattctttcacatatattatttcattaaatcctcaccaaaattgtggaaaatgcatattattatcctgactgaggaaaactgagaccagagaggtaaaagagcttacactaggcacccactcaactccatttgactccaaaggccatgctcttgttactaaactcactggaatagctacatctacagaatcatcaaacctccttcaaccctgcttcaaaaaccctcccttttctgtgcttcctctttccttctctcctgtggataggaagtaataacactctctttctcttccatgtgtgtccttgggcatatcacctctttccttctcccggaaactgctccattattttttcctccagtatcttcagtctctcccttttcatttcctctgttaacaagacaaagggatatggattgtggttaagagagcaaatgctggagtcagattgactcagttcagccacttaccaacagtgtgatcttgaacatgttgtttaacttctctcaatctctctgttaacctctctgtaaatgaggacaatagtggtatcctcttaataggattgttgcaaggattaaataaaatatgtaaacatgcttgaaagactagctactacgtggtaagtgctactaagtgttattgttattattacaagcagatatcctaattgtaaaaatacaaagacaagctagtcccccattcatttcactgaggaactttttggaagagttccatttctgcccactttctccaatctccactttattatttttttctttctttcttttctatttttttttttttttttttgagagaaagtctcgctctgtcacccaggctggagtgcagtggcacgatgttggttcactgcaagctctgtctcccaggttcacaccattctcctgcctcagcctcccaagtagctgggactacaggcgcctgccaccacgcctggctaatttttgtatttttggtagaaatggggtttcaccatgttggccagtatggtctcgatctcctgacctcgtgatctgcctgcctcagcctccaaaagtgctgggattacaggcatgaggcactgcgcccggcccaatctccactttattaaagatgctcccttaaaagttactcttggctttcccgccaaatctaatggctcttctaaccttcctggactctttgagagcatgtaacaccatttctttgctattccttttagctactgtagaggatgctttgggtcctgcagatcacagcccctcagcccatctctgattctggtcctgatcgtggtggaatttgccatgtcagtgtcccacctcaggtgtccgcagtgcctcactccacttttctgcctcagggctttcatgcagcccatgtccatgctcagcagagagcactctggggacagcccttaacctcgggagctagtagataagataaatgctccagcttcctgtccattaggagcacagtttgaatcacatctatgtggttcctcaagatacccagcaggattgagccccaattccccatagcagtaaaacaccctttgttgcctttttctccttccctttctctcctactccctctctcctgcctcctggaatcacttcacaaataaattaccttccttgtcctaggatccttttaggataacctagattatgacacaccttgtcctgtcttggcttccagacattgaattctgacactgaattgcaaacatttcattctgaccagaaatttaattctgaattcttcctaccaaactcttcatcttcttaatgacattggcttcccgttttgattaatctgtctgaccactaatctccataagccctcaaccaactgattgcttagctttctggaataatgggattcccattctctagtaaagaggtgtgcaaatgtcaccacccactgcgagggaagatgtcagccctgggtagcaagatactcaccctgagtgaaagttgttggaactgaggtgttcaggttttggcatctccgcagaggagcataacactgttgatgccagttgctggttctcaagtatccttcatctgaatcccaagaaattcaggcatcccaatttttctcagaaactaagctgtaaagttggacagagttaggccccacatgatgaccacaactgagagctagaaaccctggtggaaagagatccctttctcactttggcgagaccagggacaatggccatataggctgtgaaggcagcagcaccgcacagtaaaggagctatagaaaccacagcagtggtggctctggtaggatcagcagcagctctgccccagcctactgttcaagaagacaggagctgacctggcatctgtaacactgggaaaagatgaatctacaacaagaacacatactacccagaacattacttagaagaggaagagtaatttagagagtcccagattacctaactatcacctaactcagaatggcatatcatcaatggcactggaacatctgtaggccagtcaatgaatctctttaattgagtttctgtctgtaaaattagaacactcatacctagccctcttacttcatggagctgttgttgtgagtgtaaaatgaaatactggaaacaagatcattttatagaataaattataacttacaaaattgtaaagtttggtacatgtaatcaattagaagtgcctaattacctcttcccacattcattagggctgacccattgtcttttcagactttcacgtgtgagggtagagagcctgtttcattcctctcactagtcatcttcagtgctttgaatattgaatgtcattccttaattgttgaagattgggaactgtgatagtcaatataagtgtcccctactaaaggaatatcttctatttttatatcaacccagacatttttctttttacaggaaggctgaaattgcaatgaatatgggtgaaactcgtattatttccagtgctattctttcagccatagatgaagactcacccagggagaagatttactatgtatttgaaaggcttccccaaaatgggcaacttcagcttaaggttagtgacttcttacttttatttttcaaaactaacgtagcaggtataaatcttctcaatatacacatttctatgatgggatttattctctgatagacatatatttgcctagaagtagaaaatttaattttactagttcagggtgaattcatgctgttctaaagtctttgtcaacatggggtaaattcaacaaatattaagattcttcattgctccctctcccgtaggattatccctaaattctgagggagggaattactggggtaaaccaagctgtctgctttctgaggataatccaggatcttttgtgatatcttcatttctaccagatttttgacttgtgattcatgtaactttcctctttagcatccatcatctcaattataaaactccttcaagtctacagtctttcttgttctctcaatctctctctctctctgtgtgtgtgtgtgtgtgtgtgtgtgtgtgtgcgtgtgtgtgtgggtgtgtgtatttcagctaaattctagatcattctcaggaaaatgaaaactttcattattttttcatgataatcaggtccaaggaaacttggagggctgcctctagctcctctggccctaatgtctctgttaaaacattatctgaatcccagcactttgggaggccaaggtgggcggatcacaaggtcaggagatcaagaccatcctggccaacgtggtgaaaccccatctctactaaaaatgcaaaaattagccgggtgtggcagcacacacatgtaatcccagctactcattactctgcaggcggaggcaggagaattacttgaacccgggagaggggggagaggttgcagtgagctgagattgtgctgctgcactccagcctgggtgacagagcaagactccgtcttaaaaaacaaaacaaaacaaaacaaaacaaaccattatctgagtattatcacctcctgccttctcaatgatttgccacagtgagcatctttctttctttccttccaattctcatctttgtcgctgagcaggggccatccttatgtcttctccagggagactacttactccacaaacaatatgccaaattgttctgtattctatctgacatgaacttaaaagacgaaagttcagtgtcttcatcccactgcagtcccacctccccttgcagcaccagaacccttattgtttaggttcagatgggcaaagtcttggaccaaaaaggcagtgtgggagaaaacttcacgtgggagtcatcccatcctgctagcataacagattttaacaactgccaaatttgaatcccatgaactgcatgacaccgtaaattaacattcctggaattgtatatgttctcaaaattagatgctttaatggaaagcaaataagcatggaaacaataaagggaggattctaggggtaggtcacctgggttttactgctaactcaatagcttgctctgtgatttgataaaatgtccttgtttcactttaggcctagaatagcaaaatttcagtctgattcagactgtgtgcatgatgcccaaggatcagcccaacgtgaattatatagatcagtcacctgagaaggtcagttgagtaatcagtccaaatgtttatttcaatggtagattaagactagcaaccacaaccaccaaccatccccattgcaattatttgatggaatgcttaactttccatctagtggaggcacagtcctagaaaagcagcaagaattcattctatgtggaacagcttgattgtcatagattgtaggcaccatagagaatcagagtgaagagcaatcactgatttaaattgaggtacagctgtgtccttatttcatttcaaagagtaatgaagcagaaatgcagtgagagctcacacatttgggtggcttgggaacggaactgttttggatatgtgaaaatgcagatgggtccaggttcccagtatggctccacacagttctctcccagctccctagcagttctccgagtctttccaagaccaaggaccaggactccagccctcctggactctcccaagagttatcgttttcttattgacttctcttagttttcgccatcttgaatctgacttttattttctttctatttctgggtcttcaaatgattttattaagtcagtcttacattttggagtgcaagtaaggaattacatggagacaagagagaggaaaagatgtcttcttctgtgcttacttccttagacaagattagaaaagggaaaatgtgaaatacaattgcaggctttcccgtttaaaacctgaaagagtctgttttaaaaattatattggcaaataggtcttatggaaacaaactctagcttaattattatgatgtaattaacttccatccagtgagcgtgagggcagaacataagtctacaaacatcagatggataaacatattaaagagaaagaaacgttatcaagtagaatgacataaaggcaagtggtagcacaatggcaagagaggaggacaaagctcttttgccaggaactgggagtctgtggaatctggaagtctgtattctatctgacatgaacttaaaagatgaaaggtcagtgtcttcatcccactgctgtgccacctccccttgctgtaccagagcccccattgtttaggttcagatgggcaaagtcttggaccaaagtatcaaggggaataaaaagtaaatgatttacatttctgttttagactcttaaatgagacagtaaaaccacaggataatatcatataataaattttaagatgactttaaaaaattatgtctgatgactttttatgagccattcctagggaaagctatgtaccttaaatgaacaataataggattattaataagataataaagatttatgattacattttctaacactgtcagttgttagccacccccctcagcataagaacctttttaaattcaaaatgccacaatttctgcatcaagctctgtacaaaacatatgcttaaataatgttggcttacttttagaagattctgataaaaacaatatacgatatttgcagtttatattttttgatgacttaggatataaatgtaggtagtgatagtgatccccatcattttctttctttagtaaggctggaaacatactggggagtaaatgcatctgttctatttttgttctgtctacttcagacaagcccagtaatgagccatgttgaaaaaaagtatatttgactagttgaacatgaaaagaactaaaaaatggaaactctgaaagaaatacatttaatttctaaagaatcccttccaagagctcgattacccacctcctcttattaattggaatattcaatcagctatggttgcttatgaggaacaccttggaagtaacaatgctgttgaattgtttgacttcgtctgaaaccctttggttgaagccggtgtttttccaaggtctcaaattattctaatatatttctttgaaaagaaaaaaaaatcaggtaaagtggcaaaaagtagtctggaatttccctgaaatattatttatattggaggtttttaggggatacagaaaatgtccactaacgtacgttgggggaaaagaaaaaaccatgagcagctgactaactctggctccttccagatagggagggactgggttcctctctcccctggcatgaaatgcactcaggaggaagtggatctgaacttgctgagatacacacacaccggggcaatggattcccagaatcaagatagcttcaccttctacctttgggatggcaacaacaggtcccctgctcttgactgtcaaatcaccatcaaggacatggaaaaaggtaaaagcacgtctaccaaggtttactgggatcaactttgctaactggtataagtattccacattcgtttctttctctctctttccctcccttctttccttttttcctgccactcttcatctttgaaattctatcatttgtgtttagatcctttggcttctcacctgctttgcctgggacctatgtggttcacagaagtagccaatccattcgttattttaaaaagtttattggaaattcagccttgcacacaatatggctatacaggctactttaactgttaggatttttttgctttaagtaaaattttaccaagttgatgtgtaactctagttttatcttcaggaagtgatctatcactggaaaatggagtttcaaaggaaaagtacttctaaaacaataaaataataaatgaaaaatacattttaaaatttaaaaataataaagataaactttgtcattagaaaggctggaagttgctgcttctttcactttgaaagtgctaacatatactctttagggacaaggaaagacactataagatcaacttcttgtgagttaattaagcagagtcagttgtataagtggtgaatgggggagagttaaatggaagatggaggagagtttgtttaaaaagctcagcaaggaagagtagaagctcttgatacccaactgttactaccctgtaattttgcttcagcttatgtgaggatcatatctcattcatctgtattatcccaggatctagatattcccaggatgaagcataatcttagatcctcagtacatgcttgattgactgaatgcttccctttttttgccttggctgccaggaagctcagaggtaaattgaatgcttaagtgcaataataaaaaaaaaatcttgctttatgtgtggcagaattataattgtcctaaatttttaaaaaattaattcagtttgatcttgagatgtttacattgagctgtgtaataatatattttatttgcttatttcctggttgtaaatgtgttccttaaagaagtctaatgagtgatttcagataagctagatgttactgtacacatttatctctccctgcaaaacaactatgttcatcataaatgtatgtccaggcaaatcgtaatacaagtaatatattagggcagacaactagtgtattagagtaggccaccttctcattggctcagcacaacacaactttacagtgacataggagagctctgttccacatagtcatctagggactctttatatctagacattcccttattctgaaggccttagagtcactcaagaagtgagatatggaagaaaattaggggatgtcatgcactaggtgtgaaggttgtgtacctctcttgtacacattccagtggctgaatcacagccacatgccacattaagagaggctgggcaatagaaactttagctttgcacccaggaagaaaggaaataaagttagccagtgcgttgccagactctgctgcaattgacatgtgattattttctaaaaggatttttgaaaacctataccgagtagacacattatcctattaacattttcagttcaaattttttcttctttgtttcttcttacaaagtggtgttttgtcactgtacagttttttgttttgttttgttttgttttgttttacttaacatgagttttttcaggttgctgcataactttgtagccataattgtttatctctaaacaagactatactaaagagttagatttaatcacaaccttaaagttgagcatttggttgtttccatttgggagctattataaataacattaagcttcccaactgctgtgttgctgtgttttctgatttgcacagtggcagaaatgatgttgagatctttcagataagtttaggaggacattgtctatagttgactctaacctacactctgcccttacagtgctgaaaacttgcatcaaggcaagagctggttgctcttcctcccctcaggtccatttcctgctcctggtgaaacctctcgtgggtgctttgtgtttcccccacctaattcattcttcttacttccttgatgtattcatcttgcttctgtctgtagcatctgtggctaaggttttgatttaaatttagaatggtctttgattctacgtaggactgaagttgcaaagcattttgagataaaagcatagtatatgaaaagaccaatttagtaatctgaaatagcgttttccaatcatggcaccattgacattttgggatggaggattctttattgcaggtgactcccttgtgcattgtaaaatgtttagcagcatcccaggtctctgaatctagaagccagtagcaactcccagttatgacaaccaaaaatgtctccagacattgccaaatgtcccttggggagcaaaattgcctgtcgttgagaaccactggttaaaattgtaccactttgatggtttatttgtatttcttatttcttcatgaggctgaatatctttaaaaaaatttttttggccactgtgtttttaagttcagaaatagcttggcatttacatcacgtgtttttctttttggatattcaccctttcagtattagttcacaagagctccctaggtattaaagacagggaacaaaataatgcagtgtttaagagcttgtgctctgggctcagatggcttgcgtacgaattctcactcaatgttttattaattttgtaaccacaagcaggtaagttagcatttctataccttagcttcctcatttgtaatttgggcatatgatatgacaatacctcacaagattagtgtgaaggtgtaagggtctttagttctgtacctgacatagagtagaagccctatatttgagatatgatcacttggtaatggacgtcaggtgaacaaaattcaattatggtccctagtttgtgaaactgcatcattggtccatgtgtgacccacttctaccttcctcagtcatacatttaaaaaaaatagtggtgaattatgcataacacaaaatgtaccatcttaaccatttttaagtgtaccagttcatagtgttaaatatattcatgttgttgtccatccaatctccagaattttttcatctcagaaaacttaaagtctatacccattaaataatgactcctcatttccccctccctggcaaccattgtcctgtgttctgtctctatgagttttgctactctaggtacttcatgtaagtggatatcttttcatgactggcttatttcacttagcataatgtccccaaggttcatgcatgttgtagcatgtgccaggactcccttcccttttaaggctgaatggtattacagtgtatgtatatgccacattttgtttatccactcatctgttgagaggcacttgagttgtttgcatctcttggctattgtgaataatcctgatatgaatatggttgtataaatatacatttaaaaaatatatcatgaacatttgtgcaactaccacacaattgaaggactggaatattaacaatagacatcttcctacgttctccagaaaaaaataccattctaaattttgtatttcttcttacttttatcattttctcagcttgctcatataactaatgaatgttaataaactacatctgtgttgttccatgtagctgtagttcattcatttgactactgcatgaaattcagttgtgtgaacagaacacagtttgtgtatacattcactttttgaaaaggcatttgggttgcatgtaatgctttcaattacagacagtactgcaatgaccatttgggtgcatgtctccaagcgtagcagggcaagtgtttctttcaagtacatagctggggtggaattgctgggtcaaggtatacgtgaacattcgactctttacaaaataatgccaaatcttgtaccaatttacactctttccaaaattgtatgcaagactctcttgagctatgtcttcaacactttgtacagtcaggcttctacatccttgccaatcaaaaagttatgagatgacaatttatcatgatatttgtatttccataattactaatgagcttgagcatttaaaaatatctttactggccacgtgaatttcttcttctgtgaaatatctgctcatgccttttggttaattatttttattcataatagttatataaacctttctatgtcgtattaattttgatttttgcacagttttggcctttgtcttctgcctttgccttggacataatgtgttttttgatatgattattgaccataacctcttatgtcatgtaggtgatattgtcatccttacaaaaccactcgtggtgtctaaaggtgatagaggtttcttaacaaccaccacgctcctggctgtggacggaacagacaagcctgaggaactgctctatgtcatcacctcccctccgcgatatggccagatcgaatatgttcactatcctggagttcccattacaaacttcagccaaatggatgtagtggggcagacagtttgctatgtacacaagagcaaggtgactgtctccagtgacagattcaggtgagccccatggaaacttttcaaaccccttctttggattaatacttacagaaaaggagatctgttaatgtgcttcactatagtaaccatttcacaaaatacatgtatcttataacatcacgctgtataccttaaatttatagaatgaaatttgttttttaaaaaaaggaaagaaaaggagaaaaaaatgagtcatttttcagctctggtgcagctgtgtttttcttttactgtcttgttgtatgtaaggtgaagccacacgattaaaatgacagaagcaaagcaagaaattagggcctgttattgaaaaatatacacagtaaacagatctttatgcaagttctgctacgaggagaaatgtgaaaagctgaggctcccagctaaagatagatctggaaaagtcatttccctctttttggagtatgtttttctgtctgacgaaaagggatttattagtaaacatttggcataaacagagactgccttttgacacaatgtgttctggtaactgtatcataaatcatgttgtcataaagtagatcatatttccccatagaaacaatgttgtaattgggggctgcgcacctgttccagaattccgtatcaaataaatcattggaatgaataacaatctggtgaaaaggcaaagatacaacattaatgaaaatctacattcatttaaaatatggaaatttgtttcaagtcacataaagcaagagccaagtccagaagatctataatctcgcagctctcaaagctggttgatcctgaggtcctggagagaaacacagatccccaggccgggcatgagaactgggaaatgttggactttgaacgaaccattgtatacaatccagttttgagttctgtcagttcagaaggaggcctggagagcactggtttgtctattgtacacccacacttttggttcctggtgcaattttcaccacgtcacaatacagtcttctaaagagcactataaaataacataaatggagcatactcctatattattcaatgggttcccataaactatcaagtatcactgtcacacccatgttcgaatatcactgtcctctatcttacttttacctatctaaattcaatatatctgctctgataaacactggttagatgtcagtaaagaggatgctgctcacctttttagcattaaaatgatttttgaaagctgatttggataatccaacaaaacaaaacaaaaaatcccagaaagctggaacgaatatcttatttttttctcttgataagtgtcccttaacaagcaggtaatcatttaattgatcaatattttaactagttcagtctttgagtgttgctaggcattcactaaaatgtgagatgtggggattccttttcaagctggctcttttgtttgagagatggagtagtgaagttaagatacaggcttgggggcaagaactgcctgagtgactcacaactctgtgacaatcatcaggttacacaacctcctgtgctcttgtttcctcttctttgaaatggaatgatgctcgtagcacctgcctcacaaggttgcgggaggtttatatgagcttatgcatgtaaagtattagtagaacaacacctggcacataggaagaactaagtaagtgttagctactactcttactgtcgttgttgttgtcattatattctttccttgacgaccttcttccaatctttacaacaccaagtatgatcttgaaggaggaaaggagttaccaagaggagcaatgattgttctttttttcctgtttgcttatgaaggctgggtgcttcttggcttaatacatttgtatcagatccagggcttttaattttacatgcatttctggaacttctagcttctttcatttcctgcttccctccgtcaatgcccacaggacagtctgctgaagacattagtgactgtcttgaagaaaccagtgaccttgctggagaacacaggactgaatgcataaagatgttcagaaatgaaggttagatattaatcgaatggtgagaataaagaacaaaacctccgtatgaaacgattggcaatactgtaaaaatttcctaatttgcatccagagaaagtcttattagatggcattttagaaatcatttatcccaggaatttctacatttctggatcctcagataattgccagagagaactacaaaatgcaaattcttgggccttaccccagagaggcaactttggtaagtccagtctcaggcccagaaatctgtatttttgaaagatatcttcaggtaattctgatgcagtcaggactagccatcaatagtctggtctagtctgttgttctgaattgttctgaggagcctcaagaatttatggaagttgaggctggggcagtggctcacgcctgtaatcccagcactttaggaggacgaggcaggtggatcacctgaggtcaggagttcgagaccagcctggccaacatggcgaaaccccgtctctactaaaaatacaaaaaattagttgggagtggtggcgggcacctgtaatcctagctacttaggaggctgtggcaagagaattgcttgagcccgggaggcagaagttgcagtgagccacgatggtgccactacactccagcctgggcaacaagagcgaaactccatctcaaaaaaaagaatttatagaagcctttttagggcctcccagagattgagattctggggccttcagcccaatgtactgatggaacttaggtgtgtgtgttgtgtgtgagtgtgtgtgggtgttgatactaaaaacagtactataaataccataaaactaaatataagaaaacaaattttttatgcttgcaagtattcagtttttagtagttaaaaggtttccttttaaatacattgattcaagttaaaaattgaattgatagaaaactagtaaataataagagtacacatagtacaggcatatggcaaaaatatggtttcaattactcaagattaggaaacaaggttttagggagaaaataaacaataaaggctgaaaagcattgatttggtgcaatcccttatttacacataggaaagctagcattgcctgaacacctgcaatgcaccagagaatgtcctggactttttttatatgttatttttcttaagccttatgacaccaccttgcgagagatgcaatagtgttcccattgtacacatgagaaaaccaaggttccaagaggcaaaggaagtcacctaaactgacataactgagtatcactgctgaatttggggctcagagctcatttccagtagaaggttctttccattatacctcgttgtaccaaaaatttgtggagaatatgcatttgtgtgaaggaacctcctcaatgtgtcattctgatatttggccagcagttttacatatttataatggaagagcctagcgtctgcccaagacccaaattttaatcttgtcatttcactaacccaatcacggactgctatgttgtttgtcaagtggcgctaaaccaaagctgaaagcctgttttaatgaaagtgtgatcatggtgctttttaaaaattaaatatatgcaaccaatctaatcacctaaatttatgttgcttgctgttaaatttggcaaggaatttggctgggtagaagagataaattctgtggcagaggattttcccccttccatttttaatgtaagctatggcagcattaattaaatgggggagtttaatagtcagattttaccttctgcaaaaatattttgtgaatcataaatttctcctgcattgtttggtgctgctggcctggaagaaagatttggcagcatgttctaggacagatgacaccgagtgattagcaagctgacttcagctgctggcagccgggtactaaaagaacatgctaatgtcctccattttgacatgccggctggactttttttttttttttttctgaggagctggcgctatttatgattccatttttatctcttaaatgccatgacagatggcagcttcttcagccaactctattgccaggcaatgcagaaagcttgaaagcaccgtggtaatggtgaaatcagaccaggcaggcaccccagtcaaatctgagagttattccccaaatttcatgagagcggtggtcatcttggctgcatctcttctcagggggatgtaacaagggaaattaaacaaaatggatccacagaaggagctgctaccaccaacttcttcacctcagaatggataccaacatagcaatggctttatggttttaaacattgagaatgtatttggaggatttaggggagggggtatttggaagaccatctgattgatcagcttttccagacatgaacagcactgaccttttttcacgtgtactgctagctttattttgactgggaactcaaccgtaaccattcattctgtccctctctctgatgatgtctctctgcctgtgagtagtttgcactgttacttgtgaaagtggaatgatgttatttgatccagtcatgtttagaaattgcatcattttcacccctggcctattagctttaggtcagcactgacagctgccttggtgtcccagataggagcgctggcctcagaaaacatatttcttactcttctgtggtctgtggcccgcgtgccctcactcccatctgtctgatggcaggctgcctgtttccaacgtgggcagatcacgatcttccagcagggaggggtttgagatggacagcctggatcataagacaactgcggtgacctcacagaggccatgcacgcatcgagtagatgtggccgtcctgagatgagctttgaggaccccgtcaggcattcttgcaattcagtctgcagggaggaaagtcagaattagatattcaagatggccgcctctgatggagtccctggcactcactcaagcttgcatttgggtttgttgctcctggtcccatctctccccttctttcttcttccttctctgctgatatttgacatacttttaatagtgcacaatgtctatagctctacaattaatgctaatgctaaaaatacacgtcctttggcttatatttgcgctaaggtaccaatggctgatttaacactctccacagagcacacttgatacagggatctggtaaggaacagagagccagtttaatgtgaaacagggtagaatgagaggtgtgaaacatatttctggagggggaaaatgggaaaaagggaacttggaggcactgagggagcacctagcctccttcctattttattgtgggtcagatgataggatctggggggaatatgaaaaagtaacagaaaaacaatagaataaaggcataactctgttctcaggctctgcctgagaaataaagcataattttatacctaaaaatgtatatcagtttacttttgaaactgtgaaggtgactaagtaaaaagtttgaagaacagacatatttttctaggttcctttattttcttttttaaaattatttttctttttttaagatgggcttttgccatgttgcccaggctggtctcaaactcctgagctcgagcgctccacccaccccagcctcccagagtgtccaagctataggcgtgagctaccgcgcctgacttcctttcctttccttcccttcccttcccttcccttcccttcccttcccttcccttcccttcccttcccttcccttccctccctcccctccctcccctccctcccctcccttccctccctttcctttcctctttttttttttttttttttttttgagacaggttctctgtctgttgcccaggctggagtgcggtggcacgttcatggctcactgtagcctcaacctcccaggatcaagtgatccttccacctcagcctccctagtagctggggctacaggcacgcaccacacccagctaaattttgtattttttgtagagaaagggttttgccatgttacccaggctgatattgaactcctggactcaagccatctgcccgccttggccagccaaggtactgggtttacaggtgtgagccactgcaccagcctcttttattttttttaataaataattgatttttataaatgcctcatgatccagtaatgaaattgcccaatttgttaaaaatatacttatcaaaggtttaattttatgaaaggaaaactgattggtttgttttgagaaaattatgtgattttgctcaatctataattctaaaggtaactgaatacctttattcaaggtgtaaaaaatgctgctgtgggggaaatgtatgaggtttcattctttacaagtcgaggtgtgtgaaatgtcaaaatttactttatttgttgtatttcacttagcaattttaactttttggacatagatttctttttctttgcatcaaatcagatatattttccttgtcaacagtcttattaactagataattagaaaactaaaaaacttcagcatagccttcaaagcaatatcagtactcagccaaactcatctctttttactttttgtctaactgccctccctgagtccgtggtcgcaggcaggctggttgactcgttgctttcacactatctaatagcttcaggtttcttcatgctcaaaaggatcaatgctcaaaccctgaaggacaagacacatttcacaaagaataaagggattgttagtcaaatctgccagatttgtaaaataaatataaatgccataccttctctagttaaaaaagaacttccaaagaaaatatacaatttatatatgtatataaaatttatacataaaaatgttatgtatagtttatacattctacgaaagcattagttttagaggtttttgtatcggtggaatagaagagtgcatcctctacgaatatttccagcaactatggtacatggagaaaagctaacaaggcacaattctgtgattatttctaagtacatttctttggtgtacagtgaatttgtcagtcccattggatagtaacgatttcctaactttttggagttttaatattgtgccttgtttgcataatttcatgatactcttaatcttattgaaataaaaattacatattgtaatgctacaaagatcatttaaatcagtgttattgtgaaattggcttcagtaggtagaatgtgatttcatgatcaatagaatcaaaagcacattaagatatcacaaacctaagactgtaagaaagattttgcttgtctcaaatgtgtatcatttcagctttctttttatagttttgcaatggtgctcaggcaccacaactcttttgtggtggattgctaaaccagaatttgttttaaactctgcaagagtagtgggtgcagggattaaaagacctgcattctagtctcagcttcatctcctacctgcccttatgatctcccaccaactttgtgaacctttctttgaagcaggaaaataatccttgtgtagcataactctcatctgtcttatagggggagaaagtgcagaagcacatgtaaaccataagagattagagcctcccgtcatattttagagttgggtggtacttaatgatcttctggtccatccccttcatttttcagagccatggaaatgaggcctggaaggggaagatgatttaagtgagattacatgtctgagaaatgtgatctgctattaagaaatttaccataaaaacgtatgagtagaatgaattagctaaattcaactcatttagcactttattgtattggcctcccagttgtcagacttacaactttagtctattacacaccaatgaagaaaaaaacaattgaaaaattataaataaataaagggggtatactcttcaaatttgtatgatgagtctcattggatgtgaaatttttatttgcgtcaaggaaccacattaagcactgatgagcctgagaaatatgattgtcagaatttccctgttccatcacatgggtctgtcattaatgttgttgggaaaatattcttgggtgtagaatggtccatttatgcattactctagtgactggtttaatgatagggatttttctgcaagatctgcccttgatttttcatttgagtcacaacacgacaataccctttagtaaaggtgtgtattgttatcatttcattccagtagatggtgacacaagaatccatgctgaaggctgccttgcctctctttaccagattcatcatcagcaatggactgcggaccgagcacggggtgtttgagatcacactggagactgtggacagagccctgcctgtggtaaccaggaacaaggggttgagactggcccaaggggccgtgggcctgctttcccctgacctccttcagctgaccgaccctgatacacctgcggagaacctcaccttcctcttggttcagctcccccagcatggccagctctacctgtgggggacagggctacttcaacacaatttcacccagcaggatgtggacagcaagaatgtggcctatcggcactcaggaggggactcccagactgactgctttactttcatggccacagatgggacaaaccaaggctttattgtgaatgggagagtgtgggaagaacctgttttattcaccattcaggcaagtatgaaaaacacagttcatttgccagagatgtgaaaacagtgacatcgagaattttttttttttttttttttttttgagagggagtctctctctgtcacccaggctgcagtgcagtggcgtgatcttggctcacttcaatctccacctcctgggctcaagcgattctcctgcctcagcctcctgagtagctgggcctatagtcatgtgccaccatgcccagctaacttttttgcatttttagtagagacacggtttcaccatgtcagtcaggctggtggcgaactcctgacttcaaatgatccacctgcctcggcctcccaaagtgctgggattacagtcgtgagctatcacgcctggccaagaactattttttaatttcttttcctctttcattcaagtacagattatgcatctacagcaaaacagcaatattaatatgaatgaaagagatatggtcccctcataggtgctaatgactgaccgtgagtgttgatggtagcacagaaaggagcaaaagccacacgctttggagtcagacagacctagctttgaatttctgctttgcaatgtattagccgtctgaccttaaagagttctttaactcttctgaatctacttttccttctttgaaaaacatgcctacagcattgtggtgagaattcagtaggattaggtatccaaagcagtagtatatggcctgaaacatatttgatgttgaaacttacaaggcagcatctttacactattacacatataataatgatgagggtaataatagcagcaattgcagttcctttagtgttaactgcaagctagacccactccacataaatcttatttgattctcataaaactcatatgaagcaagttttgttatttacattttatagatgagggtacaagttcaggagttaaataatttgatcaaatacacacaaaggcctcaagtctttctgatcccaaattctgtgtcctttctatgacactacactgccacatttgttgactgttacaaggattcctggagggcataatgtgtttttcttttttaagtcaaaacacatcaagtatattctggctctcaaacccttgaatctactctccttggaagtagttcaccctcttctacacactcacaccaaacacaaaatagataaaatttatctctcacttcagaatactttctgactagtaaaatagttacatttttccttgctctgagagagagagagagagagagagagagagagagagagagagagagagagagatttattttaggaaattggctcattggctcatgcaattttagggcctggcatgtccgaaatacacagggcacgttggcaggctacaaatttcagcaggagttaacgttgcaatctttagcccaaaggcagtctggaggcaacattccttcctttttggggggcttcagtcttttctcttaaagcctacaactgattggttgaagcccacttgcattatggagggtgatctctttactcaaaatgtactgatgtaaacgtaatcccatctaatacacaccctgcaaagttgacacatgaaatgaagcctcacagactcttatctatgagggaagtcttgagatcatagagtggatgctggatgagtccttggcagtcaggaggtccaaaaaatgcaaagaaatgataatgcactgggagaagaaagaagatattgacatcgtgaacacagtaagaagcactttgtattaaaattattgtttttatttttatcatatgttttaattgatcttagtcactttcccttttcagtctgttagtgtcttttttttattcctaactcccctaacctaggttgataccagtctctgtactgtccaaccagggatacttttctgggtctctttggctgcaaattcatacgaattctaaattctgagtgcagatgttagagttccttcctacactccatagcacagatggaaaagaggatggagattggggaaagtaccagaacttgaatcaggtctttcccaacaccaacactcatcttaaagagcatggctattgtaagagagttatctattggaagttgtggaatttactgataggaaaatgttggacatatattgtaaagtttctttttttttgtcaaaagtataaggctttccttgcaaaaaaaaaaaaaaatcattacgtgtaaaaaccccacaaggtaagcttcaaaattcctcccataattccccagaaccctcagtctctttgagcagagaagtcaagaggctttagaaagtgactgaccccaccagcagtgtaggagagatgacactcagtgtcttgccttcaagagctttttctgccaagacaatatggatgttgatcaccgttgagtgataaactgtcccaaataagtctcccaactatgggtaaactattcttctggtggtacctgagtaattgagggcaaaactgctgcaacacacaggtgtatttgactgataccagcaggcacaacctgacattcatttggtaggaaatcttttctgtctgaccaagattattgcaactgatgcaacctgtacttctcctttaaaggggtcaggtgagcgagaaaaatgtgatgccattgctttctgtgcattttctgtaaatacaacacaagttatcaggggacagagctttctttaaaaaaaaatcttgcaacccaatatttaaaaatgcttctgggatactaagccagaagatctacttttgacaaagctagaagttgaataagatctaggatatattttaatgtgaccagagacatgacgggaccgtgttgctagagtttagatgtccttttaaaaacacatgatcacgacaggcatttattacttttgtaacactttcatttttaaggaattataacatccaaaaccaaaataaaacaaccatctacattcaactattcatttagtatcaactctgggtatttcttatatggcttagaagtactttaattttcctcttcttccactaaccatctctcttactggccacttggttgtgggagcttcttccctcacgggccacaatgacaatttaatacccaatctcattgctttgaaagttgccacccatactcttcaggagaggagaagaatgactgtgacttttgaaaatgtcagttgctttttcagtttataaaataactatgtattgtaaataattcataaactacaagaaaaaaaattcttgacaaccataccactcaaaaacctattgttggtggctttcttttattttgttcaattagaaatgggatgatattatatatactattttttatgcatattgcctgtttccatcttcatgtgttatgaacatttccttatgtcattaactattcctgatagttcttgataactaatcatattcctgataacatgatttttaaaggctgcatggaactcagtctcaggtcgagatggtttataaatcccctggtggacttttcattccttttgtaaattgctattataaatagtattttggtgaatatatatctaatcatttttgcatacatatctgtttctgcaagatacagaaaaattttcactgttttgcacccctaccagcaaaatataaaaatatctgtttcttcacatatttatcatcatgagttataattatttctgtttttttttaagaatcttgccaatttgagaggaaaaaatggttggttgtgacaaaatttctcatgaaataaacagaggaggagttgtaatctttccccaccccaaaagaaatgaacacatttgtgcaaatgctcccagatttttgcctatgtctatacaaacattatgtatagataaatatatatttttaacaaaaatagtattataattatattcgaattctattctgcaacttgctagggtttttcagttaacacaaaattgtggaaatttttcatcatcaattcattttctcccttattcttttgaatagctacagagtagttcattgtatcataatacacaaaaatatacatggtcttatcattgacaagaattctttactttgctagggcaaactaagatttacagtagtatcaggttggtgtaaatgaaattaagaaccgagagattaggagtgaggggaatgaagattcttgtacatgttttctagtatcagtggtggatctgttctaatccatccaaacctgctccatccataacctacaacagtcatcttgcaaatgcaagatgcactgagctccgtacagactgaacgaggtcctttgttgtgtttgaacctacagtgtaggttgtgaagatgtcatccaccatcttcacaaatctggtccacctgttcagctacctggctctcatcttcaatgaaagaaatatgcaaatgtctagaaataatcacctttcactttttccttactgaggtatctctatttttattcaacatttttgccagttgaaaaaagacatgccaaaaaaatttctatatatttgtaaaccctcacaattttgtgtctgtaaatcactaaataccaggaaaataggagaagttcttctgtggagttaacatgaagtctgctctagaattcttgggtcaattttagtgtattcatttaatagacattccctgggcttctattatggttcaggcactgtgccaagtgcagggaatccatggcggtgaaagacctgacgcctgccctctcggaacttgtatcctaagtggcagtcaagcaatagacaaattgataaagtggagtcaaggtttacagtggaaaattggcctctgttccaagcactgtgatatttgctgaggctgttgtgaacaggactgtctttagcaggaatccactagtgaggagtataaggaatccaaaacgtgggacagtgtgtcattgttgaaccaataaagcccaacgttgcatgggggtgaggggcctttggacaacattttatgtcattgttgatgatccaggtagaccaattggacaaaacagctcctcgtatcacactcttgcattccccttctcaagtggggctcctgaaaaatggctgctacgggatttacatcacttcccgcgtgttgaaggcatcagaccctgacactgaggacgatcagatcatctttaaaattctacaaggcccaaaacatggacatctggagaacacaacaacaggtactggcctccttaatccttacaattgccattttaaaatacccagtggctggcagggctagagagtaatttaattaagtgcaggcccatttggtaaacactccccagggcttactgatagatgcagtttataaatcaatattgctcctaaagagggtttgaagctgagccttcctaaatttatcctgactggaagaaccaaatactgatatacaactgtttatttatattttttttctcaacagctgattataatatattcaaaggaacataatatcaggaccaaatttcctatttgtgactaattttttattctgtcatgaattctaaatgactctaaatgatgtcagatctttttttaaaagttcttggtttttttcctaatggattctctggattgtatattatttctactttatgagcacaatgatcataatacatcattaaacaggatggcaccaagttacagatttttattactgtatctttctactctccttctctttattttcatttttttaaggcaaatatttctgaagcagtcaacttaatgcctaatttaagctcgctgcatttgagttttaagatagttacagtaatgttaatttcttgttttaaaatgtactttagctgttttttaaagctgtgtttaaaataaaatagccatacaattttattagcttttatttaatgttttgtttgattacccatgatattcatttatttctttttttaggtgaatttatccatgagaaatttagccaaaaggacttaaacagtaagactattctttacatcataaacccatctttggaagtaaattcagataccgtggaatttcaaatcatggaccccacagggaactcggccactcctcaaatgtaaattctcttgcttattcagtagtcctatatgttacatccataatgtatctgaatattaggaaagtgaaatgttctttttaaaacagaacccaagaagataaattaatagaccatttcacaagctcatggaatttattttggagaatgaattttctttttattactgcttgaaaataggaaagccagtagctttacagagtacagaaacattaaaaagctaagttgacgttcatattatgcatgtcaaggtacacacttttatacacagggagggttctgtcttaccaattcactagcatccaacactgagtttgcaggttcatgtagcaattgtgcagcaagaggtcactctaggaccgtgttagcaactatagccttctaaaatatctgcagtcggggaaatgaggtagtcaagaagagttagccaaacatcttctctttctcttatgaagaaaattacaattacttgacagtatgtttataaggtgataaacttatcccatgtaagacaaatataatgtaaagaggaaactagactttggaaggtatataaagggtatgaccctcaaaatagcaagagtaacaaatcttcaaaattaacgagattaacagaccacagcaatttcactgactgggtccctactctagacttttcttgaatgtagaccttgaatatcttaccagctaacagatagtcatagaaaggtcggtcagagtccagttattctggtactgtgctgttttttgtttgtttgtttgttcattttgtttgtttgtttttgataccctcccagaaaccccaaagaaaagttgttcacttatccttgttttagtagtcaccatatcctagtcatactaagcatcataagtgatacagctctgtgctctgttatactccttttatgatggagtatagattaagaaaagaaagctgagaaactcctctgcagtcttcagaattcttgcattttcttttggatcctgaattgtagttctaaaatctgaccagcagaggtcacagtagtcattgtcagaaaaaagctagcctccttttcttagcaaaacacattcccagcgtcccactccgttgcctcgataaaatgcagagcctggcccagatttattaactccacagacttttatcgagtggctactatatgccaggtgcacagtactaggagctggggaataggttagagcaaagtagacctggcccgtgatattaaaatgtaatctcgagattacaaaatgtaaaacatatgacctccacccattaaactgtctttgcctaagacaaataattcccaggatcacaatctttatgggaaaatatgtcaagtacttgcaatgtcagacaaatatcttccaattctcaagaaaatgtaaaaaaaaaaaaaaaaaacctgctccaaaaatgttaatacgtggacttcactttttttttttaacattttaaaaataattcaagtaagaaaacataggaatgttgatcagacttgctactgacctaatgctcacctcttgtcctccatgtgtgagcgcagtgtagctgacagaggattttcttcccccagtaatgatgctaggctgatactgcttcacccatagcccctttcaatctttgtcactatcaaggacattgcttttggaagatgatttatatttttaaatatactctcaaattcatatgagaattacagcaaaatttgcttaatttaattataaccttaaatgaggccatttaaatatcctcctgcttttgttggctattaactttcatgtgtctgtgctggagatgtttccagttcaacttgacgtaatttgttcatttgttcatgactgaacaaaatgctgtggcatatgcctaccaaggggtaatatagagagaagttttatttggttctgacatatattaggctattttctttataagcgatgggggggtaaaattactcagcatttatcatcatcatttttgaacggtatagttgtcctcaaccccatttgtaagcagatgttattggaactaggtgcacaattttccagtaaaaagcaaggttatgaatagtggttcatcttcccaagacagccaggcagaacgtagttacaggtacaatataaattacagccatttgcaatataattggtgtttgctctatttcattgctattcatttaatcatcagaaccacctatgagtcaggtaccatcataatctgaaatttacagatgagaaaactgaggacagagctagaaagtgacttttctaagtggaaatgcagctttagagtgcatgatttttctcagcacactgaagaacttcttgcccattttaaggactgtgctaatctggcctgaagggaatggaacaccagacttgtcttcttctttctcttcagacattggccacccaagcaagaaagaaggaatacttactcatataggaccttaaagttcagtgggattttttaacatgtacattatagatctctatattagtgtgcacttcgtatctaacacactagaatttatactatagataataaaccaccgaacttggagctagaggacaaggtttgagctttggctctgcccttcatctagtaactgttcaagccttagttatctcttctgtaaaatgggagcgatactacaatttgtttagaaaaacaaaagaaatgtgtaacgtatatgaaagcatcttgtgtatttaaactccttaacaaatgcaacttgtggtgattactgttgtagttaattcatgtaggtacaataattgactgaagaagtatcccggaaacatttggtggattagaaagcctgcctctaattagaaattgatcctgggatgaatcacaaagtgaacagtcaatatgcatattaatcaatgagctaaacgctgtggaactttgtggtgttctttggcttagacaggattaatagattcatattccccatatttgaaggggtgaaacctctgtgataaagctcaagggactgcggggtgccatctggaacagaaatggacctgttttagagcacgggaaggacccatgttcagtggaaaattcagaatcttgactgttggtcagttttggctattgcaggattcctgtggagtcctgaaggatgaatagatgctccactctaaaaagcattaggaaatgcttgtttcgtgagattcatcaagttactgccagctagctagcttgcgtgcttgtttaactgcatcacatcctggaatcatcgagatgtgcgtgtggattgggaatctctcagaaatgaagcctacgcagcaaacctcaacccaactgggctatagaatcacctctctctacctgccaccccacacacaggcagaatagctcagggaaccaatttttcatggaatgcatctgggagtcactttattgtaaatagaaattattttataatgctgatatccttggaaatttgcgtaaagatttagatttagctaagtgcctacatttcaggcactgtgctaagtgttttcatgagttgtctaattttatctgcaaaacacaatcctctgaggataaggaaataaagctcaaggcttttaagtaattatcctgaagtcactggagagtgaaccctgacctccagacctaagtgagtgcgcatcttattgcctcaccccctggctgcaccccttgacaagcttgtgcctgttttctagtccaagttgaatctccaagatgatccgcagaagccccaaactaagttacacaggacccacatcattcatgaaaagcacttttgtggaccacagaatgtggccaacttctgaccaaagttgttttcctaatacagcttctacgtggacctctttcttgtgcccactggagaaaagtgaacttcaaaagcaatgttgaatgcagaagtctttgataattcagtgactgtttctccggttctgcactctgattcttcacctccctctggcaactcacattctaactgttctgttgtccatttttggctttaaaagagaagggacagaagactaaaaggaatttccatcaggcaaacgttgcaatgtttagcagcttttatgaaacacctgataggggaaggtgtttggctagctaatacctgcacattacctgcaagccaggagttaaggtttttgtcttcagactagatcttaggaaagcacagaggaagggaaggaaaatagcatttattgggcacccactgtgtacaggtgctttatacatactaactaattttaattttaatcattttacatgagtgtaattctcctcatttttaagataatgaaaaccgaggcccagagagactgagtaactgaccgtaatcacacactaaatcacatactaatcagtggttacaaggtgtgcttgattctaaagcacttgttttgggtgcacactatgctgcctcttggctaaacactgtttccccattatcaagagaaaaagagaaaaatgaaaacacaggtgttcatagcattcgattacggagtttaatagcatcatctatgaattgagaagtcttagattggatacttgaaaaaatatttttttaacattttcaggaattcttgtcacatgctacttgattataaatgaagatatagttataaggatagtaatttaatcacaattttagcttctgtaaaccttttgctgagaagctcaaaatacttaatgagaattcatgaaggttcacttaacccctttgaagtacagacttatcattattgcattttgtaataatgacattattataggaagaaaggaaactgaggcatagacaggctaaatatctttttcacagactcttgttaacctggattaatgccccaattcctaaactggtgatttaactccaggtatttctttcagcttcttgtttcatcataaatgaatcaagtagctagaaaataaaatatcagaaagaacatatttattactccaggaccgggtgtctcaacattggcactataggcattttgaaacagaccattcggtgtcacaggggagtctcctgagcactgcagaacattcagcagcaccccaggcctctctcagctgaaggccagcaccatcctcttcccagttgtggcaacgaataccatctccagaaaatgccaaatgttaagaattacacgcatgccttagaaaatagcatacatatgttttaagaaattatgaattatgttagaatgctcatttatcaatgccatctttctctctatgctaataaagcctaacaatagtcaaagaatccagaataagtcagggctagagaaaacatgtgaggatcatctagcctagcaattttttccaagtgtgtgacagatgatgttagtaaggttggggagaaaaatattttcgatggttgtattagtctgctttcacactgctaataaagacatacctgagactgggtaatttataaagaaaaagaggtttaatgaactcatagtttcaaatagttggggaggactcacaagcatggcagaaggcaaaaggcaagtcttacatggtggcaggcaagagagaatgagagccaagtgaaaagggaaacccctcgtaaagtcatcagatctcgtgagacttattcactaccacaagaacagtatggtggaaaccacccccatgattcagttatctcccaccaggtccctcccacaacatgtgggaattatgggagctgcaattcaagatgagctacaattcaacatgtggggatacagccaaaccatatcaatggtcaacttagctcaggagacagtgggataaacaagattcattcattcagttaacagatatttaatgagcactcaccatgttttagatgctctacaagacacctgggttatcacaatgaaccaaagacctgtgcttccttggagcatacataggatctaaatcaatgtgatagcatgcttgctgtacgtggtacatgctctggaaaaatgaaaaacttgaccaggagcagggggatcagcaagtgctgtgtttgggaaagacattgtgattttaaattgggtgtttaaacaacatttcctttacctgactgcttagagctggtgagtgacagagggacctgaagcctcacaagttcaaatccaattttatttccactgctccatgccatgtcttccacttacaacagtggttttcagggatccgaatttatcttcacattgaaccagcttttgctttcttttttttgagatggagtcttgctctgccgcccaggctggagtgcagtggcatgatctcggctcactgcaacctctgtctccaggtgaaccagctttttctattgtgatgaacacattaaaaccgcatatggaagaagttctcaagtgggggtgacttttctcccaaggagcatttgtcaaggtcccgaaacagttttggctgtcgtgactggagggaagtggtgctcctacatctaatgcgaggaggacagaggtgctgctaaacatcattcccacacaggacagcctcccgcaacaaagaattgtctggtccaaaatgggtgggaaagcctgacttagaggcttagggagttttcccctcctgctaaatgacttgaagcgattgccacatgggttacacataaaatgtgtccatggcatacagttctgactgtaaaatgagcgtcactcaatggtgacaggaaactggaagcactgttaaaatgggaagatatgaaccaatccttatctacatgacacctacacatctagaactttacgaatttctctcatgggctcctggatctggacatttacatgatgccaggcatatagctgtgtggcttcttgcaggcaaaattcccaagtgattgactacatctcttatttttcttccaggtgtttgtgtacagtttaagcaatcacagtctctgcgtagaaagatcttctcaaatatactactgcaaaaagcaaaaaaaaaaaaaaaatcacattcaaaacatatattgtacatattctgtgggtatgcaggtcctttgctatttagatatttttctcaaaaatatatagcctggcttaaatttcacggcttttcaatagctctttattatttgtagcgaataattttaagaaaataaaatagagcattgtgtaatgaccaccttgacctataaacgttatgcagcattcaaatggtgcatcagggaaatgcatgcacattcccaaacagtaagaccctttataccttgaagctgaacagccctctgaatggttcccttctgaatttagatcagaaatcaaattgcatttagcttttcgccttgaggtcaccaggatctacagaatgacattgatggatttttacttgtcatggttagcattagcaatggatgaattctcagaagaattggacattgaaactcatttgaaccctactgatggctgaaatccatgcaaatgtatttgtttcattctttcccactgtcctcctttccttcccatttcatctttctctcttttcccctaatccatcttgctgactttttttttctttctcattcaactggatccttttgggattctttgcaacatatttctattggcatttatgatatccttgttgtttgttatcttgtaattctttaggcacacactaatccctcctatctgtgggagatatgttctaagacctccagcagatgtctaaagtgcaaatagtattgaaccctatgtacactgtgctttttcctgtactgcacatacgttgctaggataaagtttaatgtacaagctaggcacagtaagagattaataactaataaaatagaacaactatcatgggatgccagcatcactactcttgcactttggggccatgattatgtaaaattagagtgacttgaacacaagcactgtgacactgtggctggcagtcaatctgataaccaagccagctacagagtgactaatgggcaggtagcatctactgtgtggatgtgctggacaaagggatgattcttgccccaagtggaacagcaggggatgatgtgagatttcatcacactactcagaacagcatgatgtttaaaagttatgaattatttgtttctgggatttttcacttaatattttcagatcacggttgaccacaagtaactgaaaccttcagaaagcaaattgtgaaaaagagggattaccgtagtcatttatttctgtttcttgatctgtttcatgcgagatttaaattcagttgcatcagagacccataaagtttccaatttttttaatacaaggatcctcttttcttgtttaaaattctattaatatgaagtagcaataaactcaaacaataaattttaaatctgactgaataaacaggtatgtttatatagattcatgagcccctgtaataattccatgctcttaccctacccttgccccctagcccatgatgctcagctatgaacctacactgttgagtttatctggctcgtgagcttaatccatagaacgtgattatgacacatgatcagtgtggacacagtggttatttgaagacaaacttcctccctaatatgaatggccccaggaaagcctggagagtgtgtgaaatatgtgaacacatgttccatatggtggcacccagaatttctagttccacaaaaaaagaaagaaattataataaataaacttaaaagtaaagaggaaagagtctaaatctgactagaggtttgggaagtacaagtaaggcaaccactaaggattttgtaaatctagaataaaaggcaactgaataaaaaacaatggaggtgcagttaacaatcgtagtgaaggttgcttgtgtcttttatcctgctctatagtaaggttacagatggcaaaaaaaaggcaagacctcaaaaaggaaaatgtttctgggtaaagataaaaccgtattgctctgcttgagctcacaaaagagtcgcaaagaacttcagttggggagagaaatggtagaggttggatggaagatttggcattagatttatgcttgaatttcatctctgctattagctttgtcatgactttttgcctttaagttagttacttaacctctctgaagcttgtttgtctgtttgtttttgaaaaaaaatgttcctctctagatgaagattaaagaagacagtttccaccaaatgttggactcactaaatatattgtggaaagaaagactatcctctatttctcaggtttatttagttatatagttgcatccaagcctcataccagtagagtcctttttttatgcacagaaagagaaacaaataacacttatgaaacacatgtacattttaattcccaagcacatcctcaaaaatattttgttattaaactgaacccaagttcagagaatatctctgtctggaattgttcttgttgtaccaattatccttatctaaatgataagatagaagacttcctatcagtgtcttttccaaaaaggaatgtctccttgaacttaacaactgctggttcctttcccttcaaaacattcacgattgagtccccttttagttgtaaatatctgggagacattcagcagccttttaaccttagattcttcatttgtgaaatggaattctaatccttgctctgtctaccttacagggttgttgtaaggatcaaatgagataatgttagtagacattctttgtgaactaaaatgtgtcaaataagtcttaaggaatttccatcactggtgtaggttgatcaaccacgtttttccactagtccgctcagcagagaatccctataggcatatactatgcattctcatgatttctcttttcctttcacacacagtttggaactgaagtggtctcatattgaatggtcacagaccgaatatgaagtctgtgagaatgtgggtttgttgcccttggaaattatcagaaggggatattccatggactcggcctttgtgggtataaaggtaatgactctgaaatgtaaattatcaagctaaaacttatgttgttctttggtgtctttcattatattttttttagaaaaattcagagtgaccaaggaaatttcaaattgcagggagatcccactattctgaggattctaagcacaaaacctccttggccctccatccatcatctaagttcataaactctgagatatgattttttagtgtacgtgttgctgaagctagcacaagagatattattattattattgttattttgagacaaagtctcgctcttgtcgcccaggctggagtgcaatggcacaatctcggctcacagcaacctccacctcccagattcaagtgattctcctgcctcaggctcccgagtagctgggattacaggcacctgccaccaggccctgctaatttttgtatttttagtggagacggggtttcaccatgttggccaggctggtctcgaactcctcacctcaggcaatccatccaccttggccttcgaaagtgctgggattacaagcgtgagccaccttgcctggctgagatattaatttttaaaatccatttttaattttgaaagctgttatttgtttctatgaactctttagactttgaggttttatttcatagggagctatattcaactttgtgaacttgggctgaactctgctttagaaagagatgttgtatgcaagacattctgtggggtacccagagcaaatttcagtcccaagaggctttctcttagtattcacctcagtcacttcccatgggctcagttgatgaggcaaataggcagcttaaacccatctatcttaagagttgtccaagccatacaaaattaggagagcatatactaatacaggcaccctgaaatatgaagaattttcagttaaccacttctagatcagtcaacttgctatttcttttcattgatgtgacccatgaagcacaacctatggcttctagaattgaagaattttttttaggagtcgttataacaagagcgcttcaagagaatgagagcatgaaacacttgtacacactaatgatggagaatgagctgtaaagactcccccccaccccatccccccaccatctgatgaaaaagacactggtattagcttctggggaaaaggccatttctattaagtctcaatttaataatgaactcaaatcactctcagaagcctgggaacataaatttgaccatatccaggctcagtatttatctttccagtggacacaggtcctttttcctagatctgttggttacttttttgttattaagacaggagaaaacttggcatgccctatagttttccagaagattgcttatggaataaggaagaatctgcctggatggttttctaataatcctcccgtcctccatagaaagcaccatatgctctaggctggagttttgggccacgccaccattcaccttgccaggtagaaagaagaggcatggtgttacatggaaccttatgcttatttatgctgaaagtgcacaacaaacgtgccagctgagtgtgcaggccttcatcaagcacagtcccagagtctttcaggacaactctaccctgagcacaacctgcagccttacactagagcttggctgcttgactgggagcagggaaagaggtggtgcttttaccctgtgtggattgccctggtttgaattgtgcaccttcacctgactgatttctccaaccaccttgcctcagaccattccttttcccacataggattctgtaaactcagtggtagtaaatactaggtaattggacatgcaagaaccatgcagggaaatgcaacttccagcatatggtggatacaggtgtataatgggctgccttttcacaatgaaaggtggttccagaggagccttggcattgtagacaaagagcaaatggaagcttaggaaggtaatccccttttccagcaaaatgtttccactgctaaccaattaatatatgagggggcctttgatttgaaatggacatattgtctgaggccatagaagtaggaatttttcagcttttcattatgcacttcattcttttgtcagaaggtacagaaatatattatcccacattcctgaccatcttaaacatctaaaaaatacacacaagtaacagaaatgcttgcacacggttctcatttgatgacttatttttcaaatcagccaaagacactttttttttgttttttgagatggaatctcactctatcacccgggctggagtgcaatggcaccatctcggctcactgcaacctccacctcccaagttcaagctcttctcctgcctcagcctccccaggaggtgggattacaggcggccgccaccatgcctggccaatttttttgtttttggtagagacggggtttcaccatgttggccaggttggtcttgaactcctgacctcaagtgatccacccacctctgcctcccagagtgctgggattacaggcgtgagccaccgtgccggctcaaggacacttcttaacatgtgtttgggcaccctttgggtggaattcaaggccatgacttcagagcgctaaaatcgcctctttggtttttagtcttggggctggagctgagaagcaggggtgtatcaatagtctccttagactagggcatttttgttgttgttgttttaaaacacctacctgacggggtccttgaaagtccttggttttgggtgtggatctcctttgtctggttgttcaccaggtcttccggttccacaaaactctcctttcatgtttgtgaagagtaatggcttcatccagacaggaaaatgaaccagatgtgtttgagttaatctagtctaaaggctttcagtgccctggagcttgcaggatacctccaagctagctgacagatcatcacatgggttgtcaggggtacctgctttttcttctcctcatcaattttctccctccttttcttttgagggactattttaaaaccaaattgggatagaaggaaggtaataaaattgtgcttgcaacaaagacaaaaatatagtttaaaattcatgttcctttcttcaataactaaatcatttataaaggaaaaaccaaacaaaacaaaagctttcctttccattgatattagcctaggaaaaagtcaactttaaggaaaatgcatgttgcctggatcccaaatggcttatataatttttttaaaaaccctacctaatattaaaaacagatttaagagcatgagtttagtccagtatgagggagaatagctgtttctctattgtagaatatttatttttatcttaaaaagatttttttttccctcctaaggtcaaccaagtgtcagctgcagttggaaaagatttcaccgtgattccatctaaactgattcagtttgacccaggtacattttgtgtctgcagtttgttttatgtgttttgttttttgtttttttttgtaggcatgtctggagattgtagagaagatagaatgttacacaactttagccaactagaaactcctcagggagccataccacctcactctaaaagagaggtgtttggatttgaggttttgcccttatttttttttagtaacaaatgaattttgatttcaaatgagaagaaagattataataaatatgagatatcaaagcaaacatccaagacaatccagaaaaaaatacagtcacttagaaattatttgaagttctaacacaaagctgttatagtttaattgcctcagatattttatgaaaattttcagaatgttatgtttatatggattcctaaagggcatttctaaatgatccctcatggaataggttgatattaggagattccaggggaaattattatttagttaagtagcacttactttgttttaaatttgtggaaaaattttgctaggtgcaagtggaaataaaaaaggctggtacttgctctcaagtgtgttccattgtgtgagaaacacagacaagaattaacactcactgatagtgcactgggacccaaaagatgagctgttgttcaggctaagagaaatcttggaagacttcccacgggaggcagtattttagcatttagatgaagaagaaaactccaggatgaaggactaacacaaaagcaccaacacacctttggggagctgtgcctaaagctgaggctggagcccggccatctttccctggcttctgtggatgggacaggtagctctgcctcactcactgcatgccactctctatttccctggggtttgagatggatctgaatcaaatgtgggggcttgggagtggcaaatacaatgggcctggagaagcagacaggactgtggctttgtgctttcctgccaaggagatgttctgcatactgagaacactcctctaagtgtgaactattgacatcatctgccactaactcataaagagttgagcaaaggcaaaagaaaatggcctaagtaccagcaccacctcaaaattgcctatcttaatgtcaaacacagaaaagaaatggctctctgcagttcactgcaagtagcatgatgcttgaggactgtgttagtttcttcaggctgtcataacacagcatcaaacagtgggtagcttgaaacagagacatcgagtgtctcagttctggaggctagaggcccaagatcaagctgtcagcatgaaggattacttctgaatcgattccatgcctctcttccatgcttccggtggctgggtggcaaacgttggcattcttagtgtctgctgcctcacctgcatctctgctttcatcttcacgtagcgttctccttgtgtgcatgtctgtgttataaagtccctgccccttttttcttttttgagatggagtcacgctgcgtcacccaggctggagtgcagtggtgcaatctcagctcactgcaacctctgcctcctgggttcaagcaattatcctgccttggcctcccaagtagctgggactacaggcgcacaccaccacacctggctaatttttttgtatttttagtagagacggggtttcaccttattggccagactggtctcaaactcctgactttgtgatctgcctacctcagcctcccaaagtgctgggattacaggcatgagtcactgtgcccagccaagtccccctttttatacaataccagtcataatggatgaggagcccaccttattccagtatgacctcacattaactaattacacctgtaattaccctagttccaaataaggtcacattcagaggtactgggagtgaggacgtgaattttttagaaacgccattcagcctataacagtgaaccttcacttcgacatgcaaaaatctgtattttgtttttggcctccttcctgtgatagttaacattctaactcagataagctggttcttccagctgacctccttttgtgggaagagatcctgttatatatgggaaagattcctgttatttatgtgctgtttactcccacactggtacaggctcttgcggccaacccaacaatccctacaatgaaagggtgagatgatgtgcgccatgtcccttcctacttcatgttaaggcacttccaacttttccatttcttgagtctttgccatatgtcatcttcataatttgaggtctgtttgctacaagatcaggagtaattttggctgctagtaggtttcaggagcccatcaggtgctctgtttggactgataggaactagaacgtgtcacactacaagagactctgaaatctgtctcttggagattccactggataagataaatacccatttgtctagaagagctcacatgctgttttgagtagatactaatgacttctgggggctgtaaataatcttatgattttagatattatttagacaatttaagaaataatataagcatatcttataaattaagaaaaaaacaattggctgttcattgttttagaatttattaacccagaagcagttttgcaaactgaaatcttgctttagagaattttgaagttctccatgtccacaggtccagtaaatatttactcctatcttgttaatccttgcctcttctgggtctggtgtccccatccccatatccaccccttttaccaagggaaatcaatttgtttcttttaaaacggcagcttccatgattgggtgaagaaacagagtgaaaaaccgaagacagtgggatgccgtaaggtttgagaactcttacgtgggagctggaaggaagcttgccttgaagttgcaactatgctaccaaaccaaaaaaataccaaacaaacaaaagcaaaccctaactactttgcattcagctattgtgactagtcttgagtggatataaaaatactcctaagaaaatgattgttttcctttaaaatatgcattattgaaaggcttgcagcattcttaattgatcatcattccttagagtcaaaatgttttccaagggaacagatctctaatgtggcatttactaaaaaatattgagaaaatgtctttcaatagagaaatctgctttgcaggaaaacatccaggaactcacctactctgtaaagtggaatatgtctgcataaaatgacacctctgttttctcttcagcaccttttgttttgtgggaacagggagccagtccaagccttctgaaaatgcttgtatatctcagggacttagcaaatactttgcaccttgaaagtgaaagaggaagggaaaaaatgataaagttttgacttccaatctcattaacctaaagagttagtcctctgtgcacacctggaaggcatagaaaccaagttggaatgcacacaaacaaatcagaagcacttaaatgaaactcaaaagatattttctccaacccctaaccatctggttctactccgtaaggtccaacaaaaaccttaagttttttgttttttgtttgtttgtttgtttgtttggggggtactataattttaaaaaattaaccttaaaatcagagagtcggttgggagttggaaatattttctgtattggattttatttacatgatgcttaactttatggtctttgagggtcaaaacagttctccaagtactaataatcatattattcatatgctttcttcattgaccacctcttatcttttcatgccaattgtattacagcagctgtctatgtggtcttcaaacttctagcctatctgtctatctgcctggatctccagactttctcacataacactctcaggttcattttgctaatccactttcagtgtgtgacttctttgttcaagacccttccctcttgcctatgttgtaaagtctgaatctggccaggtgcccagggctctctgcagtctggctacaaataatctttgcagccttatggcctcctgtccacccatgtaacctctctattccagccagctaattcactcacccttcccgagtcaagacctctgctttgctatcttcctgtctttacttatgttgttttcctgtttcctccctcctaatcctttcacttctaaagcccacatttatataggctctacaatctattctgtatcttttagtaggtaaacatacatagctttcaataattatttgacttttctggttttgcttctgtctcccccaaaagattttaagctcccttagatcagggcttggcttatgttacacctctggtattctccatagcatctaatgcaaagataagcatatcataagtacaaaatatatattttgatgtattgatttatccatccatgagatgggaattgtatggtattattatacatactagatgcttcaacttctgcttttgcaaagactgtgaacgtaattggtttaaaaactcagtactggaagcttaataaattagctgtcagcctgtttttgaataaaatctatttattccaagtacacctaattttttcccctctaagtgcagccagccaaaagtagaagaagtggatagcttcacctttccattgacttctgttgaggattgaagagactgattagatcatgagatctatgtgaggcataccttcaagaaagaggccaccatatagatggacagttgagaggtataagtctgtagaaggcaatctgcaagataaaagagtcgttttttggagatggggacaaggtctcactctgttgcccaggctggagtgcagtgacacatcctgggctcactgcagccttgaccttctgggctcaagcgatcctcccacctcagcctcctgagtggttgagatcacaggcacgtgccaccacgcccacctaatttttgtttttgtttttgttttattgtagagatggggttttgctctgttggccaggttggtctcaaactcctgagctcaagtgatctgcccgccttggcctgccaaagtgctgggattacagttgtttaccactgcacccggccaagagttacatttttaagagaagactttttaaaaagtttaactgtatcatatagaggggcttaaaggagtaaaagcactcaaatagccaatgagcaaatggcagagtaagcttttccatctcagctaagaaaagttaaatcgataagtttactgtgtttattcctcttaaagttgagccttctttctccacttaaaagtattccctttacttccttccaccacttgttcttctaagtaaactcaggggatatcctatgatccacatcatagaaactggtcaggatgagatcatctcagaagtttcttcttgcagtcttaatattttgtgtatctggggttgctttgtttccagtcttggtgttgacaggatggctgggatatgtttgtaaggtcaaaactgttttgtataatattaagttcacaaagttactgtgaaccaagcttgattgtaacttcatgaatagaggcagccagaaagagggaaaaaattggctttatttctagaacccccagcccataaattctctctaggaggatatcaaactactgagtattatatcatcagaaaaagcatttgtgggctagaaagatctcaggaagtggggaagccgatgcaggcagctgtctttagaaatgattaagaaatcaatcatttcaagggttccatgaatagcatgaagtaccatccaataatcacttctgtctgcatcaacagcttaagattttttaaactattaagattttgagattgcaatacttgtttactcttcagaagagaagggacaggttgggaaaataattaagtcttggatctcatctaataaccattttttttttatcccttgcatactgcagcttacttttttgttacagtgtttgcatttaaacggaaacatcatcgtccaggaacaaatgtggtcttttcatattatttgggagaacagcaggacttcagtgagttggtagcagtacaatagctcactcgggctactgcagtctagctgtagacatgttaattaatatatttctctgacacctaggtgattgaaatagcaattaaagagtaattaaaatgtttacttcttgtaggaatgtcaactaagatgtggaatatagcaattacctatgacggattagaggaagatgatgaggtctttgaagtaattctgaactcccctgtgaatgcagttcttggcacaaagacaaaagctgcagtgaaaattttggactcaaaaggaggtattcttttgatcctcatcttgaaatcaggagcggtcctggcgctgtagctcttgccttcaacagccaacgtgcttgataacaccttcaaatcaaaatgcttaatttcttgtcaagaaagcaccctcagtcgtgatgtaggccctttattctggtttctgcttcatgtggttttcctcctgctaagtacgatcacttgagaaaagcaacaagtcagtgccgtagttgtttttttcctacccgtttgttgttctcaccgagggggaaacagtgttggtgagaatctgtcgacaattattttccccagagtctgtagagctataattatctttctctgttaaagagcactcttaatgcctaaaatctgagcccccactgtagtgtgaccaggaaaattctaagagaggaaggaattggagaaaaatagatgtgaaagatgcagctggcttgggaatttgggagcagctggagaatattaatgaatgactttggatggcagcgccaaacaggtcctggattgtctatgctaaagaacaacctgtgaactaaataaaataaagaccagccagactctttggtgctctgatttttttccaccaaatgccttttagttacttgtctttttagcatttgacgagtgttcgtaccatactcaatcttacactcccatttttatacctgtcatgccctgtggtccatatttttttcttgcctggaatctattcccttctcttctctttcctactctataaaaaaatgggacctcccctcttttctttataatatccttgtttctgcaacatctctccccactacctttcctcaccaaatttatttcttttccagtagaattttctggtcacatgaagtacataaaatacatgatatacacaccttatatgtgaaatataaaatacccagacaagggttttgccctcaaattttttatgccttcccagaaatactaattggtgaggtttccaataggagccgctctattaagatttactgggtctttgttctacagcaactaagagaaaagttttataaatactacttaattctatgacatctttaaacaattccagtttctacctctaggaaatgattactttaaagtgcttgtggaataatgcttgatcagtgaataaacttttatgttggggaatactataataagagaagtgagactttccccccagtatatgatatgataataaaatcataacagtgattttcatttggggtttatgaaattgatttcatgactttataatcactcaatagatgtgcagacgagcacagctttcctggatgtaaactgatgaagagtaaaggagtttctggcaaatggcaaaaaggcaacatctggtgggaaaaccatccatctaggtttaatgacaagctgctccaggagctgtgtcaatgtgataccttatctgtttgtgtaaaatgaactgaccgcctgccatcttgcatgcctccaggacaatgccatccttcatattcctccaaccaaagcaagcacagcacatgggagaagggcatttggcatctgctgcccccagggtcttcctcatccaccacttctggttcctttcatctggaaagaagacctcttccatcttccatgcagctagcagtcatcaggggagacaccctgcggggctttgattctacagatctttctcaaaggaagcttaggacccgtgggaatggcaaaacagtaaggatggggaccttctgggaaatgatgtgcaaaatacatattaaaaggatcagaagatattaataagtattctgaaacactgaagaagctgttttgattctcatagtgagtgggggccatggttccttgcacagttatgcagtgccttctgtatacaaagatcttgaggctgccttgcttctttaattgtactgaggtgatagatatgctgattcatccatatgatttcttctttgattccttttgtgaccaagacaaatagggaatgatccatgaccctgaaatagagtgagatgaaatgatgcgattgggtgtggaagccatggctttgaccttattaacacagcattctaaccattgcatactctcatatgtgcacacgcgtgtgtgtgtgtgttcttggacctgtgtactatagatataccaaaaaataaagatgtactttttccctgactggaactctgtatgtgtgaatccacacaacaatcataaattctgattaggcctagtgatttttgaaattccaatgatttgggcgtgggaaatcttaagattacatatgttttgtaattgttcagacattagcaagatcttacttggtggttttaccctattgctagttattagtcaatccaattctgttcatattttgttctctgtcaatttcaggttcgtccatcctctgtttatagaaatggaacagacatcatctataatgtaagtgtagtcacagaattgctaaatttcttatatttatggatgcaagtatttaatgaagctattattttatattttttatatttatacatttctcttaaaaaattgttttgaaattagaggcttgggtgttcagagaaacaaatcctcttatctttttgctttgactgaatttttgaattgctcatttttttgtttgctatcttgatgtttgttttttccttattgttgttgattgttggtttcctcaagtatcatgggatagtttccttgaaactggaggatgacagtttcccaactcacaaaaggaaggccaaagtatccatcattagtcagccacaaaagacaatcaaagtggcagaactgcctcaagcagataaggtggaatccacaactgactcacacttccccagacaggtatgaaaatctttgttccttcttactcaccttataacaagttgtttgctgggccagaaacacacttaattcacaaaatagcctccaaggttggggggatagtttacccaacacaaatgcttcccaacaaatgaagacccaaaggaggtgaatgtgtgagcaactttccttaagtcaattctaaattgctaaattgcctttccttcccaaaggaccagttgccctcatttccaaagaactgcactctggaattaaagggactcttccattttgaagaaggcatccagaagctgtatcagtgcaatgggatcgcctggaaagcctggagtccccaaaccaaggtaggaggcaggctgagcagccaagcacctttattcgcaatgtgctctatgataagctaatagaggggaaccatctggtgcatgactcaacccatgctacatcttcctgccattgttaacaacttgaaggccaagaggaaaaaatggcccaaagtggctttttaaaaatcacaaaatatgttagttaaatcaataccatttaagaagatgtttacttattttgttcagttatcagagtgtcaaagttgtaacaatgaaacgttgctgactgtggtagtgttttctgtaagaagccattgtatttctcaagatggagaattgggattagggctgactccctttgtggtaaccaaactacttgactgaagttagggaactcgtaggactccttatgctgaaccaactccagattgtaaagaccattatgatatgaacacagacaactgtttttcaggatgtggaagacaaatcctgtccagccgggtggcaccagcactcaggctactgtcacatcttgatcacagagcagaaaggcacctggaatgcggctgcccaagcttgcagggaacagtaaggcaccctattgcacatttgattggtgttttcttttctctatttctctatttgctcatggaagcggagagctgcttcattcattcaacaagtattgagtgcctaatatctgcctggctttgttttaggagccctgagggagttccctagttcagaatggatttgtgatgggccttgataatgtatttggttggtgcaaaagtacttgcagtttttgccattacttttgcaccaacctaatatttgactgagctcttttctgttaaagctgcaccattgccatgtttctttttcttttattttcttttcctatctcagtctttgtgaggaaatcagaagattttctgagtcagcagcattgcagtttctttttttatgtgataagaattcctgcccatttaattgaaagtatatagtaatgaaaagccttataacgtcgggcctctagcaatgcgattatacagcaatgattataaagctgggcaagtaagacaaaggctcactgggtaaaagaacattcaataaaggataacttatggtcagagaatgacaaccaatgtatgtagtccagaaggactttaaaaatgcatatgtacctatccctgaccctcctttttgtttgccaatctggatattatctaaacaacacaattagactaatatgccctatggctggaaattgagactagggaagtctctggttattattgatctgatctcgtacttcataaaatttaaaaagttatacacatctaaagactccattaagaaaatgaaagagcaaaccatattcagaaaaagctgttctcaaatcataaacctgataaaggtcttaaacccagaaaatacaaacaacttcaacaaatcaatgacaaaatgacgattcaaacaataataaatgatttggagtcttcgcaagagtagatgtccagttggtcaataaataaatgaaaagctgctcaaaaccgttagatattaggtaaatgaaaatgaaaaccacaatgaaataccacttcacacctactagaatagtttgaagtataaatatgacaatccaaatttgtttttaatttttaaacttttattttaagttcaggggtaaatgtgcaggcttgttacctgggtaaatggtatgtcatggggtttgttgtagagattatttcaacatccaggtattaagcctattactcattagtgatttttcctgatcttcttcctcctctcactttccaaactccaatagaccccactgtgcgttgttcccctctatgtgtccatgtgttctcatcatgtagctctcacttatgagaacatgcagcatttggttttctgttcctgcattagtttgctacagataatgacccccagctccctccatgtccctgcaaaggacataatcttgttcttttttatggctgcatagtattccatggtggacaataccacatgttgctaaagatgcagagcaaatagaattctcatgtgttgttggtagaagtgtaaaatggtacaatcactttgtagaactgtcttacagtttcttataaagttatatgcatctaccctatgacctaacatattctactcctaggtatttaactaaaagaaataaaaatacatactaaaaaagcttcataaaaatgttgtataataactttattcataataatactaatttgggtcatttgttttttgttattgatgtttagaaatacttgatattttctccatcagcaagagaataaatttttgataaattattttataagtgatggaataaaatactgaagcgtccaacaatgtagataaatcaaaaatggaacatagagagaaagcagccctacacaaaagaatacttattatatgattgcatttatataaataagataatataatctatgttgttagaaataaaaaattgttatctttggtaagattgtggaatgactagaaaatagcacgaggtaacgttctaaagtaagagaagtgttcaatgtcttattgtaagtggttattaaatagatgtatatacaattggcaaaattcatcaaattgaatatttaaaaatctattcattttattatatgtaaattatacccagattttttttaaagcgaataaaatgttttaaaagtgtgttcaaaaactagttaaaccacctttttctctactggtgtatttcatgttttaactgtgagtagagtcaccagagaggttaatcagtggctttcagggtttttttggttgataagttggtggtatcaaataagataaaatattaaaatttttacaaataataattgctttaaatacatatatttccttagtgctacatgttaaagaacaaataagacattcttccgtcattaagatggttaagctgttaaaatgacatcttaactagatgtcatttagtttgtcgtaatgcactgaaagctccagtagaagtagtggtattggtctttttttctccttgaggaaagggctttgatgttgatcaaaagctatctaaactagcaagaagatgattgcagtatgcaacaaaagggagaatactatggtgtctctgcttacaaaattaagggaaagagtagttatactccagccaaagttatcaaggttaggtgattgctgggatttgttgataaaatgtagatgaacagaacttcccaccttgaagtttagaagctatcttttgttcatcttccaatggttcttaaaggccaatgcaagtaactggtctataatgaagctttcattggttcttaatgtatgagaaaaataaggacagtaagtattgagaaatatctttccattcagtcatggatggtggtgtcacattgccaagtgtgtttttttaaaggactgttctttattacgagattataatagtctagctttttattgtcaaaaactactttttatgaaataatagcaacttataacattgtcgatgccctcatgttgacaaacctacatcagtctcccatcatcttttgttttcattttattgttccatctattaataattgtgactaggttctattggtgagtagcaatgagttcttcacgtatctatgaatactgtaccattcgatcatcacaataataaacttaaggcctaaattaatttaaaagcatagatactttctcatgcacttaatctaagatttcatctgcagcttggttttaagcaccttcacccatgacccttttatattagcctgactgtagttctacatgcctccttgtcaataatgtcttacttttatatttatagtatatgaaattgtttcacatgcattagcttattggatccttccatcacttctcttatctacagtttatggatttattttaaaaagaggttcaaggaagcgaaatcacttgctcacaggtatacaaggaagtaaatgaaagagatagaatttagtttttcatccttatactctctaaaacaggtcccctaagtatagcaggtttctcatcataggtgtactgacaagtatgtctattttaactatgttttgaggtaacccaaagtagattttcaaaattatgtgttaataattgtttttctctcactgcaaacacatataagatttttattaaattatggatcctaagtttcctctggatttgaatcaaactaacctttcaaggcgaacctaaggtatgatcaaattcctagtttatagatacattcatttaacaaatatttctgaaagtcctttacagagggtcattcacaacacccatatttccacaaggacagcaaattttgctttatcctttgtccctaaccagattgctaactcaacttaatctttatctctagtcttctttcctccccagtggtgttttattatttttctaagtcaaaggagccagactcctagattatgcacttcttgaatttacatgttgtaatctcatctgctcatttcctcaggcagtcattgtacatttggtaattatattattatagagcattatctatgaagccattttgttttcccgcaggagtgtctggaacccctgctggcctatccttagagttaccctgaagtctacctatacttaatcaaaaattttcagagaagtagatgtttatttctatagccagaaaaattaaagcttctgtttctaattctatactacaaatatttgtgtatgtgtacctatttataattttatatccatatatacacctatacagataatacccaccacattttatatgtatgtgagcataaaataaaaggagtgatatttttctaaaataataaacatatgaatacctaaatgtttcttttgcgaataactatgctcttaacattttacctgtcttgaagcagagctatcttcccatctcactcttttggaacttcttgctttctggagagtcaaaaagaaaaccgaaattgtacttgggcagctaaaatggattttaccaagtttgttttaaagatagcttcaggaatcttcaagctagagaagatgttaaatatccttgaataaaacccattatatcctgatgctgaagttgaggctgcaaagttagggaatttcagtaagcaaattagttcaataagagaattagggaattcagtcagggaattaaggggtaatcaggaagtagaatcctagtctctcatgctctgtacaaaatgtcatagtgactgggacagtccctcaagccctccctcagcttatatttaacccaagtttcatattgtgtgttctaagcctacagcgctttagagtgagcgtgttggatgtgttggggaggggaggagaggagatgcctcatcatacctgctgtaactgtcagacaggagctgagagtcaataatgaggtcagagccaagtcacaaaacccaatccagcggtctaaggccattcagtggaggggcaaagagccttatatatctaagaaggcctagaaatcatcattgcatcagacagcagcaaaatactgttattagtagagggaaatcctttaaaaatagacaaattatgttcaccatatctagtctggaaaagcagagaaatagatctgaattttgaaaagacataggcaaaataaataaaattaaatttaacagctatctgcccgaatgtgttgctaattttgtttcctacttttcttttcatatcaatggatattaaccaggcaaaaagatcatggtgatttaatttttttccttgtttgattttttaagtgtttaaaattattttttaaaatttaattttatgtttaattgacaaataatacaaattacattgtagggtacaatgtaatgttatgatacatgtatacatgatatatttgtttcttgtttgaaactttctgttttttttatttttaaagaagaaagaattacttagtggcttcttacttaaagcatttttaaagaggttttaatgagcactgctggggaattaggcacaatcaaatatcgcttctaggaataactcagttagctgcaaaaataatttataaaaaattctgttttgtgaaaaatattttacatatgtttgtaaaaacaagcactttaatttctgtgcattatatgaaggtttgacagttggggctatactcatttcattgagtataatgaagtcataataatgtgtttatttggctaaacccactaagctccaaatttaaacctgaagtaattttatctaaatagttagtttgggttaacttactcatcaaattaacttggtatttgccaaatttataccagctagaaatacacttatgagaagaatagtattttgtcattaaataagtaattgttataagtaggcagttgctgattttccaaaaagatgtttgaaacctactgtttatgtttgaaaacctatcgatgttttttgctgtaaagcccagatattataataaaccatcactttctttgatgtcacctacccccaccctgcagatactttttaaataaaactgcactattaaaatcttagaaagtttttttaaagacctacttttttgtgtattttaaacttacttttatttctgttatgcatttcgtatcagcagaaatgttaactgcttgttgctgatactctcattttcatttgcatttagatacctgggcaaccttgtaactgtattctccaggcagcacatgcggtggctctgggacattggtgggagaaagtccttttggataggcaagtatctgggagggaggctgcactgaggagggaggcaaggacatgaaacaaacaggcaccaccaccctgctacttccttccatgggttaaatgatagtggtttacaataataggcaaccaatagatctagccatttatcttttaaaactcatcttaaaccttttttttgacacactactttcatttttagacatctatcccaaagaaataaataggaatgtggtcagattgacaggcaagagaattcaatgcaataacatttctaaaaccaaaaaattagaaattgctataactaaagaatggttaaataaattatagtacagccacatgaaggaatatgtaagatttaatgtttttgcaagccattaaataataaagacatgaaaaattgccttacgtttattaattcatttaacaaatatatgttggatgcacattatattacatataaaatgtaaagtgtattccatttatggcaaggtgcaaagtgaaaatgcagggtccacatccatataaagtatgaaataatttagaataaaaacaattatatgcatgtggtgtatgtataaatataaatatatattatatttgtatatataaatatatataatatttacatattggaatatatacatatattcatatatatatgaatatatatatatgaattatatatatatatatatatatatatattccaaataattagaaatgacttacctccagtcaagaattataggtaggctgggtatggtggctcacgcctgtaatcctaggactttgagagaccaaggctggaggattgcttgagcccaggatttcgagatgagcctaggcaacatagtgagaccttgtctctgtgaaaaatttaaaaattagccaggcatggtggcagctaacagtagtcccacctacttgggaggctgaggtggaaggagtgcttgaggctaggaagttgaggctgcagtgagccgtgattgtgccactgcattccagcctaggcaacagagcaagaccctgtctcaaataataataataataaatataggtgattttaattttattccctcttttctgaagtcttaatattttctacagttttaacaataataaatcttttttttttttttttttttgagacagaatctcactgtgtcacccaggctggagtagagtggtgcaatcttggctcactgcaacttccgccccctgggttcaagcaattctcctccctcagccacctgagtagctgggattacaggtgcccactaccacacctggctaagttttgtatttttagtagagacggggtttcaccatgttggccaggctggtctcgaactcctgacctcaggtgatccacctgcctcggtctcccaaaatgctggaattgcaggcatgagccaccgcacccggccaaatgacaaatcttttaaaccactttaaaaacagaattttcagggcgcatcaaagtcagtatccccactacttctctttaaaggcgttgtatttgagggaactgtaatagttccctctcttggctttcactatttctgcagtgctcagtgggtccctaaattctgaaatgaactgagtattaagagacaagctggaggataagttttctctacatccataatgactcactgcaaggctctgtcctcacaatatgcttaggcagaatgtcactaatcaataattcagggagggcattcctaaccaaaagtatttcatttcattccacccaaaaatacagactgaaaaacagttggggaaggtaaaatgttatgtatctaggactgttttcatggtcaaatttgatttggggaatgtcggatcatgctatggcagggagttcctttctcattttattcttttttatttctattatgaaagagagtgagtaggggaatgcttaagaaaatattacagaagctttacaacattaaagtgtaatttgcaaaatttgccagtggaggtagagaggcaagtcgagaaaatctgctttttattggaattgtagcagattgaaacatcttaagctccagactcaaaataatacatagtaagctactttcaaatatgaaaaccaggacatttaaataatgaggaagaaaaataatatgcaagagaatatctgtttccctgtgataggagttctgcatgtaggatgatatgaataataataatagctgccatttattaaacacttatatatgccaagagctttacatgcattatcttttttaatcctcaaaacaaccctagatgtactatttttatgcccattccttagatgaggaaactgaaactcagagaggttaagtaacctgcccaaagatgctcatctagcaagtaagtggtagagctagaattggactgggatttgtttgaccgtttgtgtcttagagtattccaagttcctatcccttgttttagaacctgggcccacacttgcatgtgataactgagcttagagcaacagctggatatgatatctaagtataaacgcaataaaagtaattggtacattcttttggttcacattaggtttgaacgaccaagtgcatgctggccactgggagtggatcggtggtgaacctgttgccttcaccaatgggagaagagggccctctcaacgctccaagcttggaaagagctgtgttttggttcaaagacaagggaaatggcaaacaaaagactgtaggagagccaaacctcataattatgtgtgttccagaaaactctaa

SEQ ID NO: 15578 - DNA, 42382 bp, Homo sapiens
agtctgcagggaggaaagtcagaattagatattcaagatggccgcctctgatggagtccctggcactcactcaagcttgcatttgggtttgttgctcctggtcccatctctccccttctttcttcttccttctctgctgatatttgacatacttttaatagtgcacaatgtctatagctctacaattaatgctaatgctaaaaatacacgtcctttggcttatatttgcgctaaggtaccaatggctgatttaacactctccacagagcacacttgatacagggatctggtaaggaacagagagccagtttaatgtgaaacagggtagaatgagaggtgtgaaacatatttctggagggggaaaatgggaaaaagggaacttggaggcactgagggagcacctagcctccttcctattttattgtgggtcagatgataggatctggggggaatatgaaaaagtaacagaaaaacaatagaataaaggcataactctgttctcaggctctgcctgagaaataaagcataattttatacctaaaaatgtatatcagtttacttttgaaactgtgaaggtgactaagtaaaaagtttgaagaacagacatatttttctaggttcctttattttcttttttaaaattatttttctttttttaagatgggcttttgccatgttgcccaggctggtctcaaactcctgagctcgagcgctccacccaccccagcctcccagagtgtccaagctataggcgtgagctaccgcgcctgacttcctttcctttccttcccttcccttcccttcccttcccttcccttcccttcccttcccttcccttcccttcccttccctccctcccctccctcccctccctcccctcccttccctccctttcctttcctctttttttttttttttttttttttgagacaggttctctgtctgttgcccaggctggagtgcggtggcacgttcatggctcactgtagcctcaacctcccaggatcaagtgatccttccacctcagcctccctagtagctggggctacaggcacgcaccacacccagctaaattttgtattttttgtagagaaagggttttgccatgttacccaggctgatattgaactcctggactcaagccatctgcccgccttggccagccaaggtactgggtttacaggtgtgagccactgcaccagcctcttttattttttttaataaataattgatttttataaatgcctcatgatccagtaatgaaattgcccaatttgttaaaaatatacttatcaaaggtttaattttatgaaaggaaaactgattggtttgttttgagaaaattatgtgattttgctcaatctataattctaaaggtaactgaatacctttattcaaggtgtaaaaaatgctgctgtgggggaaatgtatgaggtttcattctttacaagtcgaggtgtgtgaaatgtcaaaatttactttatttgttgtatttcacttagcaattttaactttttggacatagatttctttttctttgcatcaaatcagatatattttccttgtcaacagtcttattaactagataattagaaaactaaaaaacttcagcatagccttcaaagcaatatcagtactcagccaaactcatctctttttactttttgtctaactgccctccctgagtccgtggtcgcaggcaggctggttgactcgttgctttcacactatctaatagcttcaggtttcttcatgctcaaaaggatcaatgctcaaaccctgaaggacaagacacatttcacaaagaataaagggattgttagtcaaatctgccagatttgtaaaataaatataaatgccataccttctctagttaaaaaagaacttccaaagaaaatatacaatttatatatgtatataaaatttatacataaaaatgttatgtatagtttatacattctacgaaagcattagttttagaggtttttgtatcggtggaatagaagagtgcatcctctacgaatatttccagcaactatggtacatggagaaaagctaacaaggcacaattctgtgattatttctaagtacatttctttggtgtacagtgaatttgtcagtcccattggatagtaacgatttcctaactttttggagttttaatattgtgccttgtttgcataatttcatgatactcttaatcttattgaaataaaaattacatattgtaatgctacaaagatcatttaaatcagtgttattgtgaaattggcttcagtaggtagaatgtgatttcatgatcaatagaatcaaaagcacattaagatatcacaaacctaagactgtaagaaagattttgcttgtctcaaatgtgtatcatttcagctttctttttatagttttgcaatggtgctcaggcaccacaactcttttgtggtggattgctaaaccagaatttgttttaaactctgcaagagtagtgggtgcagggattaaaagacctgcattctagtctcagcttcatctcctacctgcccttatgatctcccaccaactttgtgaacctttctttgaagcaggaaaataatccttgtgtagcataactctcatctgtcttatagggggagaaagtgcagaagcacatgtaaaccataagagattagagcctcccgtcatattttagagttgggtggtacttaatgatcttctggtccatccccttcatttttcagagccatggaaatgaggcctggaaggggaagatgatttaagtgagattacatgtctgagaaatgtgatctgctattaagaaatttaccataaaaacgtatgagtagaatgaattagctaaattcaactcatttagcactttattgtattggcctcccagttgtcagacttacaactttagtctattacacaccaatgaagaaaaaaacaattgaaaaattataaataaataaagggggtatactcttcaaatttgtatgatgagtctcattggatgtgaaatttttatttgcgtcaaggaaccacattaagcactgatgagcctgagaaatatgattgtcagaatttccctgttccatcacatgggtctgtcattaatgttgttgggaaaatattcttgggtgtagaatggtccatttatgcattactctagtgactggtttaatgatagggatttttctgcaagatctgcccttgatttttcatttgagtcacaacacgacaataccctttagtaaaggtgtgtattgttatcatttcattccagtagatggtgacacaagaatccatgctgaaggctgccttgcctctctttaccagattcatcatcagcaatggactgcggaccgagcacggggtgtttgagatcacactggagactgtggacagagccctgcctgtggtaaccaggaacaaggggttgagactggcccaaggggccgtgggcctgctttcccctgacctccttcagctgaccgaccctgatacacctgcggagaacctcaccttcctcttggttcagctcccccagcatggccagctctacctgtgggggacagggctacttcaacacaatttcacccagcaggatgtggacagcaagaatgtggcctatcggcactcaggaggggactcccagactgactgctttactttcatggccacagatgggacaaaccaaggctttattgtgaatgggagagtgtgggaagaacctgttttattcaccattcaggcaagtatgaaaaacacagttcatttgccagagatgtgaaaacagtgacatcgagaattttttttttttttttttttttttgagagggagtctctctctgtcacccaggctgcagtgcagtggcgtgatcttggctcacttcaatctccacctcctgggctcaagcgattctcctgcctcagcctcctgagtagctgggcctatagtcatgtgccaccatgcccagctaacttttttgcatttttagtagagacacggtttcaccatgtcagtcaggctggtggcgaactcctgacttcaaatgatccacctgcctcggcctcccaaagtgctgggattacagtcgtgagctatcacgcctggccaagaactattttttaatttcttttcctctttcattcaagtacagattatgcatctacagcaaaacagcaatattaatatgaatgaaagagatatggtcccctcataggtgctaatgactgaccgtgagtgttgatggtagcacagaaaggagcaaaagccacacgctttggagtcagacagacctagctttgaatttctgctttgcaatgtattagccgtctgaccttaaagagttctttaactcttctgaatctacttttccttctttgaaaaacatgcctacagcattgtggtgagaattcagtaggattaggtatccaaagcagtagtatatggcctgaaacatatttgatgttgaaacttacaaggcagcatctttacactattacacatataataatgatgagggtaataatagcagcaattgcagttcctttagtgttaactgcaagctagacccactccacataaatcttatttgattctcataaaactcatatgaagcaagttttgttatttacattttatagatgagggtacaagttcaggagttaaataatttgatcaaatacacacaaaggcctcaagtctttctgatcccaaattctgtgtcctttctatgacactacactgccacatttgttgactgttacaaggattcctggagggcataatgtgtttttcttttttaagtcaaaacacatcaagtatattctggctctcaaacccttgaatctactctccttggaagtagttcaccctcttctacacactcacaccaaacacaaaatagataaaatttatctctcacttcagaatactttctgactagtaaaatagttacatttttccttgctctgagagagagagagagagagagagagagagagagagagagagagagagagagatttattttaggaaattggctcattggctcatgcaattttagggcctggcatgtccgaaatacacagggcacgttggcaggctacaaatttcagcaggagttaacgttgcaatctttagcccaaaggcagtctggaggcaacattccttcctttttggggggcttcagtcttttctcttaaagcctacaactgattggttgaagcccacttgcattatggagggtgatctctttactcaaaatgtactgatgtaaacgtaatcccatctaatacacaccctgcaaagttgacacatgaaatgaagcctcacagactcttatctatgagggaagtcttgagatcatagagtggatgctggatgagtccttggcagtcaggaggtccaaaaaatgcaaagaaatgataatgcactgggagaagaaagaagatattgacatcgtgaacacagtaagaagcactttgtattaaaattattgtttttatttttatcatatgttttaattgatcttagtcactttcccttttcagtctgttagtgtcttttttttattcctaactcccctaacctaggttgataccagtctctgtactgtccaaccagggatacttttctgggtctctttggctgcaaattcatacgaattctaaattctgagtgcagatgttagagttccttcctacactccatagcacagatggaaaagaggatggagattggggaaagtaccagaacttgaatcaggtctttcccaacaccaacactcatcttaaagagcatggctattgtaagagagttatctattggaagttgtggaatttactgataggaaaatgttggacatatattgtaaagtttctttttttttgtcaaaagtataaggctttccttgcaaaaaaaaaaaaaaatcattacgtgtaaaaaccccacaaggtaagcttcaaaattcctcccataattccccagaaccctcagtctctttgagcagagaagtcaagaggctttagaaagtgactgaccccaccagcagtgtaggagagatgacactcagtgtcttgccttcaagagctttttctgccaagacaatatggatgttgatcaccgttgagtgataaactgtcccaaataagtctcccaactatgggtaaactattcttctggtggtacctgagtaattgagggcaaaactgctgcaacacacaggtgtatttgactgataccagcaggcacaacctgacattcatttggtaggaaatcttttctgtctgaccaagattattgcaactgatgcaacctgtacttctcctttaaaggggtcaggtgagcgagaaaaatgtgatgccattgctttctgtgcattttctgtaaatacaacacaagttatcaggggacagagctttctttaaaaaaaaatcttgcaacccaatatttaaaaatgcttctgggatactaagccagaagatctacttttgacaaagctagaagttgaataagatctaggatatattttaatgtgaccagagacatgacgggaccgtgttgctagagtttagatgtccttttaaaaacacatgatcacgacaggcatttattacttttgtaacactttcatttttaaggaattataacatccaaaaccaaaataaaacaaccatctacattcaactattcatttagtatcaactctgggtatttcttatatggcttagaagtactttaattttcctcttcttccactaaccatctctcttactggccacttggttgtgggagcttcttccctcacgggccacaatgacaatttaatacccaatctcattgctttgaaagttgccacccatactcttcaggagaggagaagaatgactgtgacttttgaaaatgtcagttgctttttcagtttataaaataactatgtattgtaaataattcataaactacaagaaaaaaaattcttgacaaccataccactcaaaaacctattgttggtggctttcttttattttgttcaattagaaatgggatgatattatatatactattttttatgcatattgcctgtttccatcttcatgtgttatgaacatttccttatgtcattaactattcctgatagttcttgataactaatcatattcctgataacatgatttttaaaggctgcatggaactcagtctcaggtcgagatggtttataaatcccctggtggacttttcattccttttgtaaattgctattataaatagtattttggtgaatatatatctaatcatttttgcatacatatctgtttctgcaagatacagaaaaattttcactgttttgcacccctaccagcaaaatataaaaatatctgtttcttcacatatttatcatcatgagttataattatttctgtttttttttaagaatcttgccaatttgagaggaaaaaatggttggttgtgacaaaatttctcatgaaataaacagaggaggagttgtaatctttccccaccccaaaagaaatgaacacatttgtgcaaatgctcccagatttttgcctatgtctatacaaacattatgtatagataaatatatatttttaacaaaaatagtattataattatattcgaattctattctgcaacttgctagggtttttcagttaacacaaaattgtggaaatttttcatcatcaattcattttctcccttattcttttgaatagctacagagtagttcattgtatcataatacacaaaaatatacatggtcttatcattgacaagaattctttactttgctagggcaaactaagatttacagtagtatcaggttggtgtaaatgaaattaagaaccgagagattaggagtgaggggaatgaagattcttgtacatgttttctagtatcagtggtggatctgttctaatccatccaaacctgctccatccataacctacaacagtcatcttgcaaatgcaagatgcactgagctccgtacagactgaacgaggtcctttgttgtgtttgaacctacagtgtaggttgtgaagatgtcatccaccatcttcacaaatctggtccacctgttcagctacctggctctcatcttcaatgaaagaaatatgcaaatgtctagaaataatcacctttcactttttccttactgaggtatctctatttttattcaacatttttgccagttgaaaaaagacatgccaaaaaaatttctatatatttgtaaaccctcacaattttgtgtctgtaaatcactaaataccaggaaaataggagaagttcttctgtggagttaacatgaagtctgctctagaattcttgggtcaattttagtgtattcatttaatagacattccctgggcttctattatggttcaggcactgtgccaagtgcagggaatccatggcggtgaaagacctgacgcctgccctctcggaacttgtatcctaagtggcagtcaagcaatagacaaattgataaagtggagtcaaggtttacagtggaaaattggcctctgttccaagcactgtgatatttgctgaggctgttgtgaacaggactgtctttagcaggaatccactagtgaggagtataaggaatccaaaacgtgggacagtgtgtcattgttgaaccaataaagcccaacgttgcatgggggtgaggggcctttggacaacattttatgtcattgttgatgatccaggtagaccaattggacaaaacagctcctcgtatcacactcttgcattccccttctcaagtggggctcctgaaaaatggctgctacgggatttacatcacttcccgcgtgttgaaggcatcagaccctgacactgaggacgatcagatcatctttaaaattctacaaggcccaaaacatggacatctggagaacacaacaacaggtactggcctccttaatccttacaattgccattttaaaatacccagtggctggcagggctagagagtaatttaattaagtgcaggcccatttggtaaacactccccagggcttactgatagatgcagtttataaatcaatattgctcctaaagagggtttgaagctgagccttcctaaatttatcctgactggaagaaccaaatactgatatacaactgtttatttatattttttttctcaacagctgattataatatattcaaaggaacataatatcaggaccaaatttcctatttgtgactaattttttattctgtcatgaattctaaatgactctaaatgatgtcagatctttttttaaaagttcttggtttttttcctaatggattctctggattgtatattatttctactttatgagcacaatgatcataatacatcattaaacaggatggcaccaagttacagatttttattactgtatctttctactctccttctctttattttcatttttttaaggcaaatatttctgaagcagtcaacttaatgcctaatttaagctcgctgcatttgagttttaagatagttacagtaatgttaatttcttgttttaaaatgtactttagctgttttttaaagctgtgtttaaaataaaatagccatacaattttattagcttttatttaatgttttgtttgattacccatgatattcatttatttctttttttaggtgaatttatccatgagaaatttagccaaaaggacttaaacagtaagactattctttacatcataaacccatctttggaagtaaattcagataccgtggaatttcaaatcatggaccccacagggaactcggccactcctcaaatgtaaattctcttgcttattcagtagtcctatatgttacatccataatgtatctgaatattaggaaagtgaaatgttctttttaaaacagaacccaagaagataaattaatagaccatttcacaagctcatggaatttattttggagaatgaattttctttttattactgcttgaaaataggaaagccagtagctttacagagtacagaaacattaaaaagctaagttgacgttcatattatgcatgtcaaggtacacacttttatacacagggagggttctgtcttaccaattcactagcatccaacactgagtttgcaggttcatgtagcaattgtgcagcaagaggtcactctaggaccgtgttagcaactatagccttctaaaatatctgcagtcggggaaatgaggtagtcaagaagagttagccaaacatcttctctttctcttatgaagaaaattacaattacttgacagtatgtttataaggtgataaacttatcccatgtaagacaaatataatgtaaagaggaaactagactttggaaggtatataaagggtatgaccctcaaaatagcaagagtaacaaatcttcaaaattaacgagattaacagaccacagcaatttcactgactgggtccctactctagacttttcttgaatgtagaccttgaatatcttaccagctaacagatagtcatagaaaggtcggtcagagtccagttattctggtactgtgctgttttttgtttgtttgtttgttcattttgtttgtttgtttttgataccctcccagaaaccccaaagaaaagttgttcacttatccttgttttagtagtcaccatatcctagtcatactaagcatcataagtgatacagctctgtgctctgttatactccttttatgatggagtatagattaagaaaagaaagctgagaaactcctctgcagtcttcagaattcttgcattttcttttggatcctgaattgtagttctaaaatctgaccagcagaggtcacagtagtcattgtcagaaaaaagctagcctccttttcttagcaaaacacattcccagcgtcccactccgttgcctcgataaaatgcagagcctggcccagatttattaactccacagacttttatcgagtggctactatatgccaggtgcacagtactaggagctggggaataggttagagcaaagtagacctggcccgtgatattaaaatgtaatctcgagattacaaaatgtaaaacatatgacctccacccattaaactgtctttgcctaagacaaataattcccaggatcacaatctttatgggaaaatatgtcaagtacttgcaatgtcagacaaatatcttccaattctcaagaaaatgtaaaaaaaaaaaaaaaaaacctgctccaaaaatgttaatacgtggacttcactttttttttttaacattttaaaaataattcaagtaagaaaacataggaatgttgatcagacttgctactgacctaatgctcacctcttgtcctccatgtgtgagcgcagtgtagctgacagaggattttcttcccccagtaatgatgctaggctgatactgcttcacccatagcccctttcaatctttgtcactatcaaggacattgcttttggaagatgatttatatttttaaatatactctcaaattcatatgagaattacagcaaaatttgcttaatttaattataaccttaaatgaggccatttaaatatcctcctgcttttgttggctattaactttcatgtgtctgtgctggagatgtttccagttcaacttgacgtaatttgttcatttgttcatgactgaacaaaatgctgtggcatatgcctaccaaggggtaatatagagagaagttttatttggttctgacatatattaggctattttctttataagcgatgggggggtaaaattactcagcatttatcatcatcatttttgaacggtatagttgtcctcaaccccatttgtaagcagatgttattggaactaggtgcacaattttccagtaaaaagcaaggttatgaatagtggttcatcttcccaagacagccaggcagaacgtagttacaggtacaatataaattacagccatttgcaatataattggtgtttgctctatttcattgctattcatttaatcatcagaaccacctatgagtcaggtaccatcataatctgaaatttacagatgagaaaactgaggacagagctagaaagtgacttttctaagtggaaatgcagctttagagtgcatgatttttctcagcacactgaagaacttcttgcccattttaaggactgtgctaatctggcctgaagggaatggaacaccagacttgtcttcttctttctcttcagacattggccacccaagcaagaaagaaggaatacttactcatataggaccttaaagttcagtgggattttttaacatgtacattatagatctctatattagtgtgcacttcgtatctaacacactagaatttatactatagataataaaccaccgaacttggagctagaggacaaggtttgagctttggctctgcccttcatctagtaactgttcaagccttagttatctcttctgtaaaatgggagcgatactacaatttgtttagaaaaacaaaagaaatgtgtaacgtatatgaaagcatcttgtgtatttaaactccttaacaaatgcaacttgtggtgattactgttgtagttaattcatgtaggtacaataattgactgaagaagtatcccggaaacatttggtggattagaaagcctgcctctaattagaaattgatcctgggatgaatcacaaagtgaacagtcaatatgcatattaatcaatgagctaaacgctgtggaactttgtggtgttctttggcttagacaggattaatagattcatattccccatatttgaaggggtgaaacctctgtgataaagctcaagggactgcggggtgccatctggaacagaaatggacctgttttagagcacgggaaggacccatgttcagtggaaaattcagaatcttgactgttggtcagttttggctattgcaggattcctgtggagtcctgaaggatgaatagatgctccactctaaaaagcattaggaaatgcttgtttcgtgagattcatcaagttactgccagctagctagcttgcgtgcttgtttaactgcatcacatcctggaatcatcgagatgtgcgtgtggattgggaatctctcagaaatgaagcctacgcagcaaacctcaacccaactgggctatagaatcacctctctctacctgccaccccacacacaggcagaatagctcagggaaccaatttttcatggaatgcatctgggagtcactttattgtaaatagaaattattttataatgctgatatccttggaaatttgcgtaaagatttagatttagctaagtgcctacatttcaggcactgtgctaagtgttttcatgagttgtctaattttatctgcaaaacacaatcctctgaggataaggaaataaagctcaaggcttttaagtaattatcctgaagtcactggagagtgaaccctgacctccagacctaagtgagtgcgcatcttattgcctcaccccctggctgcaccccttgacaagcttgtgcctgttttctagtccaagttgaatctccaagatgatccgcagaagccccaaactaagttacacaggacccacatcattcatgaaaagcacttttgtggaccacagaatgtggccaacttctgaccaaagttgttttcctaatacagcttctacgtggacctctttcttgtgcccactggagaaaagtgaacttcaaaagcaatgttgaatgcagaagtctttgataattcagtgactgtttctccggttctgcactctgattcttcacctccctctggcaactcacattctaactgttctgttgtccatttttggctttaaaagagaagggacagaagactaaaaggaatttccatcaggcaaacgttgcaatgtttagcagcttttatgaaacacctgataggggaaggtgtttggctagctaatacctgcacattacctgcaagccaggagttaaggtttttgtcttcagactagatcttaggaaagcacagaggaagggaaggaaaatagcatttattgggcacccactgtgtacaggtgctttatacatactaactaattttaattttaatcattttacatgagtgtaattctcctcatttttaagataatgaaaaccgaggcccagagagactgagtaactgaccgtaatcacacactaaatcacatactaatcagtggttacaaggtgtgcttgattctaaagcacttgttttgggtgcacactatgctgcctcttggctaaacactgtttccccattatcaagagaaaaagagaaaaatgaaaacacaggtgttcatagcattcgattacggagtttaatagcatcatctatgaattgagaagtcttagattggatacttgaaaaaatatttttttaacattttcaggaattcttgtcacatgctacttgattataaatgaagatatagttataaggatagtaatttaatcacaattttagcttctgtaaaccttttgctgagaagctcaaaatacttaatgagaattcatgaaggttcacttaacccctttgaagtacagacttatcattattgcattttgtaataatgacattattataggaagaaaggaaactgaggcatagacaggctaaatatctttttcacagactcttgttaacctggattaatgccccaattcctaaactggtgatttaactccaggtatttctttcagcttcttgtttcatcataaatgaatcaagtagctagaaaataaaatatcagaaagaacatatttattactccaggaccgggtgtctcaacattggcactataggcattttgaaacagaccattcggtgtcacaggggagtctcctgagcactgcagaacattcagcagcaccccaggcctctctcagctgaaggccagcaccatcctcttcccagttgtggcaacgaataccatctccagaaaatgccaaatgttaagaattacacgcatgccttagaaaatagcatacatatgttttaagaaattatgaattatgttagaatgctcatttatcaatgccatctttctctctatgctaataaagcctaacaatagtcaaagaatccagaataagtcagggctagagaaaacatgtgaggatcatctagcctagcaattttttccaagtgtgtgacagatgatgttagtaaggttggggagaaaaatattttcgatggttgtattagtctgctttcacactgctaataaagacatacctgagactgggtaatttataaagaaaaagaggtttaatgaactcatagtttcaaatagttggggaggactcacaagcatggcagaaggcaaaaggcaagtcttacatggtggcaggcaagagagaatgagagccaagtgaaaagggaaacccctcgtaaagtcatcagatctcgtgagacttattcactaccacaagaacagtatggtggaaaccacccccatgattcagttatctcccaccaggtccctcccacaacatgtgggaattatgggagctgcaattcaagatgagctacaattcaacatgtggggatacagccaaaccatatcaatggtcaacttagctcaggagacagtgggataaacaagattcattcattcagttaacagatatttaatgagcactcaccatgttttagatgctctacaagacacctgggttatcacaatgaaccaaagacctgtgcttccttggagcatacataggatctaaatcaatgtgatagcatgcttgctgtacgtggtacatgctctggaaaaatgaaaaacttgaccaggagcagggggatcagcaagtgctgtgtttgggaaagacattgtgattttaaattgggtgtttaaacaacatttcctttacctgactgcttagagctggtgagtgacagagggacctgaagcctcacaagttcaaatccaattttatttccactgctccatgccatgtcttccacttacaacagtggttttcagggatccgaatttatcttcacattgaaccagcttttgctttcttttttttgagatggagtcttgctctgccgcccaggctggagtgcagtggcatgatctcggctcactgcaacctctgtctccaggtgaaccagctttttctattgtgatgaacacattaaaaccgcatatggaagaagttctcaagtgggggtgacttttctcccaaggagcatttgtcaaggtcccgaaacagttttggctgtcgtgactggagggaagtggtgctcctacatctaatgcgaggaggacagaggtgctgctaaacatcattcccacacaggacagcctcccgcaacaaagaattgtctggtccaaaatgggtgggaaagcctgacttagaggcttagggagttttcccctcctgctaaatgacttgaagcgattgccacatgggttacacataaaatgtgtccatggcatacagttctgactgtaaaatgagcgtcactcaatggtgacaggaaactggaagcactgttaaaatgggaagatatgaaccaatccttatctacatgacacctacacatctagaactttacgaatttctctcatgggctcctggatctggacatttacatgatgccaggcatatagctgtgtggcttcttgcaggcaaaattcccaagtgattgactacatctcttatttttcttccaggtgtttgtgtacagtttaagcaatcacagtctctgcgtagaaagatcttctcaaatatactactgcaaaaagcaaaaaaaaaaaaaaaatcacattcaaaacatatattgtacatattctgtgggtatgcaggtcctttgctatttagatatttttctcaaaaatatatagcctggcttaaatttcacggcttttcaatagctctttattatttgtagcgaataattttaagaaaataaaatagagcattgtgtaatgaccaccttgacctataaacgttatgcagcattcaaatggtgcatcagggaaatgcatgcacattcccaaacagtaagaccctttataccttgaagctgaacagccctctgaatggttcccttctgaatttagatcagaaatcaaattgcatttagcttttcgccttgaggtcaccaggatctacagaatgacattgatggatttttacttgtcatggttagcattagcaatggatgaattctcagaagaattggacattgaaactcatttgaaccctactgatggctgaaatccatgcaaatgtatttgtttcattctttcccactgtcctcctttccttcccatttcatctttctctcttttcccctaatccatcttgctgactttttttttctttctcattcaactggatccttttgggattctttgcaacatatttctattggcatttatgatatccttgttgtttgttatcttgtaattctttaggcacacactaatccctcctatctgtgggagatatgttctaagacctccagcagatgtctaaagtgcaaatagtattgaaccctatgtacactgtgctttttcctgtactgcacatacgttgctaggataaagtttaatgtacaagctaggcacagtaagagattaataactaataaaatagaacaactatcatgggatgccagcatcactactcttgcactttggggccatgattatgtaaaattagagtgacttgaacacaagcactgtgacactgtggctggcagtcaatctgataaccaagccagctacagagtgactaatgggcaggtagcatctactgtgtggatgtgctggacaaagggatgattcttgccccaagtggaacagcaggggatgatgtgagatttcatcacactactcagaacagcatgatgtttaaaagttatgaattatttgtttctgggatttttcacttaatattttcagatcacggttgaccacaagtaactgaaaccttcagaaagcaaattgtgaaaaagagggattaccgtagtcatttatttctgtttcttgatctgtttcatgcgagatttaaattcagttgcatcagagacccataaagtttccaatttttttaatacaaggatcctcttttcttgtttaaaattctattaatatgaagtagcaataaactcaaacaataaattttaaatctgactgaataaacaggtatgtttatatagattcatgagcccctgtaataattccatgctcttaccctacccttgccccctagcccatgatgctcagctatgaacctacactgttgagtttatctggctcgtgagcttaatccatagaacgtgattatgacacatgatcagtgtggacacagtggttatttgaagacaaacttcctccctaatatgaatggccccaggaaagcctggagagtgtgtgaaatatgtgaacacatgttccatatggtggcacccagaatttctagttccacaaaaaaagaaagaaattataataaataaacttaaaagtaaagaggaaagagtctaaatctgactagaggtttgggaagtacaagtaaggcaaccactaaggattttgtaaatctagaataaaaggcaactgaataaaaaacaatggaggtgcagttaacaatcgtagtgaaggttgcttgtgtcttttatcctgctctatagtaaggttacagatggcaaaaaaaaggcaagacctcaaaaaggaaaatgtttctgggtaaagataaaaccgtattgctctgcttgagctcacaaaagagtcgcaaagaacttcagttggggagagaaatggtagaggttggatggaagatttggcattagatttatgcttgaatttcatctctgctattagctttgtcatgactttttgcctttaagttagttacttaacctctctgaagcttgtttgtctgtttgtttttgaaaaaaaatgttcctctctagatgaagattaaagaagacagtttccaccaaatgttggactcactaaatatattgtggaaagaaagactatcctctatttctcaggtttatttagttatatagttgcatccaagcctcataccagtagagtcctttttttatgcacagaaagagaaacaaataacacttatgaaacacatgtacattttaattcccaagcacatcctcaaaaatattttgttattaaactgaacccaagttcagagaatatctctgtctggaattgttcttgttgtaccaattatccttatctaaatgataagatagaagacttcctatcagtgtcttttccaaaaaggaatgtctccttgaacttaacaactgctggttcctttcccttcaaaacattcacgattgagtccccttttagttgtaaatatctgggagacattcagcagccttttaaccttagattcttcatttgtgaaatggaattctaatccttgctctgtctaccttacagggttgttgtaaggatcaaatgagataatgttagtagacattctttgtgaactaaaatgtgtcaaataagtcttaaggaatttccatcactggtgtaggttgatcaaccacgtttttccactagtccgctcagcagagaatccctataggcatatactatgcattctcatgatttctcttttcctttcacacacagtttggaactgaagtggtctcatattgaatggtcacagaccgaatatgaagtctgtgagaatgtgggtttgttgcccttggaaattatcagaaggggatattccatggactcggcctttgtgggtataaaggtaatgactctgaaatgtaaattatcaagctaaaacttatgttgttctttggtgtctttcattatattttttttagaaaaattcagagtgaccaaggaaatttcaaattgcagggagatcccactattctgaggattctaagcacaaaacctccttggccctccatccatcatctaagttcataaactctgagatatgattttttagtgtacgtgttgctgaagctagcacaagagatattattattattattgttattttgagacaaagtctcgctcttgtcgcccaggctggagtgcaatggcacaatctcggctcacagcaacctccacctcccagattcaagtgattctcctgcctcaggctcccgagtagctgggattacaggcacctgccaccaggccctgctaatttttgtatttttagtggagacggggtttcaccatgttggccaggctggtctcgaactcctcacctcaggcaatccatccaccttggccttcgaaagtgctgggattacaagcgtgagccaccttgcctggctgagatattaatttttaaaatccatttttaattttgaaagctgttatttgtttctatgaactctttagactttgaggttttatttcatagggagctatattcaactttgtgaacttgggctgaactctgctttagaaagagatgttgtatgcaagacattctgtggggtacccagagcaaatttcagtcccaagaggctttctcttagtattcacctcagtcacttcccatgggctcagttgatgaggcaaataggcagcttaaacccatctatcttaagagttgtccaagccatacaaaattaggagagcatatactaatacaggcaccctgaaatatgaagaattttcagttaaccacttctagatcagtcaacttgctatttcttttcattgatgtgacccatgaagcacaacctatggcttctagaattgaagaattttttttaggagtcgttataacaagagcgcttcaagagaatgagagcatgaaacacttgtacacactaatgatggagaatgagctgtaaagactcccccccaccccatccccccaccatctgatgaaaaagacactggtattagcttctggggaaaaggccatttctattaagtctcaatttaataatgaactcaaatcactctcagaagcctgggaacataaatttgaccatatccaggctcagtatttatctttccagtggacacaggtcctttttcctagatctgttggttacttttttgttattaagacaggagaaaacttggcatgccctatagttttccagaagattgcttatggaataaggaagaatctgcctggatggttttctaataatcctcccgtcctccatagaaagcaccatatgctctaggctggagttttgggccacgccaccattcaccttgccaggtagaaagaagaggcatggtgttacatggaaccttatgcttatttatgctgaaagtgcacaacaaacgtgccagctgagtgtgcaggccttcatcaagcacagtcccagagtctttcaggacaactctaccctgagcacaacctgcagccttacactagagcttggctgcttgactgggagcagggaaagaggtggtgcttttaccctgtgtggattgccctggtttgaattgtgcaccttcacctgactgatttctccaaccaccttgcctcagaccattccttttcccacataggattctgtaaactcagtggtagtaaatactaggtaattggacatgcaagaaccatgcagggaaatgcaacttccagcatatggtggatacaggtgtataatgggctgccttttcacaatgaaaggtggttccagaggagccttggcattgtagacaaagagcaaatggaagcttaggaaggtaatccccttttccagcaaaatgtttccactgctaaccaattaatatatgagggggcctttgatttgaaatggacatattgtctgaggccatagaagtaggaatttttcagcttttcattatgcacttcattcttttgtcagaaggtacagaaatatattatcccacattcctgaccatcttaaacatctaaaaaatacacacaagtaacagaaatgcttgcacacggttctcatttgatgacttatttttcaaatcagccaaagacactttttttttgttttttgagatggaatctcactctatcacccgggctggagtgcaatggcaccatctcggctcactgcaacctccacctcccaagttcaagctcttctcctgcctcagcctccccaggaggtgggattacaggcggccgccaccatgcctggccaatttttttgtttttggtagagacggggtttcaccatgttggccaggttggtcttgaactcctgacctcaagtgatccacccacctctgcctcccagagtgctgggattacaggcgtgagccaccgtgccggctcaaggacacttcttaacatgtgtttgggcaccctttgggtggaattcaaggccatgacttcagagcgctaaaatcgcctctttggtttttagtcttggggctggagctgagaagcaggggtgtatcaatagtctccttagactagggcatttttgttgttgttgttttaaaacacctacctgacggggtccttgaaagtccttggttttgggtgtggatctcctttgtctggttgttcaccaggtcttccggttccacaaaactctcctttcatgtttgtgaagagtaatggcttcatccagacaggaaaatgaaccagatgtgtttgagttaatctagtctaaaggctttcagtgccctggagcttgcaggatacctccaagctagctgacagatcatcacatgggttgtcaggggtacctgctttttcttctcctcatcaattttctccctccttttcttttgagggactattttaaaaccaaattgggatagaaggaaggtaataaaattgtgcttgcaacaaagacaaaaatatagtttaaaattcatgttcctttcttcaataactaaatcatttataaaggaaaaaccaaacaaaacaaaagctttcctttccattgatattagcctaggaaaaagtcaactttaaggaaaatgcatgttgcctggatcccaaatggcttatataatttttttaaaaaccctacctaatattaaaaacagatttaagagcatgagtttagtccagtatgagggagaatagctgtttctctattgtagaatatttatttttatcttaaaaagatttttttttccctcctaaggtcaaccaagtgtcagctgcagttggaaaagatttcaccgtgattccatctaaactgattcagtttgacccaggtacattttgtgtctgcagtttgttttatgtgttttgttttttgtttttttttgtaggcatgtctggagattgtagagaagatagaatgttacacaactttagccaactagaaactcctcagggagccataccacctcactctaaaagagaggtgtttggatttgaggttttgcccttatttttttttagtaacaaatgaattttgatttcaaatgagaagaaagattataataaatatgagatatcaaagcaaacatccaagacaatccagaaaaaaatacagtcacttagaaattatttgaagttctaacacaaagctgttatagtttaattgcctcagatattttatgaaaattttcagaatgttatgtttatatggattcctaaagggcatttctaaatgatccctcatggaataggttgatattaggagattccaggggaaattattatttagttaagtagcacttactttgttttaaatttgtggaaaaattttgctaggtgcaagtggaaataaaaaaggctggtacttgctctcaagtgtgttccattgtgtgagaaacacagacaagaattaacactcactgatagtgcactgggacccaaaagatgagctgttgttcaggctaagagaaatcttggaagacttcccacgggaggcagtattttagcatttagatgaagaagaaaactccaggatgaaggactaacacaaaagcaccaacacacctttggggagctgtgcctaaagctgaggctggagcccggccatctttccctggcttctgtggatgggacaggtagctctgcctcactcactgcatgccactctctatttccctggggtttgagatggatctgaatcaaatgtgggggcttgggagtggcaaatacaatgggcctggagaagcagacaggactgtggctttgtgctttcctgccaaggagatgttctgcatactgagaacactcctctaagtgtgaactattgacatcatctgccactaactcataaagagttgagcaaaggcaaaagaaaatggcctaagtaccagcaccacctcaaaattgcctatcttaatgtcaaacacagaaaagaaatggctctctgcagttcactgcaagtagcatgatgcttgaggactgtgttagtttcttcaggctgtcataacacagcatcaaacagtgggtagcttgaaacagagacatcgagtgtctcagttctggaggctagaggcccaagatcaagctgtcagcatgaaggattacttctgaatcgattccatgcctctcttccatgcttccggtggctgggtggcaaacgttggcattcttagtgtctgctgcctcacctgcatctctgctttcatcttcacgtagcgttctccttgtgtgcatgtctgtgttataaagtccctgccccttttttcttttttgagatggagtcacgctgcgtcacccaggctggagtgcagtggtgcaatctcagctcactgcaacctctgcctcctgggttcaagcaattatcctgccttggcctcccaagtagctgggactacaggcgcacaccaccacacctggctaatttttttgtatttttagtagagacggggtttcaccttattggccagactggtctcaaactcctgactttgtgatctgcctacctcagcctcccaaagtgctgggattacaggcatgagtcactgtgcccagccaagtccccctttttatacaataccagtcataatggatgaggagcccaccttattccagtatgacctcacattaactaattacacctgtaattaccctagttccaaataaggtcacattcagaggtactgggagtgaggacgtgaattttttagaaacgccattcagcctataacagtgaaccttcacttcgacatgcaaaaatctgtattttgtttttggcctccttcctgtgatagttaacattctaactcagataagctggttcttccagctgacctccttttgtgggaagagatcctgttatatatgggaaagattcctgttatttatgtgctgtttactcccacactggtacaggctcttgcggccaacccaacaatccctacaatgaaagggtgagatgatgtgcgccatgtcccttcctacttcatgttaaggcacttccaacttttccatttcttgagtctttgccatatgtcatcttcataatttgaggtctgtttgctacaagatcaggagtaattttggctgctagtaggtttcaggagcccatcaggtgctctgtttggactgataggaactagaacgtgtcacactacaagagactctgaaatctgtctcttggagattccactggataagataaatacccatttgtctagaagagctcacatgctgttttgagtagatactaatgacttctgggggctgtaaataatcttatgattttagatattatttagacaatttaagaaataatataagcatatcttataaattaagaaaaaaacaattggctgttcattgttttagaatttattaacccagaagcagttttgcaaactgaaatcttgctttagagaattttgaagttctccatgtccacaggtccagtaaatatttactcctatcttgttaatccttgcctcttctgggtctggtgtccccatccccatatccaccccttttaccaagggaaatcaatttgtttcttttaaaacggcagcttccatgattgggtgaagaaacagagtgaaaaaccgaagacagtgggatgccgtaaggtttgagaactcttacgtgggagctggaaggaagcttgccttgaagttgcaactatgctaccaaaccaaaaaaataccaaacaaacaaaagcaaaccctaactactttgcattcagctattgtgactagtcttgagtggatataaaaatactcctaagaaaatgattgttttcctttaaaatatgcattattgaaaggcttgcagcattcttaattgatcatcattccttagagtcaaaatgttttccaagggaacagatctctaatgtggcatttactaaaaaatattgagaaaatgtctttcaatagagaaatctgctttgcaggaaaacatccaggaactcacctactctgtaaagtggaatatgtctgcataaaatgacacctctgttttctcttcagcaccttttgttttgtgggaacagggagccagtccaagccttctgaaaatgcttgtatatctcagggacttagcaaatactttgcaccttgaaagtgaaagaggaagggaaaaaatgataaagttttgacttccaatctcattaacctaaagagttagtcctctgtgcacacctggaaggcatagaaaccaagttggaatgcacacaaacaaatcagaagcacttaaatgaaactcaaaagatattttctccaacccctaaccatctggttctactccgtaaggtccaacaaaaaccttaagttttttgttttttgtttgtttgtttgtttgtttggggggtactataattttaaaaaattaaccttaaaatcagagagtcggttgggagttggaaatattttctgtattggattttatttacatgatgcttaactttatggtctttgagggtcaaaacagttctccaagtactaataatcatattattcatatgctttcttcattgaccacctcttatcttttcatgccaattgtattacagcagctgtctatgtggtcttcaaacttctagcctatctgtctatctgcctggatctccagactttctcacataacactctcaggttcattttgctaatccactttcagtgtgtgacttctttgttcaagacccttccctcttgcctatgttgtaaagtctgaatctggccaggtgcccagggctctctgcagtctggctacaaataatctttgcagccttatggcctcctgtccacccatgtaacctctctattccagccagctaattcactcacccttcccgagtcaagacctctgctttgctatcttcctgtctttacttatgttgttttcctgtttcctccctcctaatcctttcacttctaaagcccacatttatataggctctacaatctattctgtatcttttagtaggtaaacatacatagctttcaataattatttgacttttctggttttgcttctgtctcccccaaaagattttaagctcccttagatcagggcttggcttatgttacacctctggtattctccatagcatctaatgcaaagataagcatatcataagtacaaaatatatattttgatgtattgatttatccatccatgagatgggaattgtatggtattattatacatactagatgcttcaacttctgcttttgcaaagactgtgaacgtaattggtttaaaaactcagtactggaagcttaataaattagctgtcagcctgtttttgaataaaatctatttattccaagtacacctaattttttcccctctaagtgcagccagccaaaagtagaagaagtggatagcttcacctttccattgacttctgttgaggattgaagagactgattagatcatgagatctatgtgaggcataccttcaagaaagaggccaccatatagatggacagttgagaggtataagtctgtagaaggcaatctgcaagataaaagagtcgttttttggagatggggacaaggtctcactctgttgcccaggctggagtgcagtgacacatcctgggctcactgcagccttgaccttctgggctcaagcgatcctcccacctcagcctcctgagtggttgagatcacaggcacgtgccaccacgcccacctaatttttgtttttgtttttgttttattgtagagatggggttttgctctgttggccaggttggtctcaaactcctgagctcaagtgatctgcccgccttggcctgccaaagtgctgggattacagttgtttaccactgcacccggccaagagttacatttttaagagaagactttttaaaaagtttaactgtatcatatagaggggcttaaaggagtaaaagcactcaaatagccaatgagcaaatggcagagtaagcttttccatctcagctaagaaaagttaaatcgataagtttactgtgtttattcctcttaaagttgagccttctttctccacttaaaagtattccctttacttccttccaccacttgttcttctaagtaaactcaggggatatcctatgatccacatcatagaaactggtcaggatgagatcatctcagaagtttcttcttgcagtcttaatattttgtgtatctggggttgctttgtttccagtcttggtgttgacaggatggctgggatatgtttgtaaggtcaaaactgttttgtataatattaagttcacaaagttactgtgaaccaagcttgattgtaacttcatgaatagaggcagccagaaagagggaaaaaattggctttatttctagaacccccagcccataaattctctctaggaggatatcaaactactgagtattatatcatcagaaaaagcatttgtgggctagaaagatctcaggaagtggggaagccgatgcaggcagctgtctttagaaatgattaagaaatcaatcatttcaagggttccatgaatagcatgaagtaccatccaataatcacttctgtctgcatcaacagcttaagattttttaaactattaagattttgagattgcaatacttgtttactcttcagaagagaagggacaggttgggaaaataattaagtcttggatctcatctaataaccattttttttttatcccttgcatactgcagcttacttttttgttacagtgtttgcatttaaacggaaacatcatcgtccaggaacaaatgtggtcttttcatattatttgggagaacagcaggacttcagtgagttggtagcagtacaatagctcactcgggctactgcagtctagctgtagacatgttaattaatatatttctctgacacctaggtgattgaaatagcaattaaagagtaattaaaatgtttacttcttgtaggaatgtcaactaagatgtggaatatagcaattacctatgacggattagaggaagatgatgaggtctttgaagtaattctgaactcccctgtgaatgcagttcttggcacaaagacaaaagctgcagtgaaaattttggactcaaaaggaggtattcttttgatcctcatcttgaaatcaggagcggtcctggcgctgtagctcttgccttcaacagccaacgtgcttgataacaccttcaaatcaaaatgcttaatttcttgtcaagaaagcaccctcagtcgtgatgtaggccctttattctggtttctgcttcatgtggttttcctcctgctaagtacgatcacttgagaaaagcaacaagtcagtgccgtagttgtttttttcctacccgtttgttgttctcaccgagggggaaacagtgttggtgagaatctgtcgacaattattttccccagagtctgtagagctataattatctttctctgttaaagagcactcttaatgcctaaaatctgagcccccactgtagtgtgaccaggaaaattctaagagaggaaggaattggagaaaaatagatgtgaaagatgcagctggcttgggaatttgggagcagctggagaatattaatgaatgactttggatggcagcgccaaacaggtcctggattgtctatgctaaagaacaacctgtgaactaaataaaataaagaccagccagactctttggtgctctgatttttttccaccaaatgccttttagttacttgtctttttagcatttgacgagtgttcgtaccatactcaatcttacactcccatttttatacctgtcatgccctgtggtccatatttttttcttgcctggaatctattcccttctcttctctttcctactctataaaaaaatgggacctcccctcttttctttataatatccttgtttctgcaacatctctccccactacctttcctcaccaaatttatttcttttccagtagaattttctggtcacatgaagtacataaaatacatgatatacacaccttatatgtgaaatataaaatacccagacaagggttttgccctcaaattttttatgccttcccagaaatactaattggtgaggtttccaataggagccgctctattaagatttactgggtctttgttctacagcaactaagagaaaagttttataaatactacttaattctatgacatctttaaacaattccagtttctacctctaggaaatgattactttaaagtgcttgtggaataatgcttgatcagtgaataaacttttatgttggggaatactataataagagaagtgagactttccccccagtatatgatatgataataaaatcataacagtgattttcatttggggtttatgaaattgatttcatgactttataatcactcaatagatgtgcagacgagcacagctttcctggatgtaaactgatgaagagtaaaggagtttctggcaaatggcaaaaaggcaacatctggtgggaaaaccatccatctaggtttaatgacaagctgctccaggagctgtgtcaatgtgataccttatctgtttgtgtaaaatgaactgaccgcctgccatcttgcatgcctccaggacaatgccatccttcatattcctccaaccaaagcaagcacagcacatgggagaagggcatttggcatctgctgcccccagggtcttcctcatccaccacttctggttcctttcatctggaaagaagacctcttccatcttccatgcagctagcagtcatcaggggagacaccctgcggggctttgattctacagatctttctcaaaggaagcttaggacccgtgggaatggcaaaacagtaaggatggggaccttctgggaaatgatgtgcaaaatacatattaaaaggatcagaagatattaataagtattctgaaacactgaagaagctgttttgattctcatagtgagtgggggccatggttccttgcacagttatgcagtgccttctgtatacaaagatcttgaggctgccttgcttctttaattgtactgaggtgatagatatgctgattcatccatatgatttcttctttgattccttttgtgaccaagacaaatagggaatgatccatgaccctgaaatagagtgagatgaaatgatgcgattgggtgtggaagccatggctttgaccttattaacacagcattctaaccattgcatactctcatatgtgcacacgcgtgtgtgtgtgtgttcttggacctgtgtactatagatataccaaaaaataaagatgtactttttccctgactggaactctgtatgtgtgaatccacacaacaatcataaattctgattaggcctagtgatttttgaaattccaatgatttgggcgtgggaaatcttaagattacatatgttttgtaattgttcagacattagcaagatcttacttggtggttttaccctattgctagttattagtcaatccaattctgttcatattttgttctctgtcaatttcaggttcgtccatcctctgtttatagaaatggaacagacatcatctataatgtaagtgtagtcacagaattgctaaatttcttatatttatggatgcaagtatttaatgaagctattattttatattttttatatttatacatttctcttaaaaaattgttttgaaattagaggcttgggtgttcagagaaacaaatcctcttatctttttgctttgactgaatttttgaattgctcatttttttgtttgctatcttgatgtttgttttttccttattgttgttgattgttggtttcctcaagtatcatgggatagtttccttgaaactggaggatgacagtttcccaactcacaaaaggaaggccaaagtatccatcattagtcagccacaaaagacaatcaaagtggcagaactgcctcaagcagataaggtggaatccacaactgactcacacttccccagacaggtatgaaaatctttgttccttcttactcaccttataacaagttgtttgctgggccagaaacacacttaattcacaaaatagcctccaaggttggggggatagtttacccaacacaaatgcttcccaacaaatgaagacccaaaggaggtgaatgtgtgagcaactttccttaagtcaattctaaattgctaaattgcctttccttcccaaaggaccagttgccctcatttccaaagaactgcactctggaattaaagggactcttccattttgaagaaggcatccagaagctgtatcagtgcaatgggatcgcctggaaagcctggagtccccaaaccaaggtaggaggcaggctgagcagccaagcacctttattcgcaatgtgctctatgataagctaatagaggggaaccatctggtgcatgactcaacccatgctacatcttcctgccattgttaacaacttgaaggccaagaggaaaaaatggcccaaagtggctttttaaaaatcacaaaatatgttagttaaatcaataccatttaagaagatgtttacttattttgttcagttatcagagtgtcaaagttgtaacaatgaaacgttgctgactgtggtagtgttttctgtaagaagccattgtatttctcaagatggagaattgggattagggctgactccctttgtggtaaccaaactacttgactgaagttagggaactcgtaggactccttatgctgaaccaactccagattgtaaagaccattatgatatgaacacagacaactgtttttcaggatgtggaagacaaatcctgtccagccgggtggcaccagcactcaggctactgtcacatcttgatcacagagcagaaaggcacctggaatgcggctgcccaagcttgcagggaacagtaaggcaccctattgcacatttgattggtgttttcttttctctatttctctatttgctcatggaagcggagagctgcttcattcattcaacaagtattgagtgcctaatatctgcctggctttgttttaggagccctgagggagttccctagttcagaatggatttgtgatgggccttgataatgtatttggttggtgcaaaagtacttgcagtttttgccattacttttgcaccaacctaatatttgactgagctcttttctgttaaagctgcaccattgccatgtttctttttcttttattttcttttcctatctcagtctttgtgaggaaatcagaagattttctgagtcagcagcattgcagtttctttttttatgtgataagaattcctgcccatttaattgaaagtatatagtaatgaaaagccttataacgtcgggcctctagcaatgcgattatacagcaatgattataaagctgggcaagtaagacaaaggctcactgggtaaaagaacattcaataaaggataacttatggtcagagaatgacaaccaatgtatgtagtccagaaggactttaaaaatgcatatgtacctatccctgaccctcctttttgtttgccaatctggatattatctaaacaacacaattagactaatatgccctatggctggaaattgagactagggaagtctctggttattattgatctgatctcgtacttcataaaatttaaaaagttatacacatctaaagactccattaagaaaatgaaagagcaaaccatattcagaaaaagctgttctcaaatcataaacctgataaaggtcttaaacccagaaaatacaaacaacttcaacaaatcaatgacaaaatgacgattcaaacaataataaatgatttggagtcttcgcaagagtagatgtccagttggtcaataaataaatgaaaagctgctcaaaaccgttagatattaggtaaatgaaaatgaaaaccacaatgaaataccacttcacacctactagaatagtttgaagtataaatatgacaatccaaatttgtttttaatttttaaacttttattttaagttcaggggtaaatgtgcaggcttgttacctgggtaaatggtatgtcatggggtttgttgtagagattatttcaacatccaggtattaagcctattactcattagtgatttttcctgatcttcttcctcctctcactttccaaactccaatagaccccactgtgcgttgttcccctctatgtgtccatgtgttctcatcatgtagctctcacttatgagaacatgcagcatttggttttctgttcctgcattagtttgctacagataatgacccccagctccctccatgtccctgcaaaggacataatcttgttcttttttatggctgcatagtattccatggtggacaataccacatgttgctaaagatgcagagcaaatagaattctcatgtgttgttggtagaagtgtaaaatggtacaatcactttgtagaactgtcttacagtttcttataaagttatatgcatctaccctatgacctaacatattctactcctaggtatttaactaaaagaaataaaaatacatactaaaaaagcttcataaaaatgttgtataataactttattcataataatactaatttgggtcatttgttttttgttattgatgtttagaaatacttgatattttctccatcagcaagagaataaatttttgataaattattttataagtgatggaataaaatactgaagcgtccaacaatgtagataaatcaaaaatggaacatagagagaaagcagccctacacaaaagaatacttattatatgattgcatttatataaataagataatataatctatgttgttagaaataaaaaattgttatctttggtaagattgtggaatgactagaaaatagcacgaggtaacgttctaaagtaagagaagtgttcaatgtcttattgtaagtggttattaaatagatgtatatacaattggcaaaattcatcaaattgaatatttaaaaatctattcattttattatatgtaaattatacccagattttttttaaagcgaataaaatgttttaaaagtgtgttcaaaaactagttaaaccacctttttctctactggtgtatttcatgttttaactgtgagtagagtcaccagagaggttaatcagtggctttcagggtttttttggttgataagttggtggtatcaaataagataaaatattaaaatttttacaaataataattgctttaaatacatatatttccttagtgctacatgttaaagaacaaataagacattcttccgtcattaagatggttaagctgttaaaatgacatcttaactagatgtcatttagtttgtcgtaatgcactgaaagctccagtagaagtagtggtattggtctttttttctccttgaggaaagggctttgatgttgatcaaaagctatctaaactagcaagaagatgattgcagtatgcaacaaaagggagaatactatggtgtctctgcttacaaaattaagggaaagagtagttatactccagccaaagttatcaaggttaggtgattgctgggatttgttgataaaatgtagatgaacagaacttcccaccttgaagtttagaagctatcttttgttcatcttccaatggttcttaaaggccaatgcaagtaactggtctataatgaagctttcattggttcttaatgtatgagaaaaataaggacagtaagtattgagaaatatctttccattcagtcatggatggtggtgtcacattgccaagtgtgtttttttaaaggactgttctttattacgagattataatagtctagctttttattgtcaaaaactactttttatgaaataatagcaacttataacattgtcgatgccctcatgttgacaaacctacatcagtctcccatcatcttttgttttcattttattgttccatctattaataattgtgactaggttctattggtgagtagcaatgagttcttcacgtatctatgaatactgtaccattcgatcatcacaataataaacttaaggcctaaattaatttaaaagcatagatactttctcatgcacttaatctaagatttcatctgcagcttggttttaagcaccttcacccatgacccttttatattagcctgactgtagttctacatgcctccttgtcaataatgtcttacttttatatttatagtatatgaaattgtttcacatgcattagcttattggatccttccatcacttctcttatctacagtttatggatttattttaaaaagaggttcaaggaagcgaaatcacttgctcacaggtatacaaggaagtaaatgaaagagatagaatttagtttttcatccttatactctctaaaacaggtcccctaagtatagcaggtttctcatcataggtgtactgacaagtatgtctattttaactatgttttgaggtaacccaaagtagattttcaaaattatgtgttaataattgtttttctctcactgcaaacacatataagatttttattaaattatggatcctaagtttcctctggatttgaatcaaactaacctttcaaggcgaacctaaggtatgatcaaattcctagtttatagatacattcatttaacaaatatttctgaaagtcctttacagagggtcattcacaacacccatatttccacaaggacagcaaattttgctttatcctttgtccctaaccagattgctaactcaacttaatctttatctctagtcttctttcctccccagtggtgttttattatttttctaagtcaaaggagccagactcctagattatgcacttcttgaatttacatgttgtaatctcatctgctcatttcctcaggcagtcattgtacatttggtaattatattattatagagcattatctatgaagccattttgttttcccgcaggagtgtctggaacccctgctggcctatccttagagttaccctgaagtctacctatacttaatcaaaaattttcagagaagtagatgtttatttctatagccagaaaaattaaagcttctgtttctaattctatactacaaatatttgtgtatgtgtacctatttataattttatatccatatatacacctatacagataatacccaccacattttatatgtatgtgagcataaaataaaaggagtgatatttttctaaaataataaacatatgaatacctaaatgtttcttttgcgaataactatgctcttaacattttacctgtcttgaagcagagctatcttcccatctcactcttttggaacttcttgctttctggagagtcaaaaagaaaaccgaaattgtacttgggcagctaaaatggattttaccaagtttgttttaaagatagcttcaggaatcttcaagctagagaagatgttaaatatccttgaataaaacccattatatcctgatgctgaagttgaggctgcaaagttagggaatttcagtaagcaaattagttcaataagagaattagggaattcagtcagggaattaaggggtaatcaggaagtagaatcctagtctctcatgctctgtacaaaatgtcatagtgactgggacagtccctcaagccctccctcagcttatatttaacccaagtttcatattgtgtgttctaagcctacagcgctttagagtgagcgtgttggatgtgttggggaggggaggagaggagatgcctcatcatacctgctgtaactgtcagacaggagctgagagtcaataatgaggtcagagccaagtcacaaaacccaatccagcggtctaaggccattcagtggaggggcaaagagccttatatatctaagaaggcctagaaatcatcattgcatcagacagcagcaaaatactgttattagtagagggaaatcctttaaaaatagacaaattatgttcaccatatctagtctggaaaagcagagaaatagatctgaattttgaaaagacataggcaaaataaataaaattaaatttaacagctatctgcccgaatgtgttgctaattttgtttcctacttttcttttcatatcaatggatattaaccaggcaaaaagatcatggtgatttaatttttttccttgtttgattttttaagtgtttaaaattattttttaaaatttaattttatgtttaattgacaaataatacaaattacattgtagggtacaatgtaatgttatgatacatgtatacatgatatatttgtttcttgtttgaaactttctgttttttttatttttaaagaagaaagaattacttagtggcttcttacttaaagcatttttaaagaggttttaatgagcactgctggggaattaggcacaatcaaatatcgcttctaggaataactcagttagctgcaaaaataatttataaaaaattctgttttgtgaaaaatattttacatatgtttgtaaaaacaagcactttaatttctgtgcattatatgaaggtttgacagttggggctatactcatttcattgagtataatgaagtcataataatgtgtttatttggctaaacccactaagctccaaatttaaacctgaagtaattttatctaaatagttagtttgggttaacttactcatcaaattaacttggtatttgccaaatttataccagctagaaatacacttatgagaagaatagtattttgtcattaaataagtaattgttataagtaggcagttgctgattttccaaaaagatgtttgaaacctactgtttatgtttgaaaacctatcgatgttttttgctgtaaagcccagatattataataaaccatcactttctttgatgtcacctacccccaccctgcagatactttttaaataaaactgcactattaaaatcttagaaagtttttttaaagacctacttttttgtgtattttaaacttacttttatttctgttatgcatttcgtatcagcagaaatgttaactgcttgttgctgatactctcattttcatttgcatttagatacctgggcaaccttgtaactgtattctccaggcagcacatgcggtggctctgggacattggtgggagaaagtccttttggataggcaagtatctgggagggaggctgcactgaggagggaggcaaggacatgaaacaaacaggcaccaccaccctgctacttccttccatgggttaaatgatagtggtttacaataataggcaaccaatagatctagccatttatcttttaaaactcatcttaaaccttttttttgacacactactttcatttttagacatctatcccaaagaaataaataggaatgtggtcagattgacaggcaagagaattcaatgcaataacatttctaaaaccaaaaaattagaaattgctataactaaagaatggttaaataaattatagtacagccacatgaaggaatatgtaagatttaatgtttttgcaagccattaaataataaagacatgaaaaattgccttacgtttattaattcatttaacaaatatatgttggatgcacattatattacatataaaatgtaaagtgtattccatttatggcaaggtgcaaagtgaaaatgcagggtccacatccatataaagtatgaaataatttagaataaaaacaattatatgcatgtggtgtatgtataaatataaatatatattatatttgtatatataaatatatataatatttacatattggaatatatacatatattcatatatatatgaatatatatatatgaattatatatatatatatatatatatatattccaaataattagaaatgacttacctccagtcaagaattataggtaggctgggtatggtggctcacgcctgtaatcctaggactttgagagaccaaggctggaggattgcttgagcccaggatttcgagatgagcctaggcaacatagtgagaccttgtctctgtgaaaaatttaaaaattagccaggcatggtggcagctaacagtagtcccacctacttgggaggctgaggtggaaggagtgcttgaggctaggaagttgaggctgcagtgagccgtgattgtgccactgcattccagcctaggcaacagagcaagaccctgtctcaaataataataataataaatataggtgattttaattttattccctcttttctgaagtcttaatattttctacagttttaacaataataaatcttttttttttttttttttttgagacagaatctcactgtgtcacccaggctggagtagagtggtgcaatcttggctcactgcaacttccgccccctgggttcaagcaattctcctccctcagccacctgagtagctgggattacaggtgcccactaccacacctggctaagttttgtatttttagtagagacggggtttcaccatgttggccaggctggtctcgaactcctgacctcaggtgatccacctgcctcggtctcccaaaatgctggaattgcaggcatgagccaccgcacccggccaaatgacaaatcttttaaaccactttaaaaacagaattttcagggcgcatcaaagtcagtatccccactacttctctttaaaggcgttgtatttgagggaactgtaatagttccctctcttggctttcactatttctgcagtgctcagtgggtccctaaattctgaaatgaactgagtattaagagacaagctggaggataagttttctctacatccataatgactcactgcaaggctctgtcctcacaatatgcttaggcagaatgtcactaatcaataattcagggagggcattcctaaccaaaagtatttcatttcattccacccaaaaatacagactgaaaaacagttggggaaggtaaaatgttatgtatctaggactgttttcatggtcaaatttgatttggggaatgtcggatcatgctatggcagggagttcctttctcattttattcttttttatttctattatgaaagagagtgagtaggggaatgcttaagaaaatattacagaagctttacaacattaaagtgtaatttgcaaaatttgccagtggaggtagagaggcaagtcgagaaaatctgctttttattggaattgtagcagattgaaacatcttaagctccagactcaaaataatacatagtaagctactttcaaatatgaaaaccaggacatttaaataatgaggaagaaaaataatatgcaagagaatatctgtttccctgtgataggagttctgcatgtaggatgatatgaataataataatagctgccatttattaaacacttatatatgccaagagctttacatgcattatcttttttaatcctcaaaacaaccctagatgtactatttttatgcccattccttagatgaggaaactgaaactcagagaggttaagtaacctgcccaaagatgctcatctagcaagtaagtggtagagctagaattggactgggatttgtttgaccgtttgtgtcttagagtattccaagttcctatcccttgttttagaacctgggcccacacttgcatgtgataactgagcttagagcaacagctggatatgatatctaagtataaacgcaataaaagtaattggtacattcttttggttcacattaggtttgaacgaccaagtgcatgctggccactgggagtggatcggtggtgaacctgttgccttcaccaatgggagaagagggccctctcaacgctccaagcttggaaagagctgtgttttggttcaaagacaagggaaatggcaaacaaaagactgtaggagagccaaacctcataattatgtgtgttccagaaaactctaaatataacagaccctacagggggccacctggagtttgtcacctatttattcacaggatctgtgaatattgctccatagaaaacaaattgttatgattgagtgggtatacctttgtgattctgtctagtgaaaatgggacatttttaatagtgccagaaagattgataaataaatattttttacaagataagatacaatttttgtatctcaataccttttaaaataaatgccagcagtattataaa

SEQ ID NO: 15579 - DNA, 176330 bp, Homo sapiens; identical to SEQ ID NO: 1186

SEQ ID NO: 15580 - DNA, 36796 bp, Homo sapiens
gatgctggatgagtccttggcagtcaggaggtccaaaaaatgcaaagaaatgataatgcactgggagaagaaagaagatattgacatcgtgaacacagtaagaagcactttgtattaaaattattgtttttatttttatcatatgttttaattgatcttagtcactttcccttttcagtctgttagtgtcttttttttattcctaactcccctaacctaggttgataccagtctctgtactgtccaaccagggatacttttctgggtctctttggctgcaaattcatacgaattctaaattctgagtgcagatgttagagttccttcctacactccatagcacagatggaaaagaggatggagattggggaaagtaccagaacttgaatcaggtctttcccaacaccaacactcatcttaaagagcatggctattgtaagagagttatctattggaagttgtggaatttactgataggaaaatgttggacatatattgtaaagtttctttttttttgtcaaaagtataaggctttccttgcaaaaaaaaaaaaaaatcattacgtgtaaaaaccccacaaggtaagcttcaaaattcctcccataattccccagaaccctcagtctctttgagcagagaagtcaagaggctttagaaagtgactgaccccaccagcagtgtaggagagatgacactcagtgtcttgccttcaagagctttttctgccaagacaatatggatgttgatcaccgttgagtgataaactgtcccaaataagtctcccaactatgggtaaactattcttctggtggtacctgagtaattgagggcaaaactgctgcaacacacaggtgtatttgactgataccagcaggcacaacctgacattcatttggtaggaaatcttttctgtctgaccaagattattgcaactgatgcaacctgtacttctcctttaaaggggtcaggtgagcgagaaaaatgtgatgccattgctttctgtgcattttctgtaaatacaacacaagttatcaggggacagagctttctttaaaaaaaaatcttgcaacccaatatttaaaaatgcttctgggatactaagccagaagatctacttttgacaaagctagaagttgaataagatctaggatatattttaatgtgaccagagacatgacgggaccgtgttgctagagtttagatgtccttttaaaaacacatgatcacgacaggcatttattacttttgtaacactttcatttttaaggaattataacatccaaaaccaaaataaaacaaccatctacattcaactattcatttagtatcaactctgggtatttcttatatggcttagaagtactttaattttcctcttcttccactaaccatctctcttactggccacttggttgtgggagcttcttccctcacgggccacaatgacaatttaatacccaatctcattgctttgaaagttgccacccatactcttcaggagaggagaagaatgactgtgacttttgaaaatgtcagttgctttttcagtttataaaataactatgtattgtaaataattcataaactacaagaaaaaaaattcttgacaaccataccactcaaaaacctattgttggtggctttcttttattttgttcaattagaaatgggatgatattatatatactattttttatgcatattgcctgtttccatcttcatgtgttatgaacatttccttatgtcattaactattcctgatagttcttgataactaatcatattcctgataacatgatttttaaaggctgcatggaactcagtctcaggtcgagatggtttataaatcccctggtggacttttcattccttttgtaaattgctattataaatagtattttggtgaatatatatctaatcatttttgcatacatatctgtttctgcaagatacagaaaaattttcactgttttgcacccctaccagcaaaatataaaaatatctgtttcttcacatatttatcatcatgagttataattatttctgtttttttttaagaatcttgccaatttgagaggaaaaaatggttggttgtgacaaaatttctcatgaaataaacagaggaggagttgtaatctttccccaccccaaaagaaatgaacacatttgtgcaaatgctcccagatttttgcctatgtctatacaaacattatgtatagataaatatatatttttaacaaaaatagtattataattatattcgaattctattctgcaacttgctagggtttttcagttaacacaaaattgtggaaatttttcatcatcaattcattttctcccttattcttttgaatagctacagagtagttcattgtatcataatacacaaaaatatacatggtcttatcattgacaagaattctttactttgctagggcaaactaagatttacagtagtatcaggttggtgtaaatgaaattaagaaccgagagattaggagtgaggggaatgaagattcttgtacatgttttctagtatcagtggtggatctgttctaatccatccaaacctgctccatccataacctacaacagtcatcttgcaaatgcaagatgcactgagctccgtacagactgaacgaggtcctttgttgtgtttgaacctacagtgtaggttgtgaagatgtcatccaccatcttcacaaatctggtccacctgttcagctacctggctctcatcttcaatgaaagaaatatgcaaatgtctagaaataatcacctttcactttttccttactgaggtatctctatttttattcaacatttttgccagttgaaaaaagacatgccaaaaaaatttctatatatttgtaaaccctcacaattttgtgtctgtaaatcactaaataccaggaaaataggagaagttcttctgtggagttaacatgaagtctgctctagaattcttgggtcaattttagtgtattcatttaatagacattccctgggcttctattatggttcaggcactgtgccaagtgcagggaatccatggcggtgaaagacctgacgcctgccctctcggaacttgtatcctaagtggcagtcaagcaatagacaaattgataaagtggagtcaaggtttacagtggaaaattggcctctgttccaagcactgtgatatttgctgaggctgttgtgaacaggactgtctttagcaggaatccactagtgaggagtataaggaatccaaaacgtgggacagtgtgtcattgttgaaccaataaagcccaacgttgcatgggggtgaggggcctttggacaacattttatgtcattgttgatgatccaggtagaccaattggacaaaacagctcctcgtatcacactcttgcattccccttctcaagtggggctcctgaaaaatggctgctacgggatttacatcacttcccgcgtgttgaaggcatcagaccctgacactgaggacgatcagatcatctttaaaattctacaaggcccaaaacatggacatctggagaacacaacaacaggtactggcctccttaatccttacaattgccattttaaaatacccagtggctggcagggctagagagtaatttaattaagtgcaggcccatttggtaaacactccccagggcttactgatagatgcagtttataaatcaatattgctcctaaagagggtttgaagctgagccttcctaaatttatcctgactggaagaaccaaatactgatatacaactgtttatttatattttttttctcaacagctgattataatatattcaaaggaacataatatcaggaccaaatttcctatttgtgactaattttttattctgtcatgaattctaaatgactctaaatgatgtcagatctttttttaaaagttcttggtttttttcctaatggattctctggattgtatattatttctactttatgagcacaatgatcataatacatcattaaacaggatggcaccaagttacagatttttattactgtatctttctactctccttctctttattttcatttttttaaggcaaatatttctgaagcagtcaacttaatgcctaatttaagctcgctgcatttgagttttaagatagttacagtaatgttaatttcttgttttaaaatgtactttagctgttttttaaagctgtgtttaaaataaaatagccatacaattttattagcttttatttaatgttttgtttgattacccatgatattcatttatttctttttttaggtgaatttatccatgagaaatttagccaaaaggacttaaacagtaagactattctttacatcataaacccatctttggaagtaaattcagataccgtggaatttcaaatcatggaccccacagggaactcggccactcctcaaatgtaaattctcttgcttattcagtagtcctatatgttacatccataatgtatctgaatattaggaaagtgaaatgttctttttaaaacagaacccaagaagataaattaatagaccatttcacaagctcatggaatttattttggagaatgaattttctttttattactgcttgaaaataggaaagccagtagctttacagagtacagaaacattaaaaagctaagttgacgttcatattatgcatgtcaaggtacacacttttatacacagggagggttctgtcttaccaattcactagcatccaacactgagtttgcaggttcatgtagcaattgtgcagcaagaggtcactctaggaccgtgttagcaactatagccttctaaaatatctgcagtcggggaaatgaggtagtcaagaagagttagccaaacatcttctctttctcttatgaagaaaattacaattacttgacagtatgtttataaggtgataaacttatcccatgtaagacaaatataatgtaaagaggaaactagactttggaaggtatataaagggtatgaccctcaaaatagcaagagtaacaaatcttcaaaattaacgagattaacagaccacagcaatttcactgactgggtccctactctagacttttcttgaatgtagaccttgaatatcttaccagctaacagatagtcatagaaaggtcggtcagagtccagttattctggtactgtgctgttttttgtttgtttgtttgttcattttgtttgtttgtttttgataccctcccagaaaccccaaagaaaagttgttcacttatccttgttttagtagtcaccatatcctagtcatactaagcatcataagtgatacagctctgtgctctgttatactccttttatgatggagtatagattaagaaaagaaagctgagaaactcctctgcagtcttcagaattcttgcattttcttttggatcctgaattgtagttctaaaatctgaccagcagaggtcacagtagtcattgtcagaaaaaagctagcctccttttcttagcaaaacacattcccagcgtcccactccgttgcctcgataaaatgcagagcctggcccagatttattaactccacagacttttatcgagtggctactatatgccaggtgcacagtactaggagctggggaataggttagagcaaagtagacctggcccgtgatattaaaatgtaatctcgagattacaaaatgtaaaacatatgacctccacccattaaactgtctttgcctaagacaaataattcccaggatcacaatctttatgggaaaatatgtcaagtacttgcaatgtcagacaaatatcttccaattctcaagaaaatgtaaaaaaaaaaaaaaaaaacctgctccaaaaatgttaatacgtggacttcactttttttttttaacattttaaaaataattcaagtaagaaaacataggaatgttgatcagacttgctactgacctaatgctcacctcttgtcctccatgtgtgagcgcagtgtagctgacagaggattttcttcccccagtaatgatgctaggctgatactgcttcacccatagcccctttcaatctttgtcactatcaaggacattgcttttggaagatgatttatatttttaaatatactctcaaattcatatgagaattacagcaaaatttgcttaatttaattataaccttaaatgaggccatttaaatatcctcctgcttttgttggctattaactttcatgtgtctgtgctggagatgtttccagttcaacttgacgtaatttgttcatttgttcatgactgaacaaaatgctgtggcatatgcctaccaaggggtaatatagagagaagttttatttggttctgacatatattaggctattttctttataagcgatgggggggtaaaattactcagcatttatcatcatcatttttgaacggtatagttgtcctcaaccccatttgtaagcagatgttattggaactaggtgcacaattttccagtaaaaagcaaggttatgaatagtggttcatcttcccaagacagccaggcagaacgtagttacaggtacaatataaattacagccatttgcaatataattggtgtttgctctatttcattgctattcatttaatcatcagaaccacctatgagtcaggtaccatcataatctgaaatttacagatgagaaaactgaggacagagctagaaagtgacttttctaagtggaaatgcagctttagagtgcatgatttttctcagcacactgaagaacttcttgcccattttaaggactgtgctaatctggcctgaagggaatggaacaccagacttgtcttcttctttctcttcagacattggccacccaagcaagaaagaaggaatacttactcatataggaccttaaagttcagtgggattttttaacatgtacattatagatctctatattagtgtgcacttcgtatctaacacactagaatttatactatagataataaaccaccgaacttggagctagaggacaaggtttgagctttggctctgcccttcatctagtaactgttcaagccttagttatctcttctgtaaaatgggagcgatactacaatttgtttagaaaaacaaaagaaatgtgtaacgtatatgaaagcatcttgtgtatttaaactccttaacaaatgcaacttgtggtgattactgttgtagttaattcatgtaggtacaataattgactgaagaagtatcccggaaacatttggtggattagaaagcctgcctctaattagaaattgatcctgggatgaatcacaaagtgaacagtcaatatgcatattaatcaatgagctaaacgctgtggaactttgtggtgttctttggcttagacaggattaatagattcatattccccatatttgaaggggtgaaacctctgtgataaagctcaagggactgcggggtgccatctggaacagaaatggacctgttttagagcacgggaaggacccatgttcagtggaaaattcagaatcttgactgttggtcagttttggctattgcaggattcctgtggagtcctgaaggatgaatagatgctccactctaaaaagcattaggaaatgcttgtttcgtgagattcatcaagttactgccagctagctagcttgcgtgcttgtttaactgcatcacatcctggaatcatcgagatgtgcgtgtggattgggaatctctcagaaatgaagcctacgcagcaaacctcaacccaactgggctatagaatcacctctctctacctgccaccccacacacaggcagaatagctcagggaaccaatttttcatggaatgcatctgggagtcactttattgtaaatagaaattattttataatgctgatatccttggaaatttgcgtaaagatttagatttagctaagtgcctacatttcaggcactgtgctaagtgttttcatgagttgtctaattttatctgcaaaacacaatcctctgaggataaggaaataaagctcaaggcttttaagtaattatcctgaagtcactggagagtgaaccctgacctccagacctaagtgagtgcgcatcttattgcctcaccccctggctgcaccccttgacaagcttgtgcctgttttctagtccaagttgaatctccaagatgatccgcagaagccccaaactaagttacacaggacccacatcattcatgaaaagcacttttgtggaccacagaatgtggccaacttctgaccaaagttgttttcctaatacagcttctacgtggacctctttcttgtgcccactggagaaaagtgaacttcaaaagcaatgttgaatgcagaagtctttgataattcagtgactgtttctccggttctgcactctgattcttcacctccctctggcaactcacattctaactgttctgttgtccatttttggctttaaaagagaagggacagaagactaaaaggaatttccatcaggcaaacgttgcaatgtttagcagcttttatgaaacacctgataggggaaggtgtttggctagctaatacctgcacattacctgcaagccaggagttaaggtttttgtcttcagactagatcttaggaaagcacagaggaagggaaggaaaatagcatttattgggcacccactgtgtacaggtgctttatacatactaactaattttaattttaatcattttacatgagtgtaattctcctcatttttaagataatgaaaaccgaggcccagagagactgagtaactgaccgtaatcacacactaaatcacatactaatcagtggttacaaggtgtgcttgattctaaagcacttgttttgggtgcacactatgctgcctcttggctaaacactgtttccccattatcaagagaaaaagagaaaaatgaaaacacaggtgttcatagcattcgattacggagtttaatagcatcatctatgaattgagaagtcttagattggatacttgaaaaaatatttttttaacattttcaggaattcttgtcacatgctacttgattataaatgaagatatagttataaggatagtaatttaatcacaattttagcttctgtaaaccttttgctgagaagctcaaaatacttaatgagaattcatgaaggttcacttaacccctttgaagtacagacttatcattattgcattttgtaataatgacattattataggaagaaaggaaactgaggcatagacaggctaaatatctttttcacagactcttgttaacctggattaatgccccaattcctaaactggtgatttaactccaggtatttctttcagcttcttgtttcatcataaatgaatcaagtagctagaaaataaaatatcagaaagaacatatttattactccaggaccgggtgtctcaacattggcactataggcattttgaaacagaccattcggtgtcacaggggagtctcctgagcactgcagaacattcagcagcaccccaggcctctctcagctgaaggccagcaccatcctcttcccagttgtggcaacgaataccatctccagaaaatgccaaatgttaagaattacacgcatgccttagaaaatagcatacatatgttttaagaaattatgaattatgttagaatgctcatttatcaatgccatctttctctctatgctaataaagcctaacaatagtcaaagaatccagaataagtcagggctagagaaaacatgtgaggatcatctagcctagcaattttttccaagtgtgtgacagatgatgttagtaaggttggggagaaaaatattttcgatggttgtattagtctgctttcacactgctaataaagacatacctgagactgggtaatttataaagaaaaagaggtttaatgaactcatagtttcaaatagttggggaggactcacaagcatggcagaaggcaaaaggcaagtcttacatggtggcaggcaagagagaatgagagccaagtgaaaagggaaacccctcgtaaagtcatcagatctcgtgagacttattcactaccacaagaacagtatggtggaaaccacccccatgattcagttatctcccaccaggtccctcccacaacatgtgggaattatgggagctgcaattcaagatgagctacaattcaacatgtggggatacagccaaaccatatcaatggtcaacttagctcaggagacagtgggataaacaagattcattcattcagttaacagatatttaatgagcactcaccatgttttagatgctctacaagacacctgggttatcacaatgaaccaaagacctgtgcttccttggagcatacataggatctaaatcaatgtgatagcatgcttgctgtacgtggtacatgctctggaaaaatgaaaaacttgaccaggagcagggggatcagcaagtgctgtgtttgggaaagacattgtgattttaaattgggtgtttaaacaacatttcctttacctgactgcttagagctggtgagtgacagagggacctgaagcctcacaagttcaaatccaattttatttccactgctccatgccatgtcttccacttacaacagtggttttcagggatccgaatttatcttcacattgaaccagcttttgctttcttttttttgagatggagtcttgctctgccgcccaggctggagtgcagtggcatgatctcggctcactgcaacctctgtctccaggtgaaccagctttttctattgtgatgaacacattaaaaccgcatatggaagaagttctcaagtgggggtgacttttctcccaaggagcatttgtcaaggtcccgaaacagttttggctgtcgtgactggagggaagtggtgctcctacatctaatgcgaggaggacagaggtgctgctaaacatcattcccacacaggacagcctcccgcaacaaagaattgtctggtccaaaatgggtgggaaagcctgacttagaggcttagggagttttcccctcctgctaaatgacttgaagcgattgccacatgggttacacataaaatgtgtccatggcatacagttctgactgtaaaatgagcgtcactcaatggtgacaggaaactggaagcactgttaaaatgggaagatatgaaccaatccttatctacatgacacctacacatctagaactttacgaatttctctcatgggctcctggatctggacatttacatgatgccaggcatatagctgtgtggcttcttgcaggcaaaattcccaagtgattgactacatctcttatttttcttccaggtgtttgtgtacagtttaagcaatcacagtctctgcgtagaaagatcttctcaaatatactactgcaaaaagcaaaaaaaaaaaaaaaatcacattcaaaacatatattgtacatattctgtgggtatgcaggtcctttgctatttagatatttttctcaaaaatatatagcctggcttaaatttcacggcttttcaatagctctttattatttgtagcgaataattttaagaaaataaaatagagcattgtgtaatgaccaccttgacctataaacgttatgcagcattcaaatggtgcatcagggaaatgcatgcacattcccaaacagtaagaccctttataccttgaagctgaacagccctctgaatggttcccttctgaatttagatcagaaatcaaattgcatttagcttttcgccttgaggtcaccaggatctacagaatgacattgatggatttttacttgtcatggttagcattagcaatggatgaattctcagaagaattggacattgaaactcatttgaaccctactgatggctgaaatccatgcaaatgtatttgtttcattctttcccactgtcctcctttccttcccatttcatctttctctcttttcccctaatccatcttgctgactttttttttctttctcattcaactggatccttttgggattctttgcaacatatttctattggcatttatgatatccttgttgtttgttatcttgtaattctttaggcacacactaatccctcctatctgtgggagatatgttctaagacctccagcagatgtctaaagtgcaaatagtattgaaccctatgtacactgtgctttttcctgtactgcacatacgttgctaggataaagtttaatgtacaagctaggcacagtaagagattaataactaataaaatagaacaactatcatgggatgccagcatcactactcttgcactttggggccatgattatgtaaaattagagtgacttgaacacaagcactgtgacactgtggctggcagtcaatctgataaccaagccagctacagagtgactaatgggcaggtagcatctactgtgtggatgtgctggacaaagggatgattcttgccccaagtggaacagcaggggatgatgtgagatttcatcacactactcagaacagcatgatgtttaaaagttatgaattatttgtttctgggatttttcacttaatattttcagatcacggttgaccacaagtaactgaaaccttcagaaagcaaattgtgaaaaagagggattaccgtagtcatttatttctgtttcttgatctgtttcatgcgagatttaaattcagttgcatcagagacccataaagtttccaatttttttaatacaaggatcctcttttcttgtttaaaattctattaatatgaagtagcaataaactcaaacaataaattttaaatctgactgaataaacaggtatgtttatatagattcatgagcccctgtaataattccatgctcttaccctacccttgccccctagcccatgatgctcagctatgaacctacactgttgagtttatctggctcgtgagcttaatccatagaacgtgattatgacacatgatcagtgtggacacagtggttatttgaagacaaacttcctccctaatatgaatggccccaggaaagcctggagagtgtgtgaaatatgtgaacacatgttccatatggtggcacccagaatttctagttccacaaaaaaagaaagaaattataataaataaacttaaaagtaaagaggaaagagtctaaatctgactagaggtttgggaagtacaagtaaggcaaccactaaggattttgtaaatctagaataaaaggcaactgaataaaaaacaatggaggtgcagttaacaatcgtagtgaaggttgcttgtgtcttttatcctgctctatagtaaggttacagatggcaaaaaaaaggcaagacctcaaaaaggaaaatgtttctgggtaaagataaaaccgtattgctctgcttgagctcacaaaagagtcgcaaagaacttcagttggggagagaaatggtagaggttggatggaagatttggcattagatttatgcttgaatttcatctctgctattagctttgtcatgactttttgcctttaagttagttacttaacctctctgaagcttgtttgtctgtttgtttttgaaaaaaaatgttcctctctagatgaagattaaagaagacagtttccaccaaatgttggactcactaaatatattgtggaaagaaagactatcctctatttctcaggtttatttagttatatagttgcatccaagcctcataccagtagagtcctttttttatgcacagaaagagaaacaaataacacttatgaaacacatgtacattttaattcccaagcacatcctcaaaaatattttgttattaaactgaacccaagttcagagaatatctctgtctggaattgttcttgttgtaccaattatccttatctaaatgataagatagaagacttcctatcagtgtcttttccaaaaaggaatgtctccttgaacttaacaactgctggttcctttcccttcaaaacattcacgattgagtccccttttagttgtaaatatctgggagacattcagcagccttttaaccttagattcttcatttgtgaaatggaattctaatccttgctctgtctaccttacagggttgttgtaaggatcaaatgagataatgttagtagacattctttgtgaactaaaatgtgtcaaataagtcttaaggaatttccatcactggtgtaggttgatcaaccacgtttttccactagtccgctcagcagagaatccctataggcatatactatgcattctcatgatttctcttttcctttcacacacagtttggaactgaagtggtctcatattgaatggtcacagaccgaatatgaagtctgtgagaatgtgggtttgttgcccttggaaattatcagaaggggatattccatggactcggcctttgtgggtataaaggtaatgactctgaaatgtaaattatcaagctaaaacttatgttgttctttggtgtctttcattatattttttttagaaaaattcagagtgaccaaggaaatttcaaattgcagggagatcccactattctgaggattctaagcacaaaacctccttggccctccatccatcatctaagttcataaactctgagatatgattttttagtgtacgtgttgctgaagctagcacaagagatattattattattattgttattttgagacaaagtctcgctcttgtcgcccaggctggagtgcaatggcacaatctcggctcacagcaacctccacctcccagattcaagtgattctcctgcctcaggctcccgagtagctgggattacaggcacctgccaccaggccctgctaatttttgtatttttagtggagacggggtttcaccatgttggccaggctggtctcgaactcctcacctcaggcaatccatccaccttggccttcgaaagtgctgggattacaagcgtgagccaccttgcctggctgagatattaatttttaaaatccatttttaattttgaaagctgttatttgtttctatgaactctttagactttgaggttttatttcatagggagctatattcaactttgtgaacttgggctgaactctgctttagaaagagatgttgtatgcaagacattctgtggggtacccagagcaaatttcagtcccaagaggctttctcttagtattcacctcagtcacttcccatgggctcagttgatgaggcaaataggcagcttaaacccatctatcttaagagttgtccaagccatacaaaattaggagagcatatactaatacaggcaccctgaaatatgaagaattttcagttaaccacttctagatcagtcaacttgctatttcttttcattgatgtgacccatgaagcacaacctatggcttctagaattgaagaattttttttaggagtcgttataacaagagcgcttcaagagaatgagagcatgaaacacttgtacacactaatgatggagaatgagctgtaaagactcccccccaccccatccccccaccatctgatgaaaaagacactggtattagcttctggggaaaaggccatttctattaagtctcaatttaataatgaactcaaatcactctcagaagcctgggaacataaatttgaccatatccaggctcagtatttatctttccagtggacacaggtcctttttcctagatctgttggttacttttttgttattaagacaggagaaaacttggcatgccctatagttttccagaagattgcttatggaataaggaagaatctgcctggatggttttctaataatcctcccgtcctccatagaaagcaccatatgctctaggctggagttttgggccacgccaccattcaccttgccaggtagaaagaagaggcatggtgttacatggaaccttatgcttatttatgctgaaagtgcacaacaaacgtgccagctgagtgtgcaggccttcatcaagcacagtcccagagtctttcaggacaactctaccctgagcacaacctgcagccttacactagagcttggctgcttgactgggagcagggaaagaggtggtgcttttaccctgtgtggattgccctggtttgaattgtgcaccttcacctgactgatttctccaaccaccttgcctcagaccattccttttcccacataggattctgtaaactcagtggtagtaaatactaggtaattggacatgcaagaaccatgcagggaaatgcaacttccagcatatggtggatacaggtgtataatgggctgccttttcacaatgaaaggtggttccagaggagccttggcattgtagacaaagagcaaatggaagcttaggaaggtaatccccttttccagcaaaatgtttccactgctaaccaattaatatatgagggggcctttgatttgaaatggacatattgtctgaggccatagaagtaggaatttttcagcttttcattatgcacttcattcttttgtcagaaggtacagaaatatattatcccacattcctgaccatcttaaacatctaaaaaatacacacaagtaacagaaatgcttgcacacggttctcatttgatgacttatttttcaaatcagccaaagacactttttttttgttttttgagatggaatctcactctatcacccgggctggagtgcaatggcaccatctcggctcactgcaacctccacctcccaagttcaagctcttctcctgcctcagcctccccaggaggtgggattacaggcggccgccaccatgcctggccaatttttttgtttttggtagagacggggtttcaccatgttggccaggttggtcttgaactcctgacctcaagtgatccacccacctctgcctcccagagtgctgggattacaggcgtgagccaccgtgccggctcaaggacacttcttaacatgtgtttgggcaccctttgggtggaattcaaggccatgacttcagagcgctaaaatcgcctctttggtttttagtcttggggctggagctgagaagcaggggtgtatcaatagtctccttagactagggcatttttgttgttgttgttttaaaacacctacctgacggggtccttgaaagtccttggttttgggtgtggatctcctttgtctggttgttcaccaggtcttccggttccacaaaactctcctttcatgtttgtgaagagtaatggcttcatccagacaggaaaatgaaccagatgtgtttgagttaatctagtctaaaggctttcagtgccctggagcttgcaggatacctccaagctagctgacagatcatcacatgggttgtcaggggtacctgctttttcttctcctcatcaattttctccctccttttcttttgagggactattttaaaaccaaattgggatagaaggaaggtaataaaattgtgcttgcaacaaagacaaaaatatagtttaaaattcatgttcctttcttcaataactaaatcatttataaaggaaaaaccaaacaaaacaaaagctttcctttccattgatattagcctaggaaaaagtcaactttaaggaaaatgcatgttgcctggatcccaaatggcttatataatttttttaaaaaccctacctaatattaaaaacagatttaagagcatgagtttagtccagtatgagggagaatagctgtttctctattgtagaatatttatttttatcttaaaaagatttttttttccctcctaaggtcaaccaagtgtcagctgcagttggaaaagatttcaccgtgattccatctaaactgattcagtttgacccaggtacattttgtgtctgcagtttgttttatgtgttttgttttttgtttttttttgtaggcatgtctggagattgtagagaagatagaatgttacacaactttagccaactagaaactcctcagggagccataccacctcactctaaaagagaggtgtttggatttgaggttttgcccttatttttttttagtaacaaatgaattttgatttcaaatgagaagaaagattataataaatatgagatatcaaagcaaacatccaagacaatccagaaaaaaatacagtcacttagaaattatttgaagttctaacacaaagctgttatagtttaattgcctcagatattttatgaaaattttcagaatgttatgtttatatggattcctaaagggcatttctaaatgatccctcatggaataggttgatattaggagattccaggggaaattattatttagttaagtagcacttactttgttttaaatttgtggaaaaattttgctaggtgcaagtggaaataaaaaaggctggtacttgctctcaagtgtgttccattgtgtgagaaacacagacaagaattaacactcactgatagtgcactgggacccaaaagatgagctgttgttcaggctaagagaaatcttggaagacttcccacgggaggcagtattttagcatttagatgaagaagaaaactccaggatgaaggactaacacaaaagcaccaacacacctttggggagctgtgcctaaagctgaggctggagcccggccatctttccctggcttctgtggatgggacaggtagctctgcctcactcactgcatgccactctctatttccctggggtttgagatggatctgaatcaaatgtgggggcttgggagtggcaaatacaatgggcctggagaagcagacaggactgtggctttgtgctttcctgccaaggagatgttctgcatactgagaacactcctctaagtgtgaactattgacatcatctgccactaactcataaagagttgagcaaaggcaaaagaaaatggcctaagtaccagcaccacctcaaaattgcctatcttaatgtcaaacacagaaaagaaatggctctctgcagttcactgcaagtagcatgatgcttgaggactgtgttagtttcttcaggctgtcataacacagcatcaaacagtgggtagcttgaaacagagacatcgagtgtctcagttctggaggctagaggcccaagatcaagctgtcagcatgaaggattacttctgaatcgattccatgcctctcttccatgcttccggtggctgggtggcaaacgttggcattcttagtgtctgctgcctcacctgcatctctgctttcatcttcacgtagcgttctccttgtgtgcatgtctgtgttataaagtccctgccccttttttcttttttgagatggagtcacgctgcgtcacccaggctggagtgcagtggtgcaatctcagctcactgcaacctctgcctcctgggttcaagcaattatcctgccttggcctcccaagtagctgggactacaggcgcacaccaccacacctggctaatttttttgtatttttagtagagacggggtttcaccttattggccagactggtctcaaactcctgactttgtgatctgcctacctcagcctcccaaagtgctgggattacaggcatgagtcactgtgcccagccaagtccccctttttatacaataccagtcataatggatgaggagcccaccttattccagtatgacctcacattaactaattacacctgtaattaccctagttccaaataaggtcacattcagaggtactgggagtgaggacgtgaattttttagaaacgccattcagcctataacagtgaaccttcacttcgacatgcaaaaatctgtattttgtttttggcctccttcctgtgatagttaacattctaactcagataagctggttcttccagctgacctccttttgtgggaagagatcctgttatatatgggaaagattcctgttatttatgtgctgtttactcccacactggtacaggctcttgcggccaacccaacaatccctacaatgaaagggtgagatgatgtgcgccatgtcccttcctacttcatgttaaggcacttccaacttttccatttcttgagtctttgccatatgtcatcttcataatttgaggtctgtttgctacaagatcaggagtaattttggctgctagtaggtttcaggagcccatcaggtgctctgtttggactgataggaactagaacgtgtcacactacaagagactctgaaatctgtctcttggagattccactggataagataaatacccatttgtctagaagagctcacatgctgttttgagtagatactaatgacttctgggggctgtaaataatcttatgattttagatattatttagacaatttaagaaataatataagcatatcttataaattaagaaaaaaacaattggctgttcattgttttagaatttattaacccagaagcagttttgcaaactgaaatcttgctttagagaattttgaagttctccatgtccacaggtccagtaaatatttactcctatcttgttaatccttgcctcttctgggtctggtgtccccatccccatatccaccccttttaccaagggaaatcaatttgtttcttttaaaacggcagcttccatgattgggtgaagaaacagagtgaaaaaccgaagacagtgggatgccgtaaggtttgagaactcttacgtgggagctggaaggaagcttgccttgaagttgcaactatgctaccaaaccaaaaaaataccaaacaaacaaaagcaaaccctaactactttgcattcagctattgtgactagtcttgagtggatataaaaatactcctaagaaaatgattgttttcctttaaaatatgcattattgaaaggcttgcagcattcttaattgatcatcattccttagagtcaaaatgttttccaagggaacagatctctaatgtggcatttactaaaaaatattgagaaaatgtctttcaatagagaaatctgctttgcaggaaaacatccaggaactcacctactctgtaaagtggaatatgtctgcataaaatgacacctctgttttctcttcagcaccttttgttttgtgggaacagggagccagtccaagccttctgaaaatgcttgtatatctcagggacttagcaaatactttgcaccttgaaagtgaaagaggaagggaaaaaatgataaagttttgacttccaatctcattaacctaaagagttagtcctctgtgcacacctggaaggcatagaaaccaagttggaatgcacacaaacaaatcagaagcacttaaatgaaactcaaaagatattttctccaacccctaaccatctggttctactccgtaaggtccaacaaaaaccttaagttttttgttttttgtttgtttgtttgtttgtttggggggtactataattttaaaaaattaaccttaaaatcagagagtcggttgggagttggaaatattttctgtattggattttatttacatgatgcttaactttatggtctttgagggtcaaaacagttctccaagtactaataatcatattattcatatgctttcttcattgaccacctcttatcttttcatgccaattgtattacagcagctgtctatgtggtcttcaaacttctagcctatctgtctatctgcctggatctccagactttctcacataacactctcaggttcattttgctaatccactttcagtgtgtgacttctttgttcaagacccttccctcttgcctatgttgtaaagtctgaatctggccaggtgcccagggctctctgcagtctggctacaaataatctttgcagccttatggcctcctgtccacccatgtaacctctctattccagccagctaattcactcacccttcccgagtcaagacctctgctttgctatcttcctgtctttacttatgttgttttcctgtttcctccctcctaatcctttcacttctaaagcccacatttatataggctctacaatctattctgtatcttttagtaggtaaacatacatagctttcaataattatttgacttttctggttttgcttctgtctcccccaaaagattttaagctcccttagatcagggcttggcttatgttacacctctggtattctccatagcatctaatgcaaagataagcatatcataagtacaaaatatatattttgatgtattgatttatccatccatgagatgggaattgtatggtattattatacatactagatgcttcaacttctgcttttgcaaagactgtgaacgtaattggtttaaaaactcagtactggaagcttaataaattagctgtcagcctgtttttgaataaaatctatttattccaagtacacctaattttttcccctctaagtgcagccagccaaaagtagaagaagtggatagcttcacctttccattgacttctgttgaggattgaagagactgattagatcatgagatctatgtgaggcataccttcaagaaagaggccaccatatagatggacagttgagaggtataagtctgtagaaggcaatctgcaagataaaagagtcgttttttggagatggggacaaggtctcactctgttgcccaggctggagtgcagtgacacatcctgggctcactgcagccttgaccttctgggctcaagcgatcctcccacctcagcctcctgagtggttgagatcacaggcacgtgccaccacgcccacctaatttttgtttttgtttttgttttattgtagagatggggttttgctctgttggccaggttggtctcaaactcctgagctcaagtgatctgcccgccttggcctgccaaagtgctgggattacagttgtttaccactgcacccggccaagagttacatttttaagagaagactttttaaaaagtttaactgtatcatatagaggggcttaaaggagtaaaagcactcaaatagccaatgagcaaatggcagagtaagcttttccatctcagctaagaaaagttaaatcgataagtttactgtgtttattcctcttaaagttgagccttctttctccacttaaaagtattccctttacttccttccaccacttgttcttctaagtaaactcaggggatatcctatgatccacatcatagaaactggtcaggatgagatcatctcagaagtttcttcttgcagtcttaatattttgtgtatctggggttgctttgtttccagtcttggtgttgacaggatggctgggatatgtttgtaaggtcaaaactgttttgtataatattaagttcacaaagttactgtgaaccaagcttgattgtaacttcatgaatagaggcagccagaaagagggaaaaaattggctttatttctagaacccccagcccataaattctctctaggaggatatcaaactactgagtattatatcatcagaaaaagcatttgtgggctagaaagatctcaggaagtggggaagccgatgcaggcagctgtctttagaaatgattaagaaatcaatcatttcaagggttccatgaatagcatgaagtaccatccaataatcacttctgtctgcatcaacagcttaagattttttaaactattaagattttgagattgcaatacttgtttactcttcagaagagaagggacaggttgggaaaataattaagtcttggatctcatctaataaccattttttttttatcccttgcatactgcagcttacttttttgttacagtgtttgcatttaaacggaaacatcatcgtccaggaacaaatgtggtcttttcatattatttgggagaacagcaggacttcagtgagttggtagcagtacaatagctcactcgggctactgcagtctagctgtagacatgttaattaatatatttctctgacacctaggtgattgaaatagcaattaaagagtaattaaaatgtttacttcttgtaggaatgtcaactaagatgtggaatatagcaattacctatgacggattagaggaagatgatgaggtctttgaagtaattctgaactcccctgtgaatgcagttcttggcacaaagacaaaagctgcagtgaaaattttggactcaaaaggaggtattcttttgatcctcatcttgaaatcaggagcggtcctggcgctgtagctcttgccttcaacagccaacgtgcttgataacaccttcaaatcaaaatgcttaatttcttgtcaagaaagcaccctcagtcgtgatgtaggccctttattctggtttctgcttcatgtggttttcctcctgctaagtacgatcacttgagaaaagcaacaagtcagtgccgtagttgtttttttcctacccgtttgttgttctcaccgagggggaaacagtgttggtgagaatctgtcgacaattattttccccagagtctgtagagctataattatctttctctgttaaagagcactcttaatgcctaaaatctgagcccccactgtagtgtgaccaggaaaattctaagagaggaaggaattggagaaaaatagatgtgaaagatgcagctggcttgggaatttgggagcagctggagaatattaatgaatgactttggatggcagcgccaaacaggtcctggattgtctatgctaaagaacaacctgtgaactaaataaaataaagaccagccagactctttggtgctctgatttttttccaccaaatgccttttagttacttgtctttttagcatttgacgagtgttcgtaccatactcaatcttacactcccatttttatacctgtcatgccctgtggtccatatttttttcttgcctggaatctattcccttctcttctctttcctactctataaaaaaatgggacctcccctcttttctttataatatccttgtttctgcaacatctctccccactacctttcctcaccaaatttatttcttttccagtagaattttctggtcacatgaagtacataaaatacatgatatacacaccttatatgtgaaatataaaatacccagacaagggttttgccctcaaattttttatgccttcccagaaatactaattggtgaggtttccaataggagccgctctattaagatttactgggtctttgttctacagcaactaagagaaaagttttataaatactacttaattctatgacatctttaaacaattccagtttctacctctaggaaatgattactttaaagtgcttgtggaataatgcttgatcagtgaataaacttttatgttggggaatactataataagagaagtgagactttccccccagtatatgatatgataataaaatcataacagtgattttcatttggggtttatgaaattgatttcatgactttataatcactcaatagatgtgcagacgagcacagctttcctggatgtaaactgatgaagagtaaaggagtttctggcaaatggcaaaaaggcaacatctggtgggaaaaccatccatctaggtttaatgacaagctgctccaggagctgtgtcaatgtgataccttatctgtttgtgtaaaatgaactgaccgcctgccatcttgcatgcctccaggacaatgccatccttcatattcctccaaccaaagcaagcacagcacatgggagaagggcatttggcatctgctgcccccagggtcttcctcatccaccacttctggttcctttcatctggaaagaagacctcttccatcttccatgcagctagcagtcatcaggggagacaccctgcggggctttgattctacagatctttctcaaaggaagcttaggacccgtgggaatggcaaaacagtaaggatggggaccttctgggaaatgatgtgcaaaatacatattaaaaggatcagaagatattaataagtattctgaaacactgaagaagctgttttgattctcatagtgagtgggggccatggttccttgcacagttatgcagtgccttctgtatacaaagatcttgaggctgccttgcttctttaattgtactgaggtgatagatatgctgattcatccatatgatttcttctttgattccttttgtgaccaagacaaatagggaatgatccatgaccctgaaatagagtgagatgaaatgatgcgattgggtgtggaagccatggctttgaccttattaacacagcattctaaccattgcatactctcatatgtgcacacgcgtgtgtgtgtgtgttcttggacctgtgtactatagatataccaaaaaataaagatgtactttttccctgactggaactctgtatgtgtgaatccacacaacaatcataaattctgattaggcctagtgatttttgaaattccaatgatttgggcgtgggaaatcttaagattacatatgttttgtaattgttcagacattagcaagatcttacttggtggttttaccctattgctagttattagtcaatccaattctgttcatattttgttctctgtcaatttcaggttcgtccatcctctgtttatagaaatggaacagacatcatctataatgtaagtgtagtcacagaattgctaaatttcttatatttatggatgcaagtatttaatgaagctattattttatattttttatatttatacatttctcttaaaaaattgttttgaaattagaggcttgggtgttcagagaaacaaatcctcttatctttttgctttgactgaatttttgaattgctcatttttttgtttgctatcttgatgtttgttttttccttattgttgttgattgttggtttcctcaagtatcatgggatagtttccttgaaactggaggatgacagtttcccaactcacaaaaggaaggccaaagtatccatcattagtcagccacaaaagacaatcaaagtggcagaactgcctcaagcagataaggtggaatccacaactgactcacacttccccagacaggtatgaaaatctttgttccttcttactcaccttataacaagttgtttgctgggccagaaacacacttaattcacaaaatagcctccaaggttggggggatagtttacccaacacaaatgcttcccaacaaatgaagacccaaaggaggtgaatgtgtgagcaactttccttaagtcaattctaaattgctaaattgcctttccttcccaaaggaccagttgccctcatttccaaagaactgcactctggaattaaagggactcttccattttgaagaaggcatccagaagctgtatcagtgcaatgggatcgcctggaaagcctggagtccccaaaccaaggtaggaggcaggctgagcagccaagcacctttattcgcaatgtgctctatgataagctaatagaggggaaccatctggtgcatgactcaacccatgctacatcttcctgccattgttaacaacttgaaggccaagaggaaaaaatggcccaaagtggctttttaaaaatcacaaaatatgttagttaaatcaataccatttaagaagatgtttacttattttgttcagttatcagagtgtcaaagttgtaacaatgaaacgttgctgactgtggtagtgttttctgtaagaagccattgtatttctcaagatggagaattgggattagggctgactccctttgtggtaaccaaactacttgactgaagttagggaactcgtaggactccttatgctgaaccaactccagattgtaaagaccattatgatatgaacacagacaactgtttttcaggatgtggaagacaaatcctgtccagccgggtggcaccagcactcaggctactgtcacatcttgatcacagagcagaaaggcacctggaatgcggctgcccaagcttgcagggaacagtaaggcaccctattgcacatttgattggtgttttcttttctctatttctctatttgctcatggaagcggagagctgcttcattcattcaacaagtattgagtgcctaatatctgcctggctttgttttaggagccctgagggagttccctagttcagaatggatttgtgatgggccttgataatgtatttggttggtgcaaaagtacttgcagtttttgccattacttttgcaccaacctaatatttgactgagctcttttctgttaaagctgcaccattgccatgtttctttttcttttattttcttttcctatctcagtctttgtgaggaaatcagaagattttctgagtcagcagcattgcagtttctttttttatgtgataagaattcctgcccatttaattgaaagtatatagtaatgaaaagccttataacgtcgggcctctagcaatgcgattatacagcaatgattataaagctgggcaagtaagacaaaggctcactgggtaaaagaacattcaataaaggataacttatggtcagagaatgacaaccaatgtatgtagtccagaaggactttaaaaatgcatatgtacctatccctgaccctcctttttgtttgccaatctggatattatctaaacaacacaattagactaatatgccctatggctggaaattgagactagggaagtctctggttattattgatctgatctcgtacttcataaaatttaaaaagttatacacatctaaagactccattaagaaaatgaaagagcaaaccatattcagaaaaagctgttctcaaatcataaacctgataaaggtcttaaacccagaaaatacaaacaacttcaacaaatcaatgacaaaatgacgattcaaacaataataaatgatttggagtcttcgcaagagtagatgtccagttggtcaataaataaatgaaaagctgctcaaaaccgttagatattaggtaaatgaaaatgaaaaccacaatgaaataccacttcacacctactagaatagtttgaagtataaatatgacaatccaaatttgtttttaatttttaaacttttattttaagttcaggggtaaatgtgcaggcttgttacctgggtaaatggtatgtcatggggtttgttgtagagattatttcaacatccaggtattaagcctattactcattagtgatttttcctgatcttcttcctcctctcactttccaaactccaatagaccccactgtgcgttgttcccctctatgtgtccatgtgttctcatcatgtagctctcacttatgagaacatgcagcatttggttttctgttcctgcattagtttgctacagataatgacccccagctccctccatgtccctgcaaaggacataatcttgttcttttttatggctgcatagtattccatggtggacaataccacatgttgctaaagatgcagagcaaatagaattctcatgtgttgttggtagaagtgtaaaatggtacaatcactttgtagaactgtcttacagtttcttataaagttatatgcatctaccctatgacctaacatattctactcctaggtatttaactaaaagaaataaaaatacatactaaaaaagcttcataaaaatgttgtataataactttattcataataatactaatttgggtcatttgttttttgttattgatgtttagaaatacttgatattttctccatcagcaagagaataaatttttgataaattattttataagtgatggaataaaatactgaagcgtccaacaatgtagataaatcaaaaatggaacatagagagaaagcagccctacacaaaagaatacttattatatgattgcatttatataaataagataatataatctatgttgttagaaataaaaaattgttatctttggtaagattgtggaatgactagaaaatagcacgaggtaacgttctaaagtaagagaagtgttcaatgtcttattgtaagtggttattaaatagatgtatatacaattggcaaaattcatcaaattgaatatttaaaaatctattcattttattatatgtaaattatacccagattttttttaaagcgaataaaatgttttaaaagtgtgttcaaaaactagttaaaccacctttttctctactggtgtatttcatgttttaactgtgagtagagtcaccagagaggttaatcagtggctttcagggtttttttggttgataagttggtggtatcaaataagataaaatattaaaatttttacaaataataattgctttaaatacatatatttccttagtgctacatgttaaagaacaaataagacattcttccgtcattaagatggttaagctgttaaaatgacatcttaactagatgtcatttagtttgtcgtaatgcactgaaagctccagtagaagtagtggtattggtctttttttctccttgaggaaagggctttgatgttgatcaaaagctatctaaactagcaagaagatgattgcagtatgcaacaaaagggagaatactatggtgtctctgcttacaaaattaagggaaagagtagttatactccagccaaagttatcaaggttaggtgattgctgggatttgttgataaaatgtagatgaacagaacttcccaccttgaagtttagaagctatcttttgttcatcttccaatggttcttaaaggccaatgcaagtaactggtctataatgaagctttcattggttcttaatgtatgagaaaaataaggacagtaagtattgagaaatatctttccattcagtcatggatggtggtgtcacattgccaagtgtgtttttttaaaggactgttctttattacgagattataatagtctagctttttattgtcaaaaactactttttatgaaataatagcaacttataacattgtcgatgccctcatgttgacaaacctacatcagtctcccatcatcttttgttttcattttattgttccatctattaataattgtgactaggttctattggtgagtagcaatgagttcttcacgtatctatgaatactgtaccattcgatcatcacaataataaacttaaggcctaaattaatttaaaagcatagatactttctcatgcacttaatctaagatttcatctgcagcttggttttaagcaccttcacccatgacccttttatattagcctgactgtagttctacatgcctccttgtcaataatgtcttacttttatatttatagtatatgaaattgtttcacatgcattagcttattggatccttccatcacttctcttatctacagtttatggatttattttaaaaagaggttcaaggaagcgaaatcacttgctcacaggtatacaaggaagtaaatgaaagagatagaatttagtttttcatccttatactctctaaaacaggtcccctaagtatagcaggtttctcatcataggtgtactgacaagtatgtctattttaactatgttttgaggtaacccaaagtagattttcaaaattatgtgttaataattgtttttctctcactgcaaacacatataagatttttattaaattatggatcctaagtttcctctggatttgaatcaaactaacctttcaaggcgaacctaaggtatgatcaaattcctagtttatagatacattcatttaacaaatatttctgaaagtcctttacagagggtcattcacaacacccatatttccacaaggacagcaaattttgctttatcctttgtccctaaccagattgctaactcaacttaatctttatctctagtcttctttcctccccagtggtgttttattatttttctaagtcaaaggagccagactcctagattatgcacttcttgaatttacatgttgtaatctcatctgctcatttcctcaggcagtcattgtacatttggtaattatattattatagagcattatctatgaagccattttgttttcccgcaggagtgtctggaacccctgctggcctatccttagagttaccctgaagtctacctatacttaatcaaaaattttcagagaagtagatgtttatttctatagccagaaaaattaaagcttctgtttctaattctatactacaaatatttgtgtatgtgtacctatttataattttatatccatatatacacctatacagataatacccaccacattttatatgtatgtgagcataaaataaaaggagtgatatttttctaaaataataaacatatgaatacctaaatgtttcttttgcgaataactatgctcttaacattttacctgtcttgaagcagagctatcttcccatctcactcttttggaacttcttgctttctggagagtcaaaaagaaaaccgaaattgtacttgggcagctaaaatggattttaccaagtttgttttaaagatagcttcaggaatcttcaagctagagaagatgttaaatatccttgaataaaacccattatatcctgatgctgaagttgaggctgcaaagttagggaatttcagtaagcaaattagttcaataagagaattagggaattcagtcagggaattaaggggtaatcaggaagtagaatcctagtctctcatgctctgtacaaaatgtcatagtgactgggacagtccctcaagccctccctcagcttatatttaacccaagtttcatattgtgtgttctaagcctacagcgctttagagtgagcgtgttggatgtgttggggaggggaggagaggagatgcctcatcatacctgctgtaactgtcagacaggagctgagagtcaataatgaggtcagagccaagtcacaaaacccaatccagcggtctaaggccattcagtggaggggcaaagagccttatatatctaagaaggcctagaaatcatcattgcatcagacagcagcaaaatactgttattagtagagggaaatcctttaaaaatagacaaattatgttcaccatatctagtctggaaaagcagagaaatagatctgaattttgaaaagacataggcaaaataaataaaattaaatttaacagctatctgcccgaatgtgttgctaattttgtttcctacttttcttttcatatcaatggatattaaccaggcaaaaagatcatggtgatttaatttttttccttgtttgattttttaagtgtttaaaattattttttaaaatttaattttatgtttaattgacaaataatacaaattacattgtagggtacaatgtaatgttatgatacatgtatacatgatatatttgtttcttgtttgaaactttctgttttttttatttttaaagaagaaagaattacttagtggcttcttacttaaagcatttttaaagaggttttaatgagcactgctggggaattaggcacaatcaaatatcgcttctaggaataactcagttagctgcaaaaataatttataaaaaattctgttttgtgaaaaatattttacatatgtttgtaaaaacaagcactttaatttctgtgcattatatgaaggtttgacagttggggctatactcatttcattgagtataatgaagtcataataatgtgtttatttggctaaacccactaagctccaaatttaaacctgaagtaattttatctaaatagttagtttgggttaacttactcatcaaattaacttggtatttgccaaatttataccagctagaaatacacttatgagaagaatagtattttgtcattaaataagtaattgttataagtaggcagttgctgattttccaaaaagatgtttgaaacctactgtttatgtttgaaaacctatcgatgttttttgctgtaaagcccagatattataataaaccatcactttctttgatgtcacctacccccaccctgcagatactttttaaataaaactgcactattaaaatcttagaaagtttttttaaagacctacttttttgtgtattttaaacttacttttatttctgttatgcatttcgtatcagcagaaatgttaactgcttgttgctgatactctcattttcatttgcatttagatacctgggcaaccttgtaactgtattctccaggcagcacatgcggtggctctgggacattggtgggagaaagtccttttggataggcaagtatctgggagggaggctgcactgaggagggaggcaaggacatgaaacaaacaggcaccaccaccctgctacttccttccatgggttaaatgatagtggtttacaataataggcaaccaatagatctagccatttatcttttaaaactcatcttaaaccttttttttgacacactactttcatttttagacatctatcccaaagaaataaataggaatgtggtcagattgacaggcaagagaattcaatgcaataacatttctaaaaccaaaaaattagaaattgctataactaaagaatggttaaataaattatagtacagccacatgaaggaatatgtaagatttaatgtttttgcaagccattaaataataaagacatgaaaaattgccttacgtttattaattcatttaacaaatatatgttggatgcacattatattacatataaaatgtaaagtgtattccatttatggcaaggtgcaaagtgaaaatgcagggtccacatccatataaagtatgaaataatttagaataaaaacaattatatgcatgtggtgtatgtataaatataaatatatattatatttgtatatataaatatatataatatttacatattggaatatatacatatattcatatatatatgaatatatatatatgaattatatatatatatatatatatatatattccaaataattagaaatgacttacctccagtcaagaattataggtaggctgggtatggtggctcacgcctgtaatcctaggactttgagagaccaaggctggaggattgcttgagcccaggatttcgagatgagcctaggcaacatagtgagaccttgtctctgtgaaaaatttaaaaattagccaggcatggtggcagctaacagtagtcccacctacttgggaggctgaggtggaaggagtgcttgaggctaggaagttgaggctgcagtgagccgtgattgtgccactgcattccagcctaggcaacagagcaagaccctgtctcaaataataataataataaatataggtgattttaattttattccctcttttctgaagtcttaatattttctacagttttaacaataataaatcttttttttttttttttttttgagacagaatctcactgtgtcacccaggctggagtagagtggtgcaatcttggctcactgcaacttccgccccctgggttcaagcaattctcctccctcagccacctgagtagctgggattacaggtgcccactaccacacctggctaagttttgtatttttagtagagacggggtttcaccatgttggccaggctggtctcgaactcctgacctcaggtgatccacctgcctcggtctcccaaaatgctggaattgcaggcatgagccaccgcacccggccaaatgacaaatcttttaaaccactttaaaaacagaattttcagggcgcatcaaagtcagtatccccactacttctctttaaaggcgttgtatttgagggaactgtaatagttccctctcttggctttcactatttctgcagtgctcagtgggtccctaaattctgaaatgaactgagtattaagagacaagctggaggataagttttctctacatccataatgactcactgcaaggctctgtcctcacaatatgcttaggcagaatgtcactaatcaataattcagggagggcattcctaaccaaaagtatttcatttcattccacccaaaaatacagactgaaaaacagttggggaaggtaaaatgttatgtatctaggactgttttcatggtcaaatttgatttggggaatgtcggatcatgctatggcagggagttcctttctcattttattcttttttatttctattatgaaagagagtgagtaggggaatgcttaagaaaatattacagaagctttacaacattaaagtgtaatttgcaaaatttgccagtggaggtagagaggcaagtcgagaaaatctgctttttattggaattgtagcagattgaaacatcttaagctccagactcaaaataatacatagtaagctactttcaaatatgaaaaccaggacatttaaataatgaggaagaaaaataatatgcaagagaatatctgtttccctgtgataggagttctgcatgtaggatgatatgaataataataatagctgccatttattaaacacttatatatgccaagagctttacatgcattatcttttttaatcctcaaaacaaccctagatgtactatttttatgcccattccttagatgaggaaactgaaactcagagaggttaagtaacctgcccaaagatgctcatctagcaagtaagtggtagagctagaattggactgggatttgtttgaccgtttgtgtcttagagtattccaagttcctatcccttgttttagaacctgggcccacacttgcatgtgataactgagcttagagcaacagctggatatgatatctaagtataaacgcaataaaagtaattggtacattcttttggttcacattaggtttgaacgaccaagtgcatgctggccactgggagtggatcggtggtgaacctgttgccttcaccaatgggagaagagggccctctcaacgctccaagcttggaaagagctgtgttttggttcaaagacaagggaaatggcaaacaaaagactgtaggagagccaaacctcataattatgtgtgttccagaaaactctaaatataacagaccctacagggggccacctgg

SEQ ID NO: 15581 - DNA, 45165 bp, Homo sapiens
actccacacctggctggagcaggaaatgccgagcggcgcctgagccccagggaagcaggctaggatgtgagagacacagtcacctgcagcctaattactcaaaagctgtccccaggtcacagaagggagaggacatttcccactgaatctgtctgaaggacactaagccccacagctcaacacaaccaggagagaaagcgctgaggacgccacccaagcgcccagcaatggccctgcctggagaacatccaggctcagtgaggaagggtccagaagggaatgcttgccgactcgttggagaacaatgaaaaggaggaaactgtgactgaacctcaaaccccaaaccagcccgaggagaaccacattctcccagggacccagggcgggccgtgacccctgcggcggagaagccttggatatttccacttcagaagcctactggggaaggctgaggggtcccagctccccacgctggctgctgtgcagatgctggacgacagagccaggatggaggccgccaagaaggagaaggtatctcgccctccattgggcattctgggagtgtttgcttgcctgtccccaacattccatggtttgtttgagcctcagaatctgattttatgcacaggctctttgagaagggtcttgccaggggtgccttctggggcaggaaggcccctactgcctggcagacccatccagctttggactctggtcctgcgacccggaagtcaggctgccaagaggtccaggcagtggcctccactggggaggggctctggagagtttagagccctagatgtgggggttagggacatgaggtcttgtggacaaagcccactacctgattttgagacaacactcactagacatggtgacaagtcaaagatgccttgcctcctaccaggaatcacttcgcagggagcccgagggctgctgtggcctgctgaggagtgcagggcagttactttttccaaaaacaaagagaaatccaggcatgctctgagccagccctgagcccagcagtgagcaaggagagagctggagacaggggactttgctgtgaaacactggggggaatgtgcctgcatcaccccagctgggggcccaggcagagtgggggagaaggggtaagtgggcagagccagtcactttgggcatgcttccctctcgcctctgtgtgaaatgaccaggtcagcataaaccccgggctggctgtgcttctggcagagctaatgatgttaggaggaaaacaaccaacccaagtgagagggtgcgcagccagacagctggaccggccgaggccccaaccaagtcccagatctgcctgtcactggtgctatggcagcaatttggatgagaaatcctgcccaaagggccccttcaggccacccggggagaaggaagcggctgtctttggcatgaccagaaagatggctcggagctagggagaggtggacatgtgggctgtggagatctggcactttccccaaacaaggagagaaagcatagtgtgcctatgtgtgaatgtgctatgtgtgcatgtttgtgcctgtgcatacctgcatgtgtacatgcatgtgcacatatgtgtgcacagggaatcactttaataaaggccacagcagagctgtccctgagccccttgcattcacagtggcatgtgagtgaaccaccttcttaggctgggcatccagtctcagactctggggctgcccatgccccatcctttatctgctccacgtgtgaggggttgctggtcctgaccagggccagctgtgaaccccagaatcctgggaagtcactgacattcttgtcagggccaagagtggagcaaggcaatgcctcgggcacaaactttaaggggtcaccagaaacatcaatcatcaagatatatgctattttaaataatcaaaatgaatgcaaaaaaaatttatgatggacaacataccaaattctaaacaaaggcaggatgagtatcactggcttctgcacttttctccacccagtctacccctcttctagtgcctggatcgcagggtgccaaggcctggatgagggaagcgtggagctgcaatggccactcctgtctgcctgttctggctgcacagaggactcagtccttgtcttgggggaacctatcttggttttagggtcatcctaaggatctgatgttttccaagtgagctggctgtccaggcccacccaggttcagtccagtcctgtgtctctgggaagtgctgcccctaccccaagccagtgtttgaccttggagcaatgagcaatgccctccttccactttcaaagttgtccccaagacgtcagctgtggttgtctctgtgcagacaccgaggaggaactgtcttctttctccttttggttgctttggaggaaagtaaagtgttgctggtttccctctttctacttctttgattgagagcagccgtcttgccggtaccaaccttccagatcttacctgtggttgcaggagcctgtggcctcagtcctgtgcccagtgacttctccatgtggatgtcagctccttaggggcaagcctgattccactgacactactcccacccctcataagccccttcttaccagctgcagttgcctggtaccccaccatcgctgactcattcctttggcatcaaggttcatcccttactgggccaccacttctgggtggcctgaaatagggccctgggcatccctcttggggaccttttggtctatattttcactctcacctcactaaggacagatgagtaaatctggttaactttgcctgatagatttggtgaccttttttcaggaaggagcctggaaagatgagattcaggtgtattggtcagcttagactgccataagagaataccatccactgatggcttagaaacaacagaaatctatttctcactattctagaggctggacgtccaagatcagatgccagcatggtcaggttgcagggagggctctcttcctgacttgcagaccgccaccttcttgctgtgtcctcacatcgtggagagagagtgaaaacaagctctctggtgtctcttcttataagaatgctaatcctatgatgggggctccccctccttacctcatctaaacctaattatctcccaaaggtctcatctccagataccatcacactggggttagggctttgacatatgaatctggggggacacaattcaatctgtaacaccaggagggcatgccgggaggaactgaccttcctccctccagctgccctggacacctttgccccattgaaggagcaggctcagaagtggaatgaggatggaataaggtgcactccatcatgcttacccacatccctggcaggaattgtcctgggccccagcaggagagatgcccccccatactgccatggcacctgctctgagacaggtgtgcagagtgcaaagctccaggtggcccccaagcaggtgtgctgggaggaggggcccgtgtgggaggagcaggcagcgccaaggcctagcggagcagtgacaggtccctgacttcagggaatgggcacgctgtgggcaggcagctggtgtgggggtgagggctggggctgcatctgtgggaccagggctgggccatccatcatatgccgtgtcacaaccccagtgcccctgctgtagccaggacaggaggctgggccaggctgggaggtgacaagagtgggggctgtccccaggagaagcactctgctgcctgtgcccaggcctctggggatgaggacccctcagaaggagtagctatgtctaggaagccccagggcaggagcaagccaaaggggacatcattagtgagatccaggggatcagtgggccacagaagccccagcgtgagcccctctgactgatgcagctaggcccacacctgcacctgcccacagcaagacccccaggaggagaggggacagatggagagaggcacaaagtgcccctggcctctgccttgaagccaccccaaggcaagagagatttgagcccctgtttagtgacctccaggggaacattctggcccatctgatgtgggaagccccttgtggagtctgtcattcctcagctgagccaggcctttggaggcagcccaggcatgtcccctgtgtgctcctatccctgtgttgggacacctggcccagcccctccttctgcctttctcttcccttcccttctcaggagtggacacttcctcctttagccccctcacagctgtgtgaacttctctgtatctctctctttctgtctctttctccccctctctctctgtctcattgtctctctgtgtgtctgtctgtagtattctctctctgtctctgtcactctgtctctctctctctctgtgtctacctttctgtatttcgctttgtttctttttctctgtgtgtgtgtgtgtgtatctgtttttctcactctctctctgtgtctatctttctgtatttcgctttgtttctttttctgtgtgtgtgtgtgtgtatatctgtttttctcactctctcaatctctctctctctttctgtctctcttttgctggcctgagcaaagagggagccccatcctgatgctacataaccgtgaaccagcacagacagaattgtaggaaagtcctgcaagtagaaggatagaaggatgagggaagaaacgccatgtgagtcatgacagatccctttccaggagccactgactcaccctgcctcctgccctcccactgtgacactattactcacagacaggcccggattaaacctatgttccaggtgccctgtggttcccacagtgtggctccctgggtctggcctcaggctccacaggtgcccagccctgccaaagtctccagagcagctgtccagctggggagctgcggggccccttcacagagcgcatgggaagaagttccatcctacacattacatcgagagggacgtgcctgagaaggggagctggagcccgtgcagccccctgcttgcgtgcagaacatagtgtaccctgagcatgccatgaaaaacacaaacgcacaaagttgtaaagaaaaaagaaatgacaggtggctgtaaaatcagttatagcccacgagaggcccactaatgagtggtgatttcagctgattacaaagaaatgatggtgtttctgtaatgaactaaacatgcactcgtgcgtgcacacacgcgcacgtatagtcacataactgaccagccctatgcatcacttgttaattacttagtaactgtaacaataatagtttccaataagtgagccttagtctctgcgcaagggtcagtttattgagcacacgggggccttgcagtgggggcaggtgatctgctcctgggagccgccagcctctcctctcctgctcttcatcttcctccgtggtgggaaattgtctcactgcttctacacctgaggctgaacatctccctttatttcagtctgaaacacatgtaaaaatatactggaatgaattaaggttgcaattattgatatcaggcagtgagtacatcagggtttattatactatctcctttacttacttcgaagttctctattaccaaaaaattaaaaactataaaagaaagaaaaaggaaatgaggctagattcaacacagattactcttaccaaacccttcgtagtcccaggagtcccctaacacaagcacttgtgacctggagtgatattcacagcattccttacctggcaatacctgagtattagcccccccagtgggatctttgttgtagacaaccagcaactatcagcccagccaataaacaagtaggaaaggggagtgctggagaggccaagaagtgggattttccatgctcctgggctgtgatccagagggcacggctgtgaggctgatctcaatgaacactctgtcttggaagtacagggatcctctgctacctgaaaacgttctgagtattcactttcatggattgcaaagtcatttacccaaaattcactctccaaatgaaaagtgagtatgatgaatcagtattcaagttccacctgggtcctgggagagggcatggacatcatatcccagctgttccgacaggaggacccaatctgagtctcactgcctgcctgcatcgtttgtctgctgccagcctgcacagtaggaagggaaaacatgatttgtatctgttttaggtcaggttcccaagaagtagagcctgagattggaattcttggaaaatggtgtttgcgggagcgctgtcagcagaagctataaggaagttggggggacagaaaacgagaggtaagaagccagtcaaaaaggcaggtccagcttaagtccgcctcagtctggttccacaagggctctgatgcatgaagaatatcacagggttgtccctcctgggagaggggccagcctattgtacctgtatcaaagccaccagctgagggccagtggggagggaagatcttccaggcatttccaggaaactctcaggagaagggtgtagctgtgagcagtctgcagctgctgctcactgcggctaaaggctgggtgtgcaggccagtcagccagtgaggtgccaacagcaggcactacagtccaccccttgactgctcagacctactgctttccactttaagctctctccatccaggcacagcttcagggaaaacttacaattggagaaacagagggatgaactacaatgcccacttctgcatgtgattgtaagactgtcactgatactcaccatcatgccccatccccaccatccattctagtgtccccttccccttggctaacactgctggtctaggtgacttccctagagcaggagccaaacccttatccctgaggcatctgaatcctggattcctttatcaggctattgttgttgtaagttgtccattcccaattacaactggacatgagactaccaagaaacaccctggcaaatcatctgagtgcaagccatattcttcctgctccattatgtagcggtagtcctacctcctaatgacaagggtaaattgccacattttgctccttgtgccaggatggtaatacctttctctacctgcttggctactggcacaaggaagcacagcatgaccaggaggcaattgtagctgtacatttagtgaatgtgttaatgtatcacctggtggaaggaccccctctgagaaccaggacttctagacccacaaaacctaaagttgtgaatggcggaagcacaaatttcccaagtggatcatggagagtgatgaagagttcttggttcccaaacccacatattttacctttcaggaacatggcctcatcccatagccattagagtgcatattgcattctggaggagactgggccctcctcatgggtgtcatcttcaagatgacagctccactgtgcctccaagaggatgctccaccaccctatctgtgattccttggttagcaggacaggctgctgcactgagggtaggaaaggcaagtccattgatggctggaatacatgtcaatccaagtcaagagaaaatgccgccctttccaggttggaaggggcccgatttagccaacttgtcacccagtagtggctggttggtctcctccaggagcagtgttataccaggaattcagcaccagtcgctattgctggcagttcttacattcaacagcagcaaaactaggtcagccttgatgagagggaatgtatgcttctgggcacaggcatggcttccttctctgactccatgactatctatttctgagtgcatggtggccgacattcagctgcctgcccatcctatccacttggttattattgcctcttccacaagaagtggtttctggctgtcattaatgtctcatactttgtgcccactcacacaggtttagctctacaacttttccccatgccaccacttttccacaatcttctaatgttgctccttccaagctactgaagaacgagctaagctattcaccaatgtccatgagtctatatttaccttaggccacatctctctccacacaaagtgaataagcaggtgcaccctccaaaactctactaagaggatttcttctccccagtgtctttcagggccaccttgagtggggctgaagtacagcagaagtccatttccagcttgcatcaacattccaaactaacctatccatgatcaatgcatagatgggtttttccctcctccagcagctagacaaaagacaccccccaccaggaggccatatttgcatgtgggtgaaagagaggcacaggggccaatattcgtgcaacagtggtagatggcaggtgggtctgggccacctgtccctgcagcttatctgtgccatctggacctgctcaagcctgattccagatataccatttccatcttatgatggatggcttatgacctagtgggtctgacagcaccaaactcataatgggcagttatggccacatggtcacttaatgtcctatggtcagacactctgctgagtggcatgccaggaaatgctttacaagtggtgtttggttctctgctgcagatggcatgaccttggtccggagccctaggggtttggacagtgactcctgttggggcctaatctcacattccatgcagagtatcatcagatttgccaatcacatagcctaagggtcaggactgatccaaccagtttttgcagagatcaaactggagaatgaaaggttgatatgatgtgaccatcatatcacgtttttctctcttgaaaagtatgcagatgtctgaaagagacaagtgccccaggagaaaatgcatgccttcctcaggatcggcccccacctcccctcctggccacaaggagggtcaaatctcagcatggcccaacttggacctgtcaaggaagaagaaaaaaattgtatgccaaaggaactcagtctttggctaacaagtactagacatcctttaagtctttgagaatggtaataatttctgccatccctccagatttgtgtttttctgttttggctgggtgggaatgcagcattttcactttgcctttgttattacaaatgttgcttattctataaatcaaggaaccattgtaagggctcttctgatggttaagtatatccattccaatgatttattcgggatccaaggaaatgatttctgggtgaatacacagaactagtggatccaatttgagacatacctgggccagaactatatttgtcgtcttaccccaataagcctgcactctactaggacagccatgacagcactttgggaccctagatataagtgtgaattgctggctgggcatggtggctcacgcctgtaatcccagcattttgggaggctgaggcaggtagatcacctgaggtcaggagttgaagaccagcctggccaacacggtgaaaccccatctctactaaaaaatacaaaaattagctgggcgtggtggtgggtgcctgtaatcccagctactcgggaggctgaggcagggagaattgcttgaacccaggaggcggaggttgcagtgagccaaaatcacaccactgcactccagcctgggtgacagagcgagattccatctcaaaaaaagaaaaaaaaaagtgtgaattgctatgaaatcactatcaaaagatctgagtgttacccttactcagtgtggtcgaatataaatagccataggttcctgttatacacacttgctgtggtgctacagagtctttcctcatgggaacccagtccctctttcagtcaatgggttctggttcgagaactggctgaggtttggaaactgtgcctttccatcataactttccactggggtgactgaccttggccttctgttcatcctttctagcccctaagaatccaacactctattagccttctccttagacccctataagctaatcccttctagttgttagtctgaccttggtgcccaatatgataattattcccactttgcttctgatatgcttctaagtgctgcccctggtctctgcccttaagtgatctatcatccccactgccattagggggagaagctctgaaaaagagttgtctcccatcaactctggtctacaaaggacagccctactgagcctcagccatgtgcccgacaccagcagattctttacagcctgggaagcagagtgtcttccctgcctttccagggaacatagccagcttacaggctttttgatcttatagagtaggtcagttatattttgccccatttcttttatccttttgatcacttcctcttggcccaccatgtaaactcaagcatccctgcttcatttaatcgagctgttgctttttctaagctaccaagagcaaccccagcaatatatcagagccctctcttgggacccttgctagggtgttaaatcctgcatcataggagaatgcccccacatcagcaaagtccccttatcctcttgatatcccacctgccccagtccagcaccttcaggatctggtctcaatcacaggatccagcacctttgggactgttgcaagcataagatccagcacttttgggatctagtctcccacttcctgctagtacttgttagccaaagactgagttcctttggcatacaatttttttcttcttccttgacaggtccaagttgggccatgctgagatttgaccctccttgtggccaggaggggaggtaggggccgatcctgaggaaggcactcattttctcctggggcacttgtctctttcagacatctgcatacttttcaagagagaaaaggcctccttctcacagcaagactacttctgtagatgcaggtggctcgtgggaatctggcaattcaaaattctcaagtgtactcactagcacattagaaaaccagtagtacacatctctttccaaatcttcattcagtgacactatgtcagtagctggaaatgggccatggtgggtgtatttaaaccatgaaaatcagaaaatgctacaaaccagggcatcccgcatctctagacagcagattgttggccatttcccagcataccattgtgtatactccttcccatcagggccgtggcttgccttggtggaggactcagcccttgctgaagttctgctactgctcttacaattgagtcctatgcctggtctccagctctgcctgcctcactacaggagacaagcatctctttgaacactgccgagaagaccctctggctctcaggcttggctttaaatcgatagacctgagcctgccattttctcttttccatgcatcactccactgatccacaggtctcagtggcatagtccttcgggttagcatctcccccacaccctcggtgccagagacactgagtaagaaagtacctccctgtctacccccatccccgctccccacaggcagggccttggcgatccactgctgcaatgtgccagagactgtcagtactcctaccaccagtgaggtggcaaccagctgggaagtgatccaactccagagtcccgccctcataggctgatttctaggaccacccctggtatactgtgttaggttcttgaagcagagcctgagataaggattctggcacctgtgattgagtgggagggtgctctcaggatgagatggggtagaaataggcaaaggtacagattcagcagcagttgagcctcagtctgacccagcagggagctctcaaatgtgaatgacatcacagagttgtccctctgaggcaggggccagcctttgtgctcctacatgagtcagtcactggctggaggcccctggggaaaggctagggctgccagctttagcaaataaaaaattagggcactcagttaaattgaatttcagataaacaacaaattattttttagtatatgtcccaaattgtgcataacataatgtgttttctccgccagccctgggaagggcgtaacttcccaggtatttctaggtgaagtaactttgtagatcaggagtaagtcccaggaaagaagtccagctcttctcttcagccctgggcagctgggggtaggcacaggggcccagcaggcacccatagcatctcctacagcatctgaaatgaacagggtcatcacgtactacatacaaatgtacccactgctgagttcttcagggattatatcattaggtacttggtattttaaatacattacattatgcagaagtcctttgtggattgctatatttggagagttttgtgatattggggggattagatggagttttcagatgggcatcatacggtttttcatttaaaaccctagagtattgtaatcctagggagtgatcctgcgattagtaaattagctctccaatagattttcaatgtggttgcaaaggacatgcatgtggttcaccctcccaggaaatccagaagggcagcattggcctgagtggcctgagtttggctggttgggctggtaatgctggacaaagacaatgggtggaatggtttgcttccctcagtcctttcagacacagcccagcccaccacgtcaagccagtgggtgcatctgcaaccaatccccatgagaactgcagcctctcagaggtgggcaagttggcccgggtgggtcaggaggatcagatgttgaggaaatctttggattggaggcaggcagagcagggaagcatcgggtgattctatgacagacccagggctccaagctgcagttcaggaggggcactggcacggcctctgctcaactcccccttgagtgacatcaggtgaagtgccgacaacacagaaggcagcaaatgctgccagtcaggtctgcttcccaggacagccagttgctaacccttctccagcacagcactggattttggtcacctggctgggagctccacctccccagctgctgcctcacctgcttttccaaaccccaccctgtaaacggtaactacattttgtgcccactacgcctcgtttccatctctttggagcacctctcacgtggagctgaacagaacgacctgttaagcccaccgtgtctgttagggttgtctaggctgtatcagatacccaactaaaactggattcaccaacaggtattgtcaaagcacataagaaagagtccagaggcaggcagctctcagcctggtgtcaggctctgggtcagctttccagattctcttaaccttccccacatctgccagatgccgccacaggcacaggaggtacaaacaaacccaaaaatgttctggaaacaagaagggaaggggatccccaccatatctccccagaggccttccttctcacatctcactgtactgaagccagctctagcagaagacagcagggtgaatttgtccagggtattcagcccccagtgctgggtccattactacttgacccctgaataaaacagaggttccatgagcaagaaggaaggggaactggatgttagagggcaagaatgtatccatcccacccctaggagcacgcatggacaactgccccatttttgctcctattgcagcccaggggctagcccagagaccttgccagtgctgagtcacaagatgctgggaaagtgagaccagagcctggtcttggggaacagctcaaggccgcattggtctgcaggtcatagagcagctgctgagcagtgagagcccacgatgggccaggccctgggtcttggagacctgaatgagatagactgggttcctgttctcctgggcattgcctcttagagggcaaagacaattaacaataaacaaatagaacatgaagtgttttccgatagtgactgatatactttggatatttgtcctctccaaatctcatgttgaaatgtaattccttatgttggaggtggggcctggaaggaggtgtctgggtcatgggggcagatccctcatgaatggtttagtgccatccccttggtgatgagtgagttcacgtgagagctggttgtttgaaagagcctggccccctctcattctcctgctcccactcttgcatgagacacctgctcccccttctccttctgccatgattttaagattccagggacttcacaagaagcaaatgctaacgccatgcttcttgttctgtctgcaaaactgtaagccaattaaacctcttttctttgtaatttatccagtcttgggtatttctttataacagcacaagaacagcctaatacagtgatgctctccaagtgacctttgggctgagacctgaagaagaaggggaagcagttaggtctgatagctcatgcctgtaatcccagctctttaggaggctgaagtgggaggactgcttgagcctaggagttgaagaccagcttggaaaacatagcaagaccctggctctacaaaaatattttttaattggccaggtgtggtggtgcacacctgtagtcccacctacttggaaggctgaggcaggagcatctcttgagcccaggaggttgagactgcagtgagtcatgttcacaccactgcactccagcttgggtgacagagcaagacctgtctcgaaaaagaagaaagaagaaagtaggaagaagaagaagaagaagaagaagaagaagaagaagaagaagaagaagaagaagaagaagaagaagaggaagaggaacaagaacaagaagaagaacaagaagaacaagaagaagaacaaggagaacaagaagaagaataagaagaagaaggagaagaagaagaaggagaggaagaagaagaagaggaagaggaggaagaggaggaggaggaagatgaggaggaggaagcagaagcagaagaaaaagaaagaaaagaaagaaagagaaagaaagaaaagggaaggagggaaggaaggaaggaaggaaaaagggaaggaaagggaaggagagggagagggagaaggaagaacaaagaagaaagaaggagaagcagaggcttgtgctggatagccttgcttttgccaatgaccttgctgattttcagggggtcctggtgtcttagtccatttgtgttgctgtaaaggcatacctgaggctggataatttacagagaaaagaggtttatttggctgagagttctgcaggctctacaagaagcatggcaccaatgcctacttctgatgagggcctcagtctgcttccactcatggcagaaggtgaagcagagcctgcatgtgcagatatcacatggtgagagaggaagcacgagggggcagggaggtgccagcctcttcctaatagtaagctgtcttgagaactaatagagtaagaaataactcacaccctgcccccaaggaagggcattaatctattcatgaagtatctgcccccatgacccaaacatctcccattaggccccccacctccaacattgaggatcaaatttcaacatgaggttccggtgggcaaacatccagctataatactgggcaatgctgaccagactcttcccctctcaggcccagagctccttggccctgtaacaacagaaaattgcgtttgagtgtcaagatttttcctttagtccccatgcagctccttagaatgaggtggcatcttctcccttttcataggtgaagaaacagaagctctggaggaacgaatcattcatccaaggtcaggtagctagtaagcgtcccaccagctccccagatctcctgtttcctgtcccaagtcccactgagtgagctggaacaatggcttcactggcacctgccgggaatggtggcaggtgcctataatcccagctactcgggaggctgaggcatgagaatcacttgaacccgggaggcagaggttgcagcgagccaagatcacaccactgcactccagcctggataacaaacggagattccatttaaaaaaattaacatataatatacatacagtaacattcactttttaagtgtacagtttgatgagttttatcaaatgtatatggttatataaccaccatcaccattaaggcagaatcttcccatcactcaaataattccctcagccccacctcttgctgtcaatcacttctcccaccctagccactggaaatcattcatctgttttctgtccccttggttttgccttttctagaatgttctatacatgagaccactgagaatatagtcttctgtgtctggcttctttcacttaacataatgcctagctcagcagtgtgtcaatcctccctcccttgccattgctgagcagtgagtattccactgtatggctgtgctacggtgtgttcatccatttattcattcaccagctaatgggcatttggattgtttccaggctttggctatgatgagtgaagctgctgtgaatgttcaagtacaagtctttgtgtagacaggggttttcaattggcgggataaatacctaggagtagtatcgtgtggttaagcgtacgtttaaacttagaaaaactgtcaaactgttttccaatgtggcctgtaccatgttgcatttccatcagcagtgtttgagaattccaattgctccacatcctcctcccgacacttggtttcacccatcttttaaatattagccactctggtgactgtgtagtgatatgtcagtgtggttgtaatttgcatttctatgattgactaataataatgttgcagatatttctgtatgcttagtgggcatttttggtgagtttttaaaaattgggttgttgtcaccgtcttattgagttggaagaattctttatatgttctggatgtttattcatgtgtgtgtctgctaagaggtgagactggttctaccctggtcctaacaagcaccctgggcctgcatccctttttgtgtctgtgagctgggtctgcagccctctcctcccactacctactgcccagcagtacccctcacccatcactgtggctcctgcaatgacatctcagcctgtctctccctccctccagctagccagaggcaggatggctcagtgacacagggtgggccctgaagacagagtgccagggtttggaccttgtattagcaagagtcacaagggaaacttactttatctctccatagctctgttgtgaggatccaataaattaatccatagaagagcttaggacagcacctggcacaaagtatacatgagctattatgatgttattcttccaacccattgtttctgtgttgtcataaacatgaatgcaggactcagtgtcccagctctgtgtccctcgcatacattccctaacagcccacaggtcttgcctgtcaccgcctcattcaataagtgatgactctgcctcttccttggctggggccttgcattggacatttctgtatccatatttgttttttaaaaactagctgttggccgggcgcggtggctcacatctctaatcccagcacttgggaggcagagacaggtggatcatgaggtcaggagttcaaggccagcctggccaacatggtgaaaccccatctgtacaaaaaatacgaaaattagctgggcgtggtggcatgcacctgtaatcccagctacttgggaggctgaagcaggagaatcgcttgaacctgggaggcagaggttgtagtgagccaatatagcgccactgcactccagcctgggcaacacagcaaaactccatctcaaaaaaaaaaaaaacaaaaaacaacctagctggacttgacactcttgttagaggaagatttttccacatctgttaacttttcttctattgttatccatctgtgcaggtttttctgtcctcctgagtcattttgataatttatattatattttgaaaatcatccatttcctatagttgtttattagtgtcttctctgttatatttgatcagattaccaaatcttgctcattgattgcccatttattttattgtgtttatttttttgagacagggtctcactcgacagcccaggctgaagtgcagtggtgcaatcatggctcactgcagccttgacctcctgggctcaagcaattctcccacctcagcctcctgagtagctgggacctcaggcacacgccaccacagctggctaatattttatttatttatttatttatttatttttgtagagatggggtctcactatgttgcccaggctggtttcaaactccttggttcaagtgatcctcctgcctcagcttcccaaagtactgggattacaggagtgagccaccatgcccagcccctatttactttatagtaagtgccttcatgggcataaatgttcctctgagacagctttggctattagccatacttttaatattttgtacattcatggttattcatttataaatggtctgtaatgcaatgcagatttcccctttggcccaaatgccatttacagcagcacttttctctttctgagcagacagaatattttggtttcccctctgttgtttatttctcgtctgcctcgcctcatttgctaggtgttcccttggtgtgccttaagtatgagccactcaaatatttgtgtttctctaaacacccctgacactgtcctgctggtttctctatctggaatatccttcccttcttggccagttccccctagtgcatcaaagaaatcctgctcttttgccttcagaaaacaaaacaaaacgaaacctatcagtctccttatgtccccaaagacatagctttgctggtatctggttgtattgagctgttcatttgtctcttctgctagatggtaagctccttggaaactaaaaactaatcacttttctaacttcagactgagcacaaattaggttctcaagaaacattgaataatgagtgatccggtatccccttccaacatatttttggtcattgataccatcattctgagtagttactagggaacacttcactgcagtaaccaatacagcaaaacgtgaaatacagttacatagtagaattgtatttcttgcccatataatagtcaagtgcagttcttcatcagctgggaggttctcctccacacagtcatttaggaatccagggaacatagcagaggttgctagctctagacccaaacccatgtcctctttgtccacagtgaggacaatgccagcaacagctggccagctgttctgtagttctcagcctccctcgcagtgagatgtctccatgcaatttcagtggagcaacatataccatttccatttccaggtgtaggctcctaagaagagggtggcttcttcatgttctttctcacctttccgtaggctagctgcagataatgatgaggctttagggagtgggtggagccataaagtagaagcctggattcctaaatgacggtgtgaagtgttccctaatttcacgtaattgtttcttaatttcctgtttgggttatttgttgctaaggtataaaaaaaccctgatttttgtgtgttgatatttgtgtgctgcaactttgctgaattagcttattagctcaatttgatctcagatattagctcaaatattttgggagattatttatggttatctacataagatcatgtcatctgaaataaagatagttctatttccttctttctatcttagtccatttgggctgctgtaacaaaatgccataaattggaggctgagaagtccaagatcaaggcccaagctaattcactgtctgatgaaggcctgctttctggttcatacatggcaccttctagctgtgtcctcacatggtggaaaaggcaaggtagctctctgggattcctttttgtttgtttgtttgttttgttgtttttgtttgattttttgagacagagtctcactctgtcaccaggctggagtgcagtggcacaatctcggctcattgcaacctctgactccctggttcaaacgattctcctgcctcagcctcctgagtagctgggattacaggtacccatcaccatgtccagctactttttgtatttttagtagagacagggtttcaccatgttggccaggatggtctcgatctcttgacctcgtgatctgcccaccttggcctcccaaagtgctgggattacaggcatgagccaccgtgcctgtcctccggtattctttttataagggctctttttctttttatgtgggctctaccctcatgacctagcaccttctaaggccccacctcttaatatcatcacacagcagatttaatatatgaattttgaggggacacattctttccatagcactttccagtatggataccttttatttatttttcttccctaattgctttggttagaaatgtcttccctaattgctccactactatgttgaaaagaagtggcaaaagtgggtattcttgtcttgctcctctcttaggaagaaagtttaagtcttttgccattaaatatgacgttagctatggggttttcatatatgacatttatcatgttgaggaaattttcttcttgtttcaatgatgacagggtgttgagttttgtcagatgctttttctgcatcaatcaatatgaccatgtagtttctttgttttattccattattgtagtacattacattaatttttgcatgttgaactattcttgtgttcctgggataaatttcacttggttatggtgtataatccataaccataacctgaagatatgctgaagaggctaagtgccatggctcatgcctgtaattccaacactttgggaggctggtgtgggaggatcacctgaaatcaggagttttagaagagcctgggcaagtaaacaagatcccatctctacaaaaaattgaaaattaccgctgggcatggtggctcacgcctgtaatcccagcactttgggtggccgaggcaggcagatcacctgaggtcgggagttctagaccagcctgaccaacatagaaaaaccccgtctctactgaaaatacagaattagccaggcgtggtggcacatgcctgtaatcccagctactcaggaggctgaggcaggaaaatcacttgaacctgggagacggaggttgcagcgagccaagatcatgccattgcactccagcctgggcaacaagagcaaatctccgtctcaaaaaaaaaaaaaagaaaagaaagaaagaaagaaaagaaaagaaagaaaattagcttgatgtggtggttgtgcacctttagtcctagctactcaggaggctgaggcaggaggattgtttgagcccaggaggttgaggctgcagtgagccatgattgcaccactgcactccagcctgagcaacaaagtaagacctcatcactaaaaacaaattttttaatactgaagaattttatttgctggtattttgttgaggattttgcatctatattcacaagaaatattactctgtagtttttcttcttgtagtatctttgtctggtttcagtatcaaggcaatgctggcctcatgagatcaatcaggaagtgttacttcctcttttattttttggaagaatttgagagaattggtgttaattcttctttaaatggttggtagaattaccagtgtagacatctggtcctgggattttctttgttgggaggttttttagtactaattccatttccttacttgttattagtctaatgagattttctgtttcttcttgagctagttgtagtagctcatgtgtggaatttttctatttcatctaagttatccaagtttacctaagttaaagttccattttatctaacttgggtaagccaacaaacaatactaaattgttcatagtattctctcatagtcctttttttctctaaagtcagtaataacgttcactctttcattttttcattcctgattttaataatctgagttctttctctccccctccctgcaattgagagtcatttaaaagtgtcttgattaaattttatatatctgtgagttttccagttttccctctgttattctcttctagttttatttcatgtgatccaaaaagatactttatatgatttcaatttttttacatttactaagacttgttttgtgactaaaatatccttgagaatttccatgcacatttgagaaaaatgcacattctgctgttgttggacagagtgttctgtatatgtctgttaggtctaattggtttagagtattgttctagtcctctctttccttattgatcttctgtctagttgtttaatccattattcaaagtagtggccgggcacggtggctcacacctgtaatcccagcactttgggaggccgaggagggtggatcacaatgtcaggaggttgagaccagcctggccaacatggtgaaactccgtctctactgaaaatacaaaaaatttgctggacatggtggcacacgcctgtaatcccagctactcaggaggccaaggcaggagaatcacttgaacccaggaggcagaagttgcagtgagctgagatcgcaccattgcactgcagcctgggcaacagagcaagactctgtctcgagaaacaacaaaaacaaaaacaaaaaacaaagtagtgtactaaagtctccaactactattgtagaactctatttctcccttcaatgttgcaaaattttgtttcatgtattttggtgttctgttctttataatttttatatcttcttaatggatgaaaacttttatcaacatataatgttctttgtctcttgagacttttttttttaacttaaaatctatttgggctgataatacagccaccacaactctcatattggttgttattttcatagaatatcttcttccatccttctactttaaaattcttctatctttatatctaaagtgagcctcttgtagatagcatataggtggataatgttctctttattcactctgccaatatctgccttttaactggagtttaatctatttatatataaaataattactgattaggaaggacttacttctaccactcagctattttttttctgtgtgtcttatacatttttaagtttctcaattcctccattactggatttttttttttacttcttgattttgtgtctgtgttgttacattttgattattttctccttttgatagcggcaggaggcagccaaatgcctggcagatagaagcttgtcccccatgaaaccccaccttcaagccaaaaaatagcctgaaggctgaaagaccggactgctggtcccagatgaaacccatgatccagagtgagaacttccattcctgtttgcctgccctctaaataatcccttttaaccaatcgaatgttgccttttccaatactacctatggcctgcccctcccccattctgagcccataaaagccctggaatcagccacattgggggcactttgccaacttcaggtagggggaccacctctgtatcccttctctgctgaaagctgttttcatcactcaatgaaactctcaccttgctccctctttgattgtcagcgtatcctcatttttcttgggtgtggtacaagaactcgggaaccagtgcacaagccagacttggtctgggcagcacgggttagtgggccatctcccacagcaggtagcatggccaagtgaggcctgggcagggcatcaccaaggtccctggcttgcaaagtgaccaaggaaaaaatcctgtgtcactttccttttctcatattttttagttattttcctaatgattgccttgaggatggcaattaacatcttacacttataagaagctagtttgaataatagttccaatagtacatgaacactctactcctatatatctccatccttcttcctttatattgttattcccacaaattatgtttttatacattatatcctcactaacataaacttattattattttctgcatttgccttttaaatcatacaggaaaacaagaatcacaaagaaaaactacattaatatttgctgttatatttacctatatagtgacatttaacagtgtatttttatgtcttcagatgtctttgaattactacttagtgtcttttcattttagcctcaatgtttccctttagcatttcctatagggcaggcctgccggtaattaattccctttggttttctttatctgaaatgtctaatttcttttttattcttgaagaatagttttgctggctataagattcttagttaatagtttttttcccagcacttcaattattattaaagtgttattattattattattattattttgagatggagtctccctctgtcactcaggctggagtgcagtggcgcaatctctgctcactgcaacctccgcctcccaggttcaagcaattctcctgcctcagcctcccgagttagctgggattacaggtgcccgccaccatgcccagctaatttttgtatttttagtagagacggggtttcaccatgttggtcaggctgatcttgaactcctgacctcaagtgatacacccaccttggcctcccaaagtgctgggattagaggcatgagccaccatgcctggtctaaagtgtaattattattacagctgccatttggcctccttggtttctaatgagaaatcatctgttaaacttattgcaaatccttggtatgtatgctatgtgtcatttctctcttgctgcttccaagattctctctctgtctttgtcttttgacaatttgactataatgtgtttcagtgtgaatttcttagagtttatcccacttggatttcattgagcttcttggatgtgtacgtttgtctttcaccaaatctgggaaattatttcaccatttctcaaatatctttttcttcccctttccatctctcttcttctggagctcccgtatacttagttggcatgactgatggtatcctactggtccctcaggttctgttcatttttcttctttctttttttctgctctgcagactggataacttcaatcgccttttcttcaagttcaatgattatttcttctgcctgctcaaattggccatttaacccctccagtgactttttcatttcagtattgtacttttcagatccagaatttctatttggttcctctttaataaattctttttattgtcattccccatctgttcatacattgctctcccaatttcctgtagttctttgtccatggttttctttagttaattaagcatatttaagacagttgacttaatgtctttgactagtaattccaatgtctaaaattccttatggatagcttcttttaaattatttttgtcctgttagagagtcatatcttcctctttatttgctttgtaatactttgttgaaaacttaacattttgagtagtaaaatgtggtaattctgaagccagattctccccctcctttgagattggttttgttgtttgttgagggctgcagttgtccatttgtatagtgacttttccaaacgatttttgcaaagtatgtattctctcttgtgtctggtcactgacgtttctgttctggtgcctctgcagtcagcctatgacctggaagagcattccttaaatgcatagatttttttaaaacccaagaaacaaaaaacctagcatgtatgtacctttttaaaaatcttctgatagatgccacctggaaggctgctgctgcctgaaggggcagaaacaaaggcaagctctactctgagccctcagggaaccaccagataaacaaaagaaatttgattctccaaatttctggaagacaaggtcctttctgcccactcctgctccagccagctgctctaggaacacaattactgtccacatggccacaggaatgttgaagaatgcaggatggtagctggtttgcccacaccactcacttatgagccatcagcatgcctctcccttcatcgagcactcccatggttgctgtaagtgtccaatcaggttccagaattctgaaagagttgactcttacaggatttttttcttttctaacttgctggttgtttagatagaggaaccaattcctgaagtttcctacgttgccagcttcatgaggatcattccctagtaactcttttcagacaaaaagcttcattgatttactgtaggactagcatcaaagagtctatgccacctagtctgtctccttaaaacacagaaataatcagtatgcattggggtaggagtttggcattagatctgccgtaaatcaagagctggggacagcccatgtcttaaactctgacccaagggctaaaatatcctttggtagcaacaacagctacaaactattgaacaacttgtatgtgccaagagccttacctgcattatcccattgaatcctctcaacagccctgtgaggtagtagaattgttgcctgccccttactgaggcctagaaacattaaggaatttgcccgaggccctagagccagtgagtggcaaagccagtctccagactcaggctggagatcctacagttctgtgttaccccagtgttatcctgcctctcagcacagagtcttggatgattctcctaacccctccctaggcaatgcacagggctgctccctgcacccttactcatgctctgctcttcaaccccaacagtgctggccttaggctttatccctgacacccagccccaggctccattccatctgttgacagaggcaaacactggggcaaaactgacctctgtggataccactgtgtccacctccaccagcttcagctgaagcctctgaacatctccagcatggaagaagccccaaaggatatttcctgtcccccagcatatgcttgaccctgaagccctccccatctagtcaagaagaccaaactgttaacaatcctggagtcagagtgacccatgggtgaatcttagccaagtcactcatagctgttgcatcctagtaaatcccttaactcccataggcttcagtttccctgcatataaaatgacagccttcagctcatcggccagtttcaatccatctaaagggtctagcacatcccctggcatgtggaagccacagggcacacactagttgtggtcatttgatcctggcatgctctgctgtctctcggctctccccttgcctctttccctgatgtcctggccatcagccactgcctaacaccctcccactcaccaggcccttagcctgccccttagcacaagagcacagccggtctcaagtctaccctgctgtaagcaaacacttgcaacatcatgctgacctccaggccctgttgcatcagcgtgcccacacttggtgcccagctggtactgagggtatcagggaacaggccagtggtggaagggcggacactttgggttccctggtttcctggctcccaatatctttcccaatggcatatggggtctagcagcttggctcatttaactgtgaacctctaccctttagaatctgggcctccaggcttgcttctgtgcaaaatggcagataaggctcaacctttctttttttaacttcattgttaaatattactccattaatacccatttactgcagaaaaggtaggaaatacagataagcaaaaaggaaaataaattaaaatcctcataccaccatcatcaagataattactgtcaccattttggtatatttcctcccaatacatatattatctatatcgtatatacgacaaaaatggatcatactatgtttcctgttcttcccctgtgttagtcatctattgctgtataacaaactgcctcaaaacttagtggcttcacctttccgtgtattatgatgacaagaatgtggtatgacactgtcttatatctggatcatatgctaaaagatagaaaatggtttctaaacttatttgttctgtaataacaaaattttatttcataaagtgtttttaaaaaaaaccatagtagcttgaaacaacaaacctttgttatctcacacagtttctgtaggtcaagaattcagaagcagcttagctgggtggtctggcttggtgtctctcctgaggtcagggttttggctggggctgcatcacctgaaggcttgactggggccagaggagctgcttccaaagtggtccactcacatggctggcaagttggagttgcgtattggcaagagacttcgcttcttctcaatggatcttcccagagttcttgtaggcaacctcatagcatagcagttggcttcccccagagggaacagtccaggagagaacaaggcagaaaccacagggtcttttctggcttaggctccaaagtcatactccaccatttctgcattatcatattagttacacaggctagacctattctgcatggaagagactataccatggggtgaataccagaagcagggctaattgaaggccagcttcaagggcggctacacattccctttcaacagtatgtcatgaacatctttccatgccaatagagcagatgaatcttaccatttttaatgactacatgtaagtgtagcataatttatttaaccaacctcctgtagttgggtatgtgggttgtgtctcgttttttgatagtagaattaatcatcttgaatatccatcaccaaacttgtcatattattttcttttgatgaatgaaaaagaaaatcaagtcatgtctgtcaatcagaaccctgagcaactaagaaatgggggtaccactgggacatagagcaaggtcccttctgattctgctcttgtctttctctccccatgaaatggggagttcactatctactgagacatcctagcccacagctgcacagttctgtctttttagaaagctctaagcagaaacaatgttcatccatcctcctcgggacagcccttgagctactgaagactctaagcatgtcctggtcatcctccatgagccatcatctctgaggccctccccttcttggcccctcttctctggacaggttctggacagtcttgcccttccaaaattcctggaaagcaggaactgttcctgctacaatgactctcaactccagtgcagtacagactgttggtgtcaccccttatcctgaagaagaggcactgagacaggacaagggtgggtgcccaggagggctggcatgagtcatgagaatctggtcccggagaattagacggtgtggggaagtaggggtgttgggccgctttctggcctcatggatgccaatgaatatcagcaggtggctcccagaaaggaactctaggggatgcctgttgctctaaatagaggctagagagggcactggcagttcagtcaaccaagaaagggggcccacttgcctcagcttcaggctttgtacacatcctcagcctttcttgagaactgaatttagattctcctcccctgtgctgtgtgcttggcccagaagaagggcaagtctcgctgggtggctgcttcttggcctggctgaaccagaaggccccagtgccactccaaacctgggtgtgagccctgcccccatgagcaaacagtagctcagagctgggggctgtgggggtcagtggcctgtcacatgagatctgatgaggccatctctgctctatattgggaaagggatcaattgtatcaagggctttcttgggagtgatcactctggccattggcgagagacctggcattctgacaaggcaccctccataccctgacccacttgccagctccagctaattttagcaggctttggcaggtgccagcaagtacatagcatgtggatgtcactcccaggtgagcccaaggagaggcctgggccagagcctggaagtcatggtctatgcccatggaggcacccaaagcaagcctgaggcctggactttgcagtcacaaaattaagaatgatacccctgttttttgtttgtttttgatcagttggccaccttcctccaccaccccttccccaagttccatacagacccctggattgtatgaaatgcaaatcgaacctctctgcagatgaaaatccactggggatccccttgcctccaagagcaagtccagacctgcaccagcgcgggccaggcccccttaggaccccctccctgtccaagggcatttcagtaagtgttctgtggccaaggcagcctggtgactttctgcccgcacaaggctgaggaatggaagatgggtaggctggctctgcacaccccctcctgctgggcagcaatccctaccccatgttcacagagtgtggccggctgccccatggctctgtccccgtggccctgtcaactgttacccacatggcctaccctccctttctgccctgcctctgaccccatggcagggggcagagtatttgagcagccgccaggctgagccctttcagtgcagaagccctgggctgccagcctcaggcagctctccatccaagcagccgttgctgccacaggcgggccttacgctccaaggctacagcatgtgctaggcctcagcaggcaggagcatctctgcctcccaaagcatctacctcttagcccctcggagagatggcgatggatgtcacaaggagccaggcccagacagccttgactctggtaagggtcacaccaaagttagggactttgcactgggagagcagcacccagggcagggcccttggttttgcagattaccaaaactaaggctgggggcagggaaggcgagcaggcttggggcaccttggaaggaggcacatgggccttgggggtcctggctagggcagctgtgcctgccactggccctctgcccaccacccctcctcactgtggctatccagtgtccagcctctcgaggggttctagggtacttattcctggagctaacggtgacccaggacaccagtgtccggggcctggcctggggcttttatggggggagctggctggctgcccagggctgtctggctctctgggggctctgcatggcatttccaggggttggtggatcagggattctgtccctcaggagaatgtgggcactagcccaaggccactcacttctgtgtacatagccacctgagggcccaggaatggagggggccaggctacagctggacatctggcactcggatgggctctggagcccccaggcctgcagcatctgcccagggactgccctggcccttggccatttcctcagggacccacagctccaccagccggcccctcccagtgctggaatagacagttcctcagtccacatctgccaaaggcggcactagaaggcatcctgccttttttactgcgttctggaggtggggtcacaaagcactgctcactgcataaaagggacagcatcctgcccctggcagccctgcctgaccagctccgcctctcccactgctatccaacctgtacaccctggtgaccatgtccaggccagtggccttaaggactgtctctgtactgatggctccacatctacctctccagccagactctcctctgaactcgggcctcacatggccaactgctacttggaacaaatcgccccttggctggcagatgtgttaacatgcccagaccaagatcccaactcccacaacccaactcccaggtcagatggaacctcttcttcccaggcccttctgttcctctcctcagcccctcccacctcccttcagaataagtctagactcttatcgctttcaccaagcctgcgcccagcatccctgcacagggattgttaggacagcctgacgccctgcttccaccctgccccaagatgcccctgctctgcagcccggcgcctccaggcttctcacctcctgctgctcacagctcagcctcactccctccctccccgcctctgctccagcctcagtgcaggtcccctgctcccatcttctggcagcagctgcccgacctggtccctcttcatctgtccccattccttcaccccccagcctgtccccaacttgactgaggttctttcctgcagatccccgcccttgagaggggttggtcccactgtcaactctgcttctgtgccctgtgccgcacctggcattcagtgagcatctgctgaagagatgagggtcagatgccctgcagggagtgtgggggcgtcctcaggcaagaaaagttgtacgtttggctgtgggccctgattatgtgtcctgtgacctcttgggtgaggtcagcaagagaaacctctgcaagctggctggggctgcctcccagaggctgccagggggagggacaggctctgtctgtgctcttcttccgaggctacacctggggcgccaggctctcagggctccccaggtaccaccacatttcctacactgcttgggaaagccctgtaagtttgcacagacacccagcatgaggctcgccagagagatacttgtagctggggtctgggcaccaggaacagcttggtgctgggcctgaagtcgggcaggatgcagcctggccaggtgagaggaaagcttggagccagtgcctgggttcaaactcctctgtggcctatggttctgtgggcttggggaagggtttgtacctctgtgtccagtttcctcacttataaaaaaaggagataataaaagtacccatgtcccagggtggctgtagcaataatagggaggggtgcccagagcaggtctggcacacaggaagtgtgcatcagcctcagtccctgccattgggcttgtcctgggagtctgtgaagccaacctctgctccacaatgtgacccccaggcttgtgagaccaagctgggtcagagcttcctcctctggggttgcaccaggaggggaacttctgcaggcccagatgcaccctgaggaaagggcttgttcccaccaagaacaaggctcacctttggaggatgctccccacatgagaggtgaacccccaggtctactggtgactgcagcctcggaagctgacagcatctatcctccaacccatgcccactgggaagtgtgtgaggggtcctcataggccctgcggtgtggacaatgcagagaccctgtagcatctggctagggcggggcccagataagagccctgtgccaggagagcctggccggttctgccactgtggggagacaggctcccccaccccatgtcccctgcttccctgcagcccacagagaatacagacctacttttacagaaatccagatttttgtgtaaaagtgtctctattttaagtagattttaagtggtggcagcaaatttaagcttttgagaatattatacagaacaaatcagattcacaggccagatgcaactttatttacagaaatgggatcaggtcctacctcaggtcccatctcacgttttcacttatgcctatacgtctccttcacgggaaaggccacaagaggccctgcggtaagtgtcccggtgttgatttaaagtccccaacagtgaatatgagggtcctcactgttgcagcaagaggatacccccctgtgtatcttggaaatgcctgcagccctcttgctgcagaacagattcttaggagagaaactgtcagatcaaagttaaacttagagaaactccaaattgccctctgaacagacggtatcagtttgacatcatccaataccgggattcctcggggagaactttctggcctagaaggcagtagagccaggacttcacccagtcagtggcagggccacacgtgggccttgatacagagggggaagacttgagcctcctcgacaccctacagggcccagcctcccaacatgtgataagagaaacaacagccaacttgtacctagctctccttattctccaagggctgggccagttctccccacagccctgcaagggaggatcactcaagggccccaactgtctgacaatacagccacactctgatcagccacctgggcataggctccatgccattgtcctccgccaagacctcagactgaaatgttggctcctcccatgaagaacctggggccaaaggaccagagtccaggtccgtggctgccaggatgggccacttggagagaggcacaagggtggtgccaggcaggtgtgagggctggacctttgcaagagcagcatcacttttgttgagagcccacaggtatcttataattgggtcctaggacttcctgccagtagccattgtgtgcatggatttgggtgctggcctcaccatggtgtgctggctgcccatgcctgcaataatgacttctgtaagcctttcttcatctgcaagatgggtgctgctggcacctcctccccggtgctgtggtgacagggcatagtgtgtgaggctgctatgtgaagcacctaatgcagggcctggcatatggaggaattcagcaaatgacagatgccttcacagttagttcctggcatcctctacattggtgggtgtaggaaagaaagacagaggaggcaaaagttgtagctgtggggcattgaggacagcctggattgttccacagagccctgaggacatctccaggggtgtgctctgcaggggcagctggattggagggttaggggtcggggagggcgtgcactcccacccatgctcacagcctcggaacagtgcctgctcagccaacatgggtgtttgattctgtgtcttttgtcacagactttatcagccccatccctttctgaccttgcctcagtttaaattttacatgtggggcctcattaagagacatggttcttaactaaagatctgtatccattaggaatgctttgggctgcaggaagacaaacacctgactcactgtggcataagtggtttgcgtctgctcccataagctgcacgtggagggtggatctggcattactctctcttccctacatttgcagtatgctaacagctttaacctccagccttgtttcttcatggttgcagggtggctatcacagcgctggccatcacatccttacacagctgtgtttacaaatttagggggacattgaagctcctcccctgctaaaatcaggcttcccttcacctgtcattggccagaactgggtgaaatgcccaactctagaccgatcatcagtaagaggagtatagaattgctgtgcccaccttagattaatcatggcgcaatgtgctccccataccaacaaaatctgagttctagaaactgaggaagaagaggaaaatggccgtcttgcctcctggctgggattcagagcatctccaaccctctgagcttatgtgtaagactgtgggcaaaagtgtgtgagtttttgtggaatggatccacggcttttatcagagcatctttcctttttctttttgattcaagatgaaaatattcttatgattatttttctcaccactgcccagagataaccagcacattaacatggccttttctccatgaatagcactagggtgcccagtggacagacacatagctgtccacacaccagcttgctggggatgcataggcagagtcacatctgcactcacggcctgtcctcacactgccatgtggagagccagcagccacaccatgggccgtccatgctcacgggagtggcagtatcagatctgagcttcgtgtgcccaggcgtctctcacatcagtgcatagggaccctctttgttctgtggcccagtgtgcccatgccacagatggcttcagtcagcagacacctccttctagacactcacactcactcctggctggcccttagcacacctgtgcagacaggcccatttattttcttgtgtaaatcccaagtaggaggactgggtctctctgacagcaatgccagctgcctggcaccctccagacaggtggctcaagccccacctcgccagctctcccagttagcccctcctttccctggctctgacctgagggacgaagcagggtgctacaggacgctgtgccacagggatatcgtcagggacagaagctactctgccctctgctgctcacccctccaacacgctgtgggctgcatttgttgagtggctggtaccagactctgctcttctgactttccagctggttttacctgtagtaaagtttgagaagatgggtcatcctgaccccggggtcagaagacagaaggaggcccatggcgtgtgggggagatgccccgtgaggccctcggtgtgcagatgcctggtgacagccccaccctgaggtccccagcctaccccctccccagcccgactgctcccatccccctccctgtgcaggtagagcagatcctggcagagttccagctgcaggaggaggacctgaagaaggtgatgagacggatgcagaaggagatggaccgcggcctgaggctggagacccatgaagaggccagtgtgaagatgctgcccacctacgtgcgctccaccccagaaggctcaggtaccacatggtaaccggctcctcatccagaagcagctgtgggctcagccctagctgggagaagcaccccaggcactcccagactcacagccagcccgagacagaatctcctggggagcaatgaagtcctcgacttgggccagttctcacccttggctcctctggtccggccctggggcactcgggctcaccctggagctggcaaacctcaggaaaactggcgttttaaatctcactcctggccaggtgcagtggctcacccctgtaacttcaacactttgggaggccaaagcaggcggatctcttgaggccaggagtttgagaccagcctgcccaacatggtgaaaccccgtctctactaaaaatacaaaaattatccaggcatggtggcacattcctgtagttccagctactcgggaggctgaggcataagaattgcttgaacccgggaggccgaggttgcagtgagccaaaatcgcgccactgcactccagcctggggtgacagggtgagacaccatctcaaaaaaaaaaaaaaaaaaagacctcactgctccccatgggcacttagggaactctcccagcccagttctgcagctgggccattgcactagatcctcagttggtccctgggctctcggtgactgtccagggcaggagtttcccattgacttttccctggttgacctttgaccccttccacagttgacactggtgtccccaggtgtctggtggccccttgtccagctcccttagtcccttgtgccttccctcctcctctttgtaatatccgggctcagtcacctggggcccacccagcccaaggccagcctgtgggtgtccctgaggctgacacacttctctctgtgcctttagaagtcggggacttcctctccctggacctgggtggcactaacttcagggtgatgctggtgaaggtgggagaaggtgaggaggggcagtggagcgtgaagaccaaacaccagatgtactccatccccgaggacgccatgaccggcactgctgagatggtgagcagcgcaggggccggggcagggggccaaggccatgcaggatctcagggcccagctagtcctgacgggaggtgccacctgtctaccaggggtggggagagcgggggctggaggaccacccagcctcagaggcagctggaggcctgggtgaacaggactggccaacatgtccccaagtcccacagtcaccatctggccagcattgagaggggaacgggctgaggaagagttagtggcaagaggaaccccagccagtcacaccttgtccagtttaccagaggaaaaaccaatgtgtaagaacagaaatgtgacccggcagccagtgcactgcccccctctccaaaggccacccctcaccctccaccagcatgcacagaaagtggggtgacagcaatcacaatgtctacccaggcagcaaggacccctgaccatggggaggactggggtgcagggaacatagaagcagaatgaggcctagggggagttgggcaaggccagagccctagctgcagccaagcacatggccaaggccagctcctggaagggcagggctccgaggcaggaggcaggaggctgcccgtggctacccgtcctcacacccctgcagcttgctagtctgtctgtgggctgggtgtgaatcaaggcagtgggatggtgtggggacctccctggccccagcagccagtgaggagcctggtcagtcagcagagcattcagcagtatccagttccatggagaggcccgtgtgaggggagtcggggctggtcttcagtaaggatgggtggccagggcccctagaagtagaaaaggagactccgggtgctggagacagaaatcaaggatgtgcctccatgtggagcctcaggaatagctggccaggcctgaggctgaacctcacaaggttcagctgggagggctaggctgacagagcacagccgggccagggaccagcctgccctgtgttgccttgtcccgagggccactgtcagcaggtctctggcatgggggaggcttagggcctgagcccaacaagcagcagcggaagaggagagggaaactgtggacaggcctggcattcagtggccaggtgttgcagtgtccctgaggaatagcttggcttgaggccgtggggagggctgccggccagcgcacccccccatgccagatggtcaccatggcgtgcatcttccagctcttcgactacatctctgagtgcatctccgacttcctggacaagcatcagatgaaacacaagaagctgcccctgggcttcaccttctcctttcctgtgaggcacgaagacatcgataaggtgggccgggtggaggggcagaaggcagatgaggggaggcacaggcaccccagaggaactctgccttcaaatgtagcccccataccatgtgctcagaagggagatctggattcaaattgtggccatgtcacctgccacctctaatgctgtggaaaagaagcatcacattagctaattctggctgtgcgccttgtgaggcaccagctatgatcaccccactccagtggaaagagcagctggcagtagggtggggctcaaactcaggcagccgggctctgggtcacctgcaggccacggtcatgtcacactgcctctagctgagtcagaaatgtgaaggaactgagattctacccttcctgcaagctagcaaagtggcctgccagttacatctgtgcatgcacacacacacacagttatatatgcacacacataaaacacgagacctttgggtcagggagaaagccagatcctcactcacggcagaagcagcagccaaagcaacatctcatgtggttttccaagccccagtccctacagagacagagagggccaggtggcacctgtgcatgcagcggggtaccttgcaggagggaaatcctgattttacacaaagctgctccccccacgccctgccttgactctgggatgacgtctcagagctgtgcagtacaacattcttaaattggctgggactcagccctgcagaaatatgatatcttcaaggagaatcgttcccaaaacctctcaaagctatggggctgctctgagcctgtttcctcagctgtaaagtagggtgcatacttttatggccctgtgcaggaggtagtgacaggccctagcaccctgcctccagtatatgttagcagccacgaggcctatctctccccacagggcatccttctcaactggaccaagggcttcaaggcctcaggagcagaagggaacaatgtcgtggggcttctgcgagacgctatcaaacggagaggggtgagggggcacctgtacctgccgggggggctgccctgggccacccaccccagcactgcctgcctttctccttggcttccagcactgcagcttctgtgcttcttggcaggactttgaaatggatgtggtggcaatggtgaatgacacggtggccacgatgatctcctgctactacgaagaccatcagtgcgaggtcggcatgatcgtgggtaagggctccttgcacccctgccccttccagactgctgaggctccctgtgtacaacaggcttcaagggccctgtggggtgaggaccaaactacttaacaaccggtgatgtcagagcagagcctggtgctacagcctgggtggtcttggggtatcaagatggaagcaccgtgtacagtaggaagcatttcaacgccatgatgccacattcctgcatcagatggtatgccagctgcatatccacctcacccatcaggattataattaaaacacttatctggtaaattgaccaactggacagattggtccaagtggaagaggataagcaaaagtggtaccatctccacccgaatggtctttccacgggcctgcccctgcccctgcccccacccaaagtgaaggcaggtaccaggaaagggagcagcagtccgcccctcccagcagaggggtcttccacaccaactcggacctttctcagaagttccggaggtcattataaccagccttcactgaggagcaatccaatcagatcagttatctgctgtgcgcacagccgtgtggttctatacttctcttacttccattttcacctttcagaaggaacgttgtctttaaatccagcatctaaacgtgagccccagccatccctggctgtgatccccccagccctttccaccctatcctctggaactgcctggggctccccaagacacttccacatgaattcccaccaagccaagctgcagctgctgggcccaggcataacccctcctggggcagaggtggcaaggagtgacccaccactcacatctgccccacatccactcttgactctgctcagtgtttaaaaacatgtttataacaattaccaagatctgaaaattaggagaattcacatcaaagtctggatttctgtttgttcataaaaaactagaaggcagccaggcaaggtggctcacgccagtaatcccaacactttgggaggctaaggcaggcgggtcacttgaggtcaggatttgaagactagctggccaacaaggtgtaacctcgtctctactaaaaatacaaaaattagctgggtgtgatggcgcatgcctgtaatcccaggtactcaggagactgaggcaggagaattgcttaaaccctggaggcagaggttgcagtgagccaagatcacgccactgcactccagcctgggtgatggagtgagtgagactctgtctccaaataaataaataaataaataaaaactggaagtctaagcatcactgagccctgattcctatgtggcagctcgactgaccagcatttgagttgctgtccctgacagctttgggggtgtgcagcccacacagtcatgctagcttgaggctctgctgtcagcagtttgaaactcttaataacttgtgaacaaaagactccatgttgtcactctgcacaggggccagcaaattacaaaattccatatccggaattgtctacaggagcctctgggctgctcccaagggcccacaccatgccttactcactttgggttgccatccaaacatgtctcatgacaaagaagctcaaacatgtgcatggacagtgccagaaaacaagggtcgtacatagacaaaataaaatgataacgtcccacaaccatttctttgatacacactgtttctctcagtcctcccaaccacctaggtaacaggcagggaaggtgttactgttgcctgttaggaaagaggacagccctgaaagctgtccctggccactgaagcaacccaggtcttccagccccagggagagccgcctttccattgttccagacaaagcagagacaggcatgggggagcgggagagggactcctgtgggcaggaaccaggccctactccggggcagtgcagctctcgctgacagtccccccgacctccaccccaggcacgggctgcaatgcctgctacatggaggagatgcagaatgtggagctggtggagggggacgagggccgcatgtgcgtcaataccgagtggggcgccttcggggactccggcgagctggacgagttcctgctggagtatgaccgcctggtggacgagagctctgcaaaccccggtcagcagctgtaaggatgcccccctcccccacaacccaggccctgggccgctctggtgcagcggcagatgggagccgggccattgcagataatgggcttgtttttaaacaactctggggaaaagcaaactgacaatccgttcgtaagctccatcccttctgctcagtcatgacctgcccctgtgagagatgaagggttagtcccagttgtgatgtgataagcccagacctctttccttccgacaggtgatcgtgcatgcagaggaggctctgagacgcccccagcaaggttcctgggtttaacccaacattccccaaagtatgtatttggccacattcacagaaagaatattagtcttttgtggaatgctgcgggttgacagtcacagcttggaaaccaacccacagagagctcatcattaatcatggctatcacttgtttaccacctactgtgccaggcctatgctaattactttattagcgtcctctctgccgctcgcaggcctctattattataggtcagtagtattcgatttatttaaattaaatacggaaggtcatagattaagcaagaaagtgccagcaacatggtgcgtgcctctgactgggcactaaccctccaagtcttagttttcccaaccataactggccaatgaacagcagctctggatgcagctaaaggaagactgaagctgtaggtcccgtgctcggcgcagggccccctgcaaggaaggtttcggagggactggatggggtctttgaactatctgtctttccctttactgcagtgggcccaggggcaggccaaagttgctcccgtgattgacttgaacgtgcacgttcctaatccctgacatttctaaagctctggctcattaacgagggaaagacgtgaaccagctgggggagtggggatcgcagtgccccacgtggccgcctcgtgacctcagtggggagcagtggggccggctcccggcttccacctgcatgaggggccctccctcgtgcctgctgatgtaatggacctgccctatgtccaggtatgagaagctcataggtggcaagtacatgggcgagctggtgcggcttgtgctgctcaggctcgtggacgaaaacctgctcttccacggggaggcctccgagcagctgcgcacacgcggagccttcgagacgcgcttcgtgtcgcaggtggagaggtgtgcggaggaggagggtgggtgcaaagggcaggggctggggacgcccgggcactgcagacttggtctcagggcgacgctgagtcccaggcccggggcgcagggatgggaaactagggcctggggcgggattccgggcgtgggcggggcccggggcggggcacagggggcgggggagtgggcggggcccgaggccgggcgctggaggcgagggcggggcagggacgggtccaagggcaggaggctgggacaggacggggatgcaaagggaggggcggggcccgagacggggaggagggggagggcccaaggggaggaggcggggtccggacggggatgccaagagcagggatgggagcgagcctgcgtccgggcactggtccccatccgtgagtcccctcggtgctccctgcccgccgtggccatcctctcacatcactcacaaccccaaggcgcggcatggttgacacccccacgttaggacggagaccctgggcttagttagagggggcagtactaaccagtccctggcggaaacgctttggctgggtgaggtgagcgggatcgcccccatttctccagagaggggtcccggctcagcgagggaaagaggccgccgctggggggacggctggccggggcccctccctggagaacgagaggccgccgctggagggggatggactgtcggagcgacactcagcgaccgccctacctcctcccgccccgcagcgacacgggcgaccgcaagcagatctacaacatcctgagcacgctggggctgcgaccctcgaccaccgactgcgacatcgtgcgccgcgcctgcgagagcgtgtctacgcgcgctgcgcacatgtgctcggcggggctggcgggcgtcatcaaccgcatgcgcgagagccgcagcgaggacgtaatgcgcatcactgtgggcgtggatggctccgtgtacaagctgcaccccaggtgagcccgccccgctctctccctggtaaagtggggcccaaaaagcgcgcgctccaaggttccttgcggttcccaagctccaagatttcgtagtcctcttctcgtcccccttggcctagatttgggggaagggtcgactgcgtgcagggcgcccggtaatgaatgtggaggatgaggtgggaggagggacggcagccctgcttctcttctgcccagcttcaaggagcggttccatgccagcgtgcgcaggctgacgcccagctgcgagatcaccttcatcgagtcggaggagggcagtggccggggcgcggccctggtctcggcggtggcctgtaagaaggcctgtatgctgggccagtgagagcagtggccgcaagcgcagggaggatgccacagccccacagcacccaggctccatggggaagtgctccccacacgtgctcgcagcctggcggggcaggaggcctggccttgtcaggacccaggccgcctgccataccgctggggaacagagcgggcctcttccctcagtttttcggtgggacagccccagggccctaacgggggtgcggcaggagcaggaacagagactctggaagccccccacctttctcgctggaatcaatttcccagaagggagttgctcactcaggactttgatgcatttccacactgtcagagctgttggcctcgcctgggcccaggctctgggaaggggtgccctctggatcctgctgtggcctcacttccctgggaactcatcctgtgtggggaggcagctccaacagcttgaccagacctagacctgggccaaaagggcagccaggggctgctcatcacccagtcctggccattttcttgcctgaggctcaagaggcccagggagcaatgggagggggctccatggaggaggtgtcccaagctttgaatacccccagagaccttttctctcccataccatcactgagtggcttgtgattctgggatggaccctcgcagcaggtgcaagagacagagcccccaagcctctgccccaaggggcccacaaaggggagaagggccagccctacatcttcagctcccatagcgctggctcaggaagaaaccccaagcagcattcagcacaccccaagggacaaccccatcatatgacatgccaccctctccatgcccaacctaagattgtgtgggttttttaattaaaaatgttaaaagttttaaa

SEQ ID NO: 15582 - DNA, 43856 bp, Homo sapiens
ggggtcccagctccccacgctggctgctgtgcagatgctggacgacagagccaggatggaggccgccaagaaggagaaggtatctcgccctccattgggcattctgggagtgtttgcttgcctgtccccaacattccatggtttgtttgagcctcagaatctgattttatgcacaggctctttgagaagggtcttgccaggggtgccttctggggcaggaaggcccctactgcctggcagacccatccagctttggactctggtcctgcgacccggaagtcaggctgccaagaggtccaggcagtggcctccactggggaggggctctggagagtttagagccctagatgtgggggttagggacatgaggtcttgtggacaaagcccactacctgattttgagacaacactcactagacatggtgacaagtcaaagatgccttgcctcctaccaggaatcacttcgcagggagcccgagggctgctgtggcctgctgaggagtgcagggcagttactttttccaaaaacaaagagaaatccaggcatgctctgagccagccctgagcccagcagtgagcaaggagagagctggagacaggggactttgctgtgaaacactggggggaatgtgcctgcatcaccccagctgggggcccaggcagagtgggggagaaggggtaagtgggcagagccagtcactttgggcatgcttccctctcgcctctgtgtgaaatgaccaggtcagcataaaccccgggctggctgtgcttctggcagagctaatgatgttaggaggaaaacaaccaacccaagtgagagggtgcgcagccagacagctggaccggccgaggccccaaccaagtcccagatctgcctgtcactggtgctatggcagcaatttggatgagaaatcctgcccaaagggccccttcaggccacccggggagaaggaagcggctgtctttggcatgaccagaaagatggctcggagctagggagaggtggacatgtgggctgtggagatctggcactttccccaaacaaggagagaaagcatagtgtgcctatgtgtgaatgtgctatgtgtgcatgtttgtgcctgtgcatacctgcatgtgtacatgcatgtgcacatatgtgtgcacagggaatcactttaataaaggccacagcagagctgtccctgagccccttgcattcacagtggcatgtgagtgaaccaccttcttaggctgggcatccagtctcagactctggggctgcccatgccccatcctttatctgctccacgtgtgaggggttgctggtcctgaccagggccagctgtgaaccccagaatcctgggaagtcactgacattcttgtcagggccaagagtggagcaaggcaatgcctcgggcacaaactttaaggggtcaccagaaacatcaatcatcaagatatatgctattttaaataatcaaaatgaatgcaaaaaaaatttatgatggacaacataccaaattctaaacaaaggcaggatgagtatcactggcttctgcacttttctccacccagtctacccctcttctagtgcctggatcgcagggtgccaaggcctggatgagggaagcgtggagctgcaatggccactcctgtctgcctgttctggctgcacagaggactcagtccttgtcttgggggaacctatcttggttttagggtcatcctaaggatctgatgttttccaagtgagctggctgtccaggcccacccaggttcagtccagtcctgtgtctctgggaagtgctgcccctaccccaagccagtgtttgaccttggagcaatgagcaatgccctccttccactttcaaagttgtccccaagacgtcagctgtggttgtctctgtgcagacaccgaggaggaactgtcttctttctccttttggttgctttggaggaaagtaaagtgttgctggtttccctctttctacttctttgattgagagcagccgtcttgccggtaccaaccttccagatcttacctgtggttgcaggagcctgtggcctcagtcctgtgcccagtgacttctccatgtggatgtcagctccttaggggcaagcctgattccactgacactactcccacccctcataagccccttcttaccagctgcagttgcctggtaccccaccatcgctgactcattcctttggcatcaaggttcatcccttactgggccaccacttctgggtggcctgaaatagggccctgggcatccctcttggggaccttttggtctatattttcactctcacctcactaaggacagatgagtaaatctggttaactttgcctgatagatttggtgaccttttttcaggaaggagcctggaaagatgagattcaggtgtattggtcagcttagactgccataagagaataccatccactgatggcttagaaacaacagaaatctatttctcactattctagaggctggacgtccaagatcagatgccagcatggtcaggttgcagggagggctctcttcctgacttgcagaccgccaccttcttgctgtgtcctcacatcgtggagagagagtgaaaacaagctctctggtgtctcttcttataagaatgctaatcctatgatgggggctccccctccttacctcatctaaacctaattatctcccaaaggtctcatctccagataccatcacactggggttagggctttgacatatgaatctggggggacacaattcaatctgtaacaccaggagggcatgccgggaggaactgaccttcctccctccagctgccctggacacctttgccccattgaaggagcaggctcagaagtggaatgaggatggaataaggtgcactccatcatgcttacccacatccctggcaggaattgtcctgggccccagcaggagagatgcccccccatactgccatggcacctgctctgagacaggtgtgcagagtgcaaagctccaggtggcccccaagcaggtgtgctgggaggaggggcccgtgtgggaggagcaggcagcgccaaggcctagcggagcagtgacaggtccctgacttcagggaatgggcacgctgtgggcaggcagctggtgtgggggtgagggctggggctgcatctgtgggaccagggctgggccatccatcatatgccgtgtcacaaccccagtgcccctgctgtagccaggacaggaggctgggccaggctgggaggtgacaagagtgggggctgtccccaggagaagcactctgctgcctgtgcccaggcctctggggatgaggacccctcagaaggagtagctatgtctaggaagccccagggcaggagcaagccaaaggggacatcattagtgagatccaggggatcagtgggccacagaagccccagcgtgagcccctctgactgatgcagctaggcccacacctgcacctgcccacagcaagacccccaggaggagaggggacagatggagagaggcacaaagtgcccctggcctctgccttgaagccaccccaaggcaagagagatttgagcccctgtttagtgacctccaggggaacattctggcccatctgatgtgggaagccccttgtggagtctgtcattcctcagctgagccaggcctttggaggcagcccaggcatgtcccctgtgtgctcctatccctgtgttgggacacctggcccagcccctccttctgcctttctcttcccttcccttctcaggagtggacacttcctcctttagccccctcacagctgtgtgaacttctctgtatctctctctttctgtctctttctccccctctctctctgtctcattgtctctctgtgtgtctgtctgtagtattctctctctgtctctgtcactctgtctctctctctctctgtgtctacctttctgtatttcgctttgtttctttttctctgtgtgtgtgtgtgtgtatctgtttttctcactctctctctgtgtctatctttctgtatttcgctttgtttctttttctgtgtgtgtgtgtgtgtatatctgtttttctcactctctcaatctctctctctctttctgtctctcttttgctggcctgagcaaagagggagccccatcctgatgctacataaccgtgaaccagcacagacagaattgtaggaaagtcctgcaagtagaaggatagaaggatgagggaagaaacgccatgtgagtcatgacagatccctttccaggagccactgactcaccctgcctcctgccctcccactgtgacactattactcacagacaggcccggattaaacctatgttccaggtgccctgtggttcccacagtgtggctccctgggtctggcctcaggctccacaggtgcccagccctgccaaagtctccagagcagctgtccagctggggagctgcggggccccttcacagagcgcatgggaagaagttccatcctacacattacatcgagagggacgtgcctgagaaggggagctggagcccgtgcagccccctgcttgcgtgcagaacatagtgtaccctgagcatgccatgaaaaacacaaacgcacaaagttgtaaagaaaaaagaaatgacaggtggctgtaaaatcagttatagcccacgagaggcccactaatgagtggtgatttcagctgattacaaagaaatgatggtgtttctgtaatgaactaaacatgcactcgtgcgtgcacacacgcgcacgtatagtcacataactgaccagccctatgcatcacttgttaattacttagtaactgtaacaataatagtttccaataagtgagccttagtctctgcgcaagggtcagtttattgagcacacgggggccttgcagtgggggcaggtgatctgctcctgggagccgccagcctctcctctcctgctcttcatcttcctccgtggtgggaaattgtctcactgcttctacacctgaggctgaacatctccctttatttcagtctgaaacacatgtaaaaatatactggaatgaattaaggttgcaattattgatatcaggcagtgagtacatcagggtttattatactatctcctttacttacttcgaagttctctattaccaaaaaattaaaaactataaaagaaagaaaaaggaaatgaggctagattcaacacagattactcttaccaaacccttcgtagtcccaggagtcccctaacacaagcacttgtgacctggagtgatattcacagcattccttacctggcaatacctgagtattagcccccccagtgggatctttgttgtagacaaccagcaactatcagcccagccaataaacaagtaggaaaggggagtgctggagaggccaagaagtgggattttccatgctcctgggctgtgatccagagggcacggctgtgaggctgatctcaatgaacactctgtcttggaagtacagggatcctctgctacctgaaaacgttctgagtattcactttcatggattgcaaagtcatttacccaaaattcactctccaaatgaaaagtgagtatgatgaatcagtattcaagttccacctgggtcctgggagagggcatggacatcatatcccagctgttccgacaggaggacccaatctgagtctcactgcctgcctgcatcgtttgtctgctgccagcctgcacagtaggaagggaaaacatgatttgtatctgttttaggtcaggttcccaagaagtagagcctgagattggaattcttggaaaatggtgtttgcgggagcgctgtcagcagaagctataaggaagttggggggacagaaaacgagaggtaagaagccagtcaaaaaggcaggtccagcttaagtccgcctcagtctggttccacaagggctctgatgcatgaagaatatcacagggttgtccctcctgggagaggggccagcctattgtacctgtatcaaagccaccagctgagggccagtggggagggaagatcttccaggcatttccaggaaactctcaggagaagggtgtagctgtgagcagtctgcagctgctgctcactgcggctaaaggctgggtgtgcaggccagtcagccagtgaggtgccaacagcaggcactacagtccaccccttgactgctcagacctactgctttccactttaagctctctccatccaggcacagcttcagggaaaacttacaattggagaaacagagggatgaactacaatgcccacttctgcatgtgattgtaagactgtcactgatactcaccatcatgccccatccccaccatccattctagtgtccccttccccttggctaacactgctggtctaggtgacttccctagagcaggagccaaacccttatccctgaggcatctgaatcctggattcctttatcaggctattgttgttgtaagttgtccattcccaattacaactggacatgagactaccaagaaacaccctggcaaatcatctgagtgcaagccatattcttcctgctccattatgtagcggtagtcctacctcctaatgacaagggtaaattgccacattttgctccttgtgccaggatggtaatacctttctctacctgcttggctactggcacaaggaagcacagcatgaccaggaggcaattgtagctgtacatttagtgaatgtgttaatgtatcacctggtggaaggaccccctctgagaaccaggacttctagacccacaaaacctaaagttgtgaatggcggaagcacaaatttcccaagtggatcatggagagtgatgaagagttcttggttcccaaacccacatattttacctttcaggaacatggcctcatcccatagccattagagtgcatattgcattctggaggagactgggccctcctcatgggtgtcatcttcaagatgacagctccactgtgcctccaagaggatgctccaccaccctatctgtgattccttggttagcaggacaggctgctgcactgagggtaggaaaggcaagtccattgatggctggaatacatgtcaatccaagtcaagagaaaatgccgccctttccaggttggaaggggcccgatttagccaacttgtcacccagtagtggctggttggtctcctccaggagcagtgttataccaggaattcagcaccagtcgctattgctggcagttcttacattcaacagcagcaaaactaggtcagccttgatgagagggaatgtatgcttctgggcacaggcatggcttccttctctgactccatgactatctatttctgagtgcatggtggccgacattcagctgcctgcccatcctatccacttggttattattgcctcttccacaagaagtggtttctggctgtcattaatgtctcatactttgtgcccactcacacaggtttagctctacaacttttccccatgccaccacttttccacaatcttctaatgttgctccttccaagctactgaagaacgagctaagctattcaccaatgtccatgagtctatatttaccttaggccacatctctctccacacaaagtgaataagcaggtgcaccctccaaaactctactaagaggatttcttctccccagtgtctttcagggccaccttgagtggggctgaagtacagcagaagtccatttccagcttgcatcaacattccaaactaacctatccatgatcaatgcatagatgggtttttccctcctccagcagctagacaaaagacaccccccaccaggaggccatatttgcatgtgggtgaaagagaggcacaggggccaatattcgtgcaacagtggtagatggcaggtgggtctgggccacctgtccctgcagcttatctgtgccatctggacctgctcaagcctgattccagatataccatttccatcttatgatggatggcttatgacctagtgggtctgacagcaccaaactcataatgggcagttatggccacatggtcacttaatgtcctatggtcagacactctgctgagtggcatgccaggaaatgctttacaagtggtgtttggttctctgctgcagatggcatgaccttggtccggagccctaggggtttggacagtgactcctgttggggcctaatctcacattccatgcagagtatcatcagatttgccaatcacatagcctaagggtcaggactgatccaaccagtttttgcagagatcaaactggagaatgaaaggttgatatgatgtgaccatcatatcacgtttttctctcttgaaaagtatgcagatgtctgaaagagacaagtgccccaggagaaaatgcatgccttcctcaggatcggcccccacctcccctcctggccacaaggagggtcaaatctcagcatggcccaacttggacctgtcaaggaagaagaaaaaaattgtatgccaaaggaactcagtctttggctaacaagtactagacatcctttaagtctttgagaatggtaataatttctgccatccctccagatttgtgtttttctgttttggctgggtgggaatgcagcattttcactttgcctttgttattacaaatgttgcttattctataaatcaaggaaccattgtaagggctcttctgatggttaagtatatccattccaatgatttattcgggatccaaggaaatgatttctgggtgaatacacagaactagtggatccaatttgagacatacctgggccagaactatatttgtcgtcttaccccaataagcctgcactctactaggacagccatgacagcactttgggaccctagatataagtgtgaattgctggctgggcatggtggctcacgcctgtaatcccagcattttgggaggctgaggcaggtagatcacctgaggtcaggagttgaagaccagcctggccaacacggtgaaaccccatctctactaaaaaatacaaaaattagctgggcgtggtggtgggtgcctgtaatcccagctactcgggaggctgaggcagggagaattgcttgaacccaggaggcggaggttgcagtgagccaaaatcacaccactgcactccagcctgggtgacagagcgagattccatctcaaaaaaagaaaaaaaaaagtgtgaattgctatgaaatcactatcaaaagatctgagtgttacccttactcagtgtggtcgaatataaatagccataggttcctgttatacacacttgctgtggtgctacagagtctttcctcatgggaacccagtccctctttcagtcaatgggttctggttcgagaactggctgaggtttggaaactgtgcctttccatcataactttccactggggtgactgaccttggccttctgttcatcctttctagcccctaagaatccaacactctattagccttctccttagacccctataagctaatcccttctagttgttagtctgaccttggtgcccaatatgataattattcccactttgcttctgatatgcttctaagtgctgcccctggtctctgcccttaagtgatctatcatccccactgccattagggggagaagctctgaaaaagagttgtctcccatcaactctggtctacaaaggacagccctactgagcctcagccatgtgcccgacaccagcagattctttacagcctgggaagcagagtgtcttccctgcctttccagggaacatagccagcttacaggctttttgatcttatagagtaggtcagttatattttgccccatttcttttatccttttgatcacttcctcttggcccaccatgtaaactcaagcatccctgcttcatttaatcgagctgttgctttttctaagctaccaagagcaaccccagcaatatatcagagccctctcttgggacccttgctagggtgttaaatcctgcatcataggagaatgcccccacatcagcaaagtccccttatcctcttgatatcccacctgccccagtccagcaccttcaggatctggtctcaatcacaggatccagcacctttgggactgttgcaagcataagatccagcacttttgggatctagtctcccacttcctgctagtacttgttagccaaagactgagttcctttggcatacaatttttttcttcttccttgacaggtccaagttgggccatgctgagatttgaccctccttgtggccaggaggggaggtaggggccgatcctgaggaaggcactcattttctcctggggcacttgtctctttcagacatctgcatacttttcaagagagaaaaggcctccttctcacagcaagactacttctgtagatgcaggtggctcgtgggaatctggcaattcaaaattctcaagtgtactcactagcacattagaaaaccagtagtacacatctctttccaaatcttcattcagtgacactatgtcagtagctggaaatgggccatggtgggtgtatttaaaccatgaaaatcagaaaatgctacaaaccagggcatcccgcatctctagacagcagattgttggccatttcccagcataccattgtgtatactccttcccatcagggccgtggcttgccttggtggaggactcagcccttgctgaagttctgctactgctcttacaattgagtcctatgcctggtctccagctctgcctgcctcactacaggagacaagcatctctttgaacactgccgagaagaccctctggctctcaggcttggctttaaatcgatagacctgagcctgccattttctcttttccatgcatcactccactgatccacaggtctcagtggcatagtccttcgggttagcatctcccccacaccctcggtgccagagacactgagtaagaaagtacctccctgtctacccccatccccgctccccacaggcagggccttggcgatccactgctgcaatgtgccagagactgtcagtactcctaccaccagtgaggtggcaaccagctgggaagtgatccaactccagagtcccgccctcataggctgatttctaggaccacccctggtatactgtgttaggttcttgaagcagagcctgagataaggattctggcacctgtgattgagtgggagggtgctctcaggatgagatggggtagaaataggcaaaggtacagattcagcagcagttgagcctcagtctgacccagcagggagctctcaaatgtgaatgacatcacagagttgtccctctgaggcaggggccagcctttgtgctcctacatgagtcagtcactggctggaggcccctggggaaaggctagggctgccagctttagcaaataaaaaattagggcactcagttaaattgaatttcagataaacaacaaattattttttagtatatgtcccaaattgtgcataacataatgtgttttctccgccagccctgggaagggcgtaacttcccaggtatttctaggtgaagtaactttgtagatcaggagtaagtcccaggaaagaagtccagctcttctcttcagccctgggcagctgggggtaggcacaggggcccagcaggcacccatagcatctcctacagcatctgaaatgaacagggtcatcacgtactacatacaaatgtacccactgctgagttcttcagggattatatcattaggtacttggtattttaaatacattacattatgcagaagtcctttgtggattgctatatttggagagttttgtgatattggggggattagatggagttttcagatgggcatcatacggtttttcatttaaaaccctagagtattgtaatcctagggagtgatcctgcgattagtaaattagctctccaatagattttcaatgtggttgcaaaggacatgcatgtggttcaccctcccaggaaatccagaagggcagcattggcctgagtggcctgagtttggctggttgggctggtaatgctggacaaagacaatgggtggaatggtttgcttccctcagtcctttcagacacagcccagcccaccacgtcaagccagtgggtgcatctgcaaccaatccccatgagaactgcagcctctcagaggtgggcaagttggcccgggtgggtcaggaggatcagatgttgaggaaatctttggattggaggcaggcagagcagggaagcatcgggtgattctatgacagacccagggctccaagctgcagttcaggaggggcactggcacggcctctgctcaactcccccttgagtgacatcaggtgaagtgccgacaacacagaaggcagcaaatgctgccagtcaggtctgcttcccaggacagccagttgctaacccttctccagcacagcactggattttggtcacctggctgggagctccacctccccagctgctgcctcacctgcttttccaaaccccaccctgtaaacggtaactacattttgtgcccactacgcctcgtttccatctctttggagcacctctcacgtggagctgaacagaacgacctgttaagcccaccgtgtctgttagggttgtctaggctgtatcagatacccaactaaaactggattcaccaacaggtattgtcaaagcacataagaaagagtccagaggcaggcagctctcagcctggtgtcaggctctgggtcagctttccagattctcttaaccttccccacatctgccagatgccgccacaggcacaggaggtacaaacaaacccaaaaatgttctggaaacaagaagggaaggggatccccaccatatctccccagaggccttccttctcacatctcactgtactgaagccagctctagcagaagacagcagggtgaatttgtccagggtattcagcccccagtgctgggtccattactacttgacccctgaataaaacagaggttccatgagcaagaaggaaggggaactggatgttagagggcaagaatgtatccatcccacccctaggagcacgcatggacaactgccccatttttgctcctattgcagcccaggggctagcccagagaccttgccagtgctgagtcacaagatgctgggaaagtgagaccagagcctggtcttggggaacagctcaaggccgcattggtctgcaggtcatagagcagctgctgagcagtgagagcccacgatgggccaggccctgggtcttggagacctgaatgagatagactgggttcctgttctcctgggcattgcctcttagagggcaaagacaattaacaataaacaaatagaacatgaagtgttttccgatagtgactgatatactttggatatttgtcctctccaaatctcatgttgaaatgtaattccttatgttggaggtggggcctggaaggaggtgtctgggtcatgggggcagatccctcatgaatggtttagtgccatccccttggtgatgagtgagttcacgtgagagctggttgtttgaaagagcctggccccctctcattctcctgctcccactcttgcatgagacacctgctcccccttctccttctgccatgattttaagattccagggacttcacaagaagcaaatgctaacgccatgcttcttgttctgtctgcaaaactgtaagccaattaaacctcttttctttgtaatttatccagtcttgggtatttctttataacagcacaagaacagcctaatacagtgatgctctccaagtgacctttgggctgagacctgaagaagaaggggaagcagttaggtctgatagctcatgcctgtaatcccagctctttaggaggctgaagtgggaggactgcttgagcctaggagttgaagaccagcttggaaaacatagcaagaccctggctctacaaaaatattttttaattggccaggtgtggtggtgcacacctgtagtcccacctacttggaaggctgaggcaggagcatctcttgagcccaggaggttgagactgcagtgagtcatgttcacaccactgcactccagcttgggtgacagagcaagacctgtctcgaaaaagaagaaagaagaaagtaggaagaagaagaagaagaagaagaagaagaagaagaagaagaagaagaagaagaagaagaagaagaagaggaagaggaacaagaacaagaagaagaacaagaagaacaagaagaagaacaaggagaacaagaagaagaataagaagaagaaggagaagaagaagaaggagaggaagaagaagaagaggaagaggaggaagaggaggaggaggaagatgaggaggaggaagcagaagcagaagaaaaagaaagaaaagaaagaaagagaaagaaagaaaagggaaggagggaaggaaggaaggaaggaaaaagggaaggaaagggaaggagagggagagggagaaggaagaacaaagaagaaagaaggagaagcagaggcttgtgctggatagccttgcttttgccaatgaccttgctgattttcagggggtcctggtgtcttagtccatttgtgttgctgtaaaggcatacctgaggctggataatttacagagaaaagaggtttatttggctgagagttctgcaggctctacaagaagcatggcaccaatgcctacttctgatgagggcctcagtctgcttccactcatggcagaaggtgaagcagagcctgcatgtgcagatatcacatggtgagagaggaagcacgagggggcagggaggtgccagcctcttcctaatagtaagctgtcttgagaactaatagagtaagaaataactcacaccctgcccccaaggaagggcattaatctattcatgaagtatctgcccccatgacccaaacatctcccattaggccccccacctccaacattgaggatcaaatttcaacatgaggttccggtgggcaaacatccagctataatactgggcaatgctgaccagactcttcccctctcaggcccagagctccttggccctgtaacaacagaaaattgcgtttgagtgtcaagatttttcctttagtccccatgcagctccttagaatgaggtggcatcttctcccttttcataggtgaagaaacagaagctctggaggaacgaatcattcatccaaggtcaggtagctagtaagcgtcccaccagctccccagatctcctgtttcctgtcccaagtcccactgagtgagctggaacaatggcttcactggcacctgccgggaatggtggcaggtgcctataatcccagctactcgggaggctgaggcatgagaatcacttgaacccgggaggcagaggttgcagcgagccaagatcacaccactgcactccagcctggataacaaacggagattccatttaaaaaaattaacatataatatacatacagtaacattcactttttaagtgtacagtttgatgagttttatcaaatgtatatggttatataaccaccatcaccattaaggcagaatcttcccatcactcaaataattccctcagccccacctcttgctgtcaatcacttctcccaccctagccactggaaatcattcatctgttttctgtccccttggttttgccttttctagaatgttctatacatgagaccactgagaatatagtcttctgtgtctggcttctttcacttaacataatgcctagctcagcagtgtgtcaatcctccctcccttgccattgctgagcagtgagtattccactgtatggctgtgctacggtgtgttcatccatttattcattcaccagctaatgggcatttggattgtttccaggctttggctatgatgagtgaagctgctgtgaatgttcaagtacaagtctttgtgtagacaggggttttcaattggcgggataaatacctaggagtagtatcgtgtggttaagcgtacgtttaaacttagaaaaactgtcaaactgttttccaatgtggcctgtaccatgttgcatttccatcagcagtgtttgagaattccaattgctccacatcctcctcccgacacttggtttcacccatcttttaaatattagccactctggtgactgtgtagtgatatgtcagtgtggttgtaatttgcatttctatgattgactaataataatgttgcagatatttctgtatgcttagtgggcatttttggtgagtttttaaaaattgggttgttgtcaccgtcttattgagttggaagaattctttatatgttctggatgtttattcatgtgtgtgtctgctaagaggtgagactggttctaccctggtcctaacaagcaccctgggcctgcatccctttttgtgtctgtgagctgggtctgcagccctctcctcccactacctactgcccagcagtacccctcacccatcactgtggctcctgcaatgacatctcagcctgtctctccctccctccagctagccagaggcaggatggctcagtgacacagggtgggccctgaagacagagtgccagggtttggaccttgtattagcaagagtcacaagggaaacttactttatctctccatagctctgttgtgaggatccaataaattaatccatagaagagcttaggacagcacctggcacaaagtatacatgagctattatgatgttattcttccaacccattgtttctgtgttgtcataaacatgaatgcaggactcagtgtcccagctctgtgtccctcgcatacattccctaacagcccacaggtcttgcctgtcaccgcctcattcaataagtgatgactctgcctcttccttggctggggccttgcattggacatttctgtatccatatttgttttttaaaaactagctgttggccgggcgcggtggctcacatctctaatcccagcacttgggaggcagagacaggtggatcatgaggtcaggagttcaaggccagcctggccaacatggtgaaaccccatctgtacaaaaaatacgaaaattagctgggcgtggtggcatgcacctgtaatcccagctacttgggaggctgaagcaggagaatcgcttgaacctgggaggcagaggttgtagtgagccaatatagcgccactgcactccagcctgggcaacacagcaaaactccatctcaaaaaaaaaaaaaacaaaaaacaacctagctggacttgacactcttgttagaggaagatttttccacatctgttaacttttcttctattgttatccatctgtgcaggtttttctgtcctcctgagtcattttgataatttatattatattttgaaaatcatccatttcctatagttgtttattagtgtcttctctgttatatttgatcagattaccaaatcttgctcattgattgcccatttattttattgtgtttatttttttgagacagggtctcactcgacagcccaggctgaagtgcagtggtgcaatcatggctcactgcagccttgacctcctgggctcaagcaattctcccacctcagcctcctgagtagctgggacctcaggcacacgccaccacagctggctaatattttatttatttatttatttatttatttttgtagagatggggtctcactatgttgcccaggctggtttcaaactccttggttcaagtgatcctcctgcctcagcttcccaaagtactgggattacaggagtgagccaccatgcccagcccctatttactttatagtaagtgccttcatgggcataaatgttcctctgagacagctttggctattagccatacttttaatattttgtacattcatggttattcatttataaatggtctgtaatgcaatgcagatttcccctttggcccaaatgccatttacagcagcacttttctctttctgagcagacagaatattttggtttcccctctgttgtttatttctcgtctgcctcgcctcatttgctaggtgttcccttggtgtgccttaagtatgagccactcaaatatttgtgtttctctaaacacccctgacactgtcctgctggtttctctatctggaatatccttcccttcttggccagttccccctagtgcatcaaagaaatcctgctcttttgccttcagaaaacaaaacaaaacgaaacctatcagtctccttatgtccccaaagacatagctttgctggtatctggttgtattgagctgttcatttgtctcttctgctagatggtaagctccttggaaactaaaaactaatcacttttctaacttcagactgagcacaaattaggttctcaagaaacattgaataatgagtgatccggtatccccttccaacatatttttggtcattgataccatcattctgagtagttactagggaacacttcactgcagtaaccaatacagcaaaacgtgaaatacagttacatagtagaattgtatttcttgcccatataatagtcaagtgcagttcttcatcagctgggaggttctcctccacacagtcatttaggaatccagggaacatagcagaggttgctagctctagacccaaacccatgtcctctttgtccacagtgaggacaatgccagcaacagctggccagctgttctgtagttctcagcctccctcgcagtgagatgtctccatgcaatttcagtggagcaacatataccatttccatttccaggtgtaggctcctaagaagagggtggcttcttcatgttctttctcacctttccgtaggctagctgcagataatgatgaggctttagggagtgggtggagccataaagtagaagcctggattcctaaatgacggtgtgaagtgttccctaatttcacgtaattgtttcttaatttcctgtttgggttatttgttgctaaggtataaaaaaaccctgatttttgtgtgttgatatttgtgtgctgcaactttgctgaattagcttattagctcaatttgatctcagatattagctcaaatattttgggagattatttatggttatctacataagatcatgtcatctgaaataaagatagttctatttccttctttctatcttagtccatttgggctgctgtaacaaaatgccataaattggaggctgagaagtccaagatcaaggcccaagctaattcactgtctgatgaaggcctgctttctggttcatacatggcaccttctagctgtgtcctcacatggtggaaaaggcaaggtagctctctgggattcctttttgtttgtttgtttgttttgttgtttttgtttgattttttgagacagagtctcactctgtcaccaggctggagtgcagtggcacaatctcggctcattgcaacctctgactccctggttcaaacgattctcctgcctcagcctcctgagtagctgggattacaggtacccatcaccatgtccagctactttttgtatttttagtagagacagggtttcaccatgttggccaggatggtctcgatctcttgacctcgtgatctgcccaccttggcctcccaaagtgctgggattacaggcatgagccaccgtgcctgtcctccggtattctttttataagggctctttttctttttatgtgggctctaccctcatgacctagcaccttctaaggccccacctcttaatatcatcacacagcagatttaatatatgaattttgaggggacacattctttccatagcactttccagtatggataccttttatttatttttcttccctaattgctttggttagaaatgtcttccctaattgctccactactatgttgaaaagaagtggcaaaagtgggtattcttgtcttgctcctctcttaggaagaaagtttaagtcttttgccattaaatatgacgttagctatggggttttcatatatgacatttatcatgttgaggaaattttcttcttgtttcaatgatgacagggtgttgagttttgtcagatgctttttctgcatcaatcaatatgaccatgtagtttctttgttttattccattattgtagtacattacattaatttttgcatgttgaactattcttgtgttcctgggataaatttcacttggttatggtgtataatccataaccataacctgaagatatgctgaagaggctaagtgccatggctcatgcctgtaattccaacactttgggaggctggtgtgggaggatcacctgaaatcaggagttttagaagagcctgggcaagtaaacaagatcccatctctacaaaaaattgaaaattaccgctgggcatggtggctcacgcctgtaatcccagcactttgggtggccgaggcaggcagatcacctgaggtcgggagttctagaccagcctgaccaacatagaaaaaccccgtctctactgaaaatacagaattagccaggcgtggtggcacatgcctgtaatcccagctactcaggaggctgaggcaggaaaatcacttgaacctgggagacggaggttgcagcgagccaagatcatgccattgcactccagcctgggcaacaagagcaaatctccgtctcaaaaaaaaaaaaaagaaaagaaagaaagaaagaaaagaaaagaaagaaaattagcttgatgtggtggttgtgcacctttagtcctagctactcaggaggctgaggcaggaggattgtttgagcccaggaggttgaggctgcagtgagccatgattgcaccactgcactccagcctgagcaacaaagtaagacctcatcactaaaaacaaattttttaatactgaagaattttatttgctggtattttgttgaggattttgcatctatattcacaagaaatattactctgtagtttttcttcttgtagtatctttgtctggtttcagtatcaaggcaatgctggcctcatgagatcaatcaggaagtgttacttcctcttttattttttggaagaatttgagagaattggtgttaattcttctttaaatggttggtagaattaccagtgtagacatctggtcctgggattttctttgttgggaggttttttagtactaattccatttccttacttgttattagtctaatgagattttctgtttcttcttgagctagttgtagtagctcatgtgtggaatttttctatttcatctaagttatccaagtttacctaagttaaagttccattttatctaacttgggtaagccaacaaacaatactaaattgttcatagtattctctcatagtcctttttttctctaaagtcagtaataacgttcactctttcattttttcattcctgattttaataatctgagttctttctctccccctccctgcaattgagagtcatttaaaagtgtcttgattaaattttatatatctgtgagttttccagttttccctctgttattctcttctagttttatttcatgtgatccaaaaagatactttatatgatttcaatttttttacatttactaagacttgttttgtgactaaaatatccttgagaatttccatgcacatttgagaaaaatgcacattctgctgttgttggacagagtgttctgtatatgtctgttaggtctaattggtttagagtattgttctagtcctctctttccttattgatcttctgtctagttgtttaatccattattcaaagtagtggccgggcacggtggctcacacctgtaatcccagcactttgggaggccgaggagggtggatcacaatgtcaggaggttgagaccagcctggccaacatggtgaaactccgtctctactgaaaatacaaaaaatttgctggacatggtggcacacgcctgtaatcccagctactcaggaggccaaggcaggagaatcacttgaacccaggaggcagaagttgcagtgagctgagatcgcaccattgcactgcagcctgggcaacagagcaagactctgtctcgagaaacaacaaaaacaaaaacaaaaaacaaagtagtgtactaaagtctccaactactattgtagaactctatttctcccttcaatgttgcaaaattttgtttcatgtattttggtgttctgttctttataatttttatatcttcttaatggatgaaaacttttatcaacatataatgttctttgtctcttgagacttttttttttaacttaaaatctatttgggctgataatacagccaccacaactctcatattggttgttattttcatagaatatcttcttccatccttctactttaaaattcttctatctttatatctaaagtgagcctcttgtagatagcatataggtggataatgttctctttattcactctgccaatatctgccttttaactggagtttaatctatttatatataaaataattactgattaggaaggacttacttctaccactcagctattttttttctgtgtgtcttatacatttttaagtttctcaattcctccattactggatttttttttttacttcttgattttgtgtctgtgttgttacattttgattattttctccttttgatagcggcaggaggcagccaaatgcctggcagatagaagcttgtcccccatgaaaccccaccttcaagccaaaaaatagcctgaaggctgaaagaccggactgctggtcccagatgaaacccatgatccagagtgagaacttccattcctgtttgcctgccctctaaataatcccttttaaccaatcgaatgttgccttttccaatactacctatggcctgcccctcccccattctgagcccataaaagccctggaatcagccacattgggggcactttgccaacttcaggtagggggaccacctctgtatcccttctctgctgaaagctgttttcatcactcaatgaaactctcaccttgctccctctttgattgtcagcgtatcctcatttttcttgggtgtggtacaagaactcgggaaccagtgcacaagccagacttggtctgggcagcacgggttagtgggccatctcccacagcaggtagcatggccaagtgaggcctgggcagggcatcaccaaggtccctggcttgcaaagtgaccaaggaaaaaatcctgtgtcactttccttttctcatattttttagttattttcctaatgattgccttgaggatggcaattaacatcttacacttataagaagctagtttgaataatagttccaatagtacatgaacactctactcctatatatctccatccttcttcctttatattgttattcccacaaattatgtttttatacattatatcctcactaacataaacttattattattttctgcatttgccttttaaatcatacaggaaaacaagaatcacaaagaaaaactacattaatatttgctgttatatttacctatatagtgacatttaacagtgtatttttatgtcttcagatgtctttgaattactacttagtgtcttttcattttagcctcaatgtttccctttagcatttcctatagggcaggcctgccggtaattaattccctttggttttctttatctgaaatgtctaatttcttttttattcttgaagaatagttttgctggctataagattcttagttaatagtttttttcccagcacttcaattattattaaagtgttattattattattattattattttgagatggagtctccctctgtcactcaggctggagtgcagtggcgcaatctctgctcactgcaacctccgcctcccaggttcaagcaattctcctgcctcagcctcccgagttagctgggattacaggtgcccgccaccatgcccagctaatttttgtatttttagtagagacggggtttcaccatgttggtcaggctgatcttgaactcctgacctcaagtgatacacccaccttggcctcccaaagtgctgggattagaggcatgagccaccatgcctggtctaaagtgtaattattattacagctgccatttggcctccttggtttctaatgagaaatcatctgttaaacttattgcaaatccttggtatgtatgctatgtgtcatttctctcttgctgcttccaagattctctctctgtctttgtcttttgacaatttgactataatgtgtttcagtgtgaatttcttagagtttatcccacttggatttcattgagcttcttggatgtgtacgtttgtctttcaccaaatctgggaaattatttcaccatttctcaaatatctttttcttcccctttccatctctcttcttctggagctcccgtatacttagttggcatgactgatggtatcctactggtccctcaggttctgttcatttttcttctttctttttttctgctctgcagactggataacttcaatcgccttttcttcaagttcaatgattatttcttctgcctgctcaaattggccatttaacccctccagtgactttttcatttcagtattgtacttttcagatccagaatttctatttggttcctctttaataaattctttttattgtcattccccatctgttcatacattgctctcccaatttcctgtagttctttgtccatggttttctttagttaattaagcatatttaagacagttgacttaatgtctttgactagtaattccaatgtctaaaattccttatggatagcttcttttaaattatttttgtcctgttagagagtcatatcttcctctttatttgctttgtaatactttgttgaaaacttaacattttgagtagtaaaatgtggtaattctgaagccagattctccccctcctttgagattggttttgttgtttgttgagggctgcagttgtccatttgtatagtgacttttccaaacgatttttgcaaagtatgtattctctcttgtgtctggtcactgacgtttctgttctggtgcctctgcagtcagcctatgacctggaagagcattccttaaatgcatagatttttttaaaacccaagaaacaaaaaacctagcatgtatgtacctttttaaaaatcttctgatagatgccacctggaaggctgctgctgcctgaaggggcagaaacaaaggcaagctctactctgagccctcagggaaccaccagataaacaaaagaaatttgattctccaaatttctggaagacaaggtcctttctgcccactcctgctccagccagctgctctaggaacacaattactgtccacatggccacaggaatgttgaagaatgcaggatggtagctggtttgcccacaccactcacttatgagccatcagcatgcctctcccttcatcgagcactcccatggttgctgtaagtgtccaatcaggttccagaattctgaaagagttgactcttacaggatttttttcttttctaacttgctggttgtttagatagaggaaccaattcctgaagtttcctacgttgccagcttcatgaggatcattccctagtaactcttttcagacaaaaagcttcattgatttactgtaggactagcatcaaagagtctatgccacctagtctgtctccttaaaacacagaaataatcagtatgcattggggtaggagtttggcattagatctgccgtaaatcaagagctggggacagcccatgtcttaaactctgacccaagggctaaaatatcctttggtagcaacaacagctacaaactattgaacaacttgtatgtgccaagagccttacctgcattatcccattgaatcctctcaacagccctgtgaggtagtagaattgttgcctgccccttactgaggcctagaaacattaaggaatttgcccgaggccctagagccagtgagtggcaaagccagtctccagactcaggctggagatcctacagttctgtgttaccccagtgttatcctgcctctcagcacagagtcttggatgattctcctaacccctccctaggcaatgcacagggctgctccctgcacccttactcatgctctgctcttcaaccccaacagtgctggccttaggctttatccctgacacccagccccaggctccattccatctgttgacagaggcaaacactggggcaaaactgacctctgtggataccactgtgtccacctccaccagcttcagctgaagcctctgaacatctccagcatggaagaagccccaaaggatatttcctgtcccccagcatatgcttgaccctgaagccctccccatctagtcaagaagaccaaactgttaacaatcctggagtcagagtgacccatgggtgaatcttagccaagtcactcatagctgttgcatcctagtaaatcccttaactcccataggcttcagtttccctgcatataaaatgacagccttcagctcatcggccagtttcaatccatctaaagggtctagcacatcccctggcatgtggaagccacagggcacacactagttgtggtcatttgatcctggcatgctctgctgtctctcggctctccccttgcctctttccctgatgtcctggccatcagccactgcctaacaccctcccactcaccaggcccttagcctgccccttagcacaagagcacagccggtctcaagtctaccctgctgtaagcaaacacttgcaacatcatgctgacctccaggccctgttgcatcagcgtgcccacacttggtgcccagctggtactgagggtatcagggaacaggccagtggtggaagggcggacactttgggttccctggtttcctggctcccaatatctttcccaatggcatatggggtctagcagcttggctcatttaactgtgaacctctaccctttagaatctgggcctccaggcttgcttctgtgcaaaatggcagataaggctcaacctttctttttttaacttcattgttaaatattactccattaatacccatttactgcagaaaaggtaggaaatacagataagcaaaaaggaaaataaattaaaatcctcataccaccatcatcaagataattactgtcaccattttggtatatttcctcccaatacatatattatctatatcgtatatacgacaaaaatggatcatactatgtttcctgttcttcccctgtgttagtcatctattgctgtataacaaactgcctcaaaacttagtggcttcacctttccgtgtattatgatgacaagaatgtggtatgacactgtcttatatctggatcatatgctaaaagatagaaaatggtttctaaacttatttgttctgtaataacaaaattttatttcataaagtgtttttaaaaaaaaccatagtagcttgaaacaacaaacctttgttatctcacacagtttctgtaggtcaagaattcagaagcagcttagctgggtggtctggcttggtgtctctcctgaggtcagggttttggctggggctgcatcacctgaaggcttgactggggccagaggagctgcttccaaagtggtccactcacatggctggcaagttggagttgcgtattggcaagagacttcgcttcttctcaatggatcttcccagagttcttgtaggcaacctcatagcatagcagttggcttcccccagagggaacagtccaggagagaacaaggcagaaaccacagggtcttttctggcttaggctccaaagtcatactccaccatttctgcattatcatattagttacacaggctagacctattctgcatggaagagactataccatggggtgaataccagaagcagggctaattgaaggccagcttcaagggcggctacacattccctttcaacagtatgtcatgaacatctttccatgccaatagagcagatgaatcttaccatttttaatgactacatgtaagtgtagcataatttatttaaccaacctcctgtagttgggtatgtgggttgtgtctcgttttttgatagtagaattaatcatcttgaatatccatcaccaaacttgtcatattattttcttttgatgaatgaaaaagaaaatcaagtcatgtctgtcaatcagaaccctgagcaactaagaaatgggggtaccactgggacatagagcaaggtcccttctgattctgctcttgtctttctctccccatgaaatggggagttcactatctactgagacatcctagcccacagctgcacagttctgtctttttagaaagctctaagcagaaacaatgttcatccatcctcctcgggacagcccttgagctactgaagactctaagcatgtcctggtcatcctccatgagccatcatctctgaggccctccccttcttggcccctcttctctggacaggttctggacagtcttgcccttccaaaattcctggaaagcaggaactgttcctgctacaatgactctcaactccagtgcagtacagactgttggtgtcaccccttatcctgaagaagaggcactgagacaggacaagggtgggtgcccaggagggctggcatgagtcatgagaatctggtcccggagaattagacggtgtggggaagtaggggtgttgggccgctttctggcctcatggatgccaatgaatatcagcaggtggctcccagaaaggaactctaggggatgcctgttgctctaaatagaggctagagagggcactggcagttcagtcaaccaagaaagggggcccacttgcctcagcttcaggctttgtacacatcctcagcctttcttgagaactgaatttagattctcctcccctgtgctgtgtgcttggcccagaagaagggcaagtctcgctgggtggctgcttcttggcctggctgaaccagaaggccccagtgccactccaaacctgggtgtgagccctgcccccatgagcaaacagtagctcagagctgggggctgtgggggtcagtggcctgtcacatgagatctgatgaggccatctctgctctatattgggaaagggatcaattgtatcaagggctttcttgggagtgatcactctggccattggcgagagacctggcattctgacaaggcaccctccataccctgacccacttgccagctccagctaattttagcaggctttggcaggtgccagcaagtacatagcatgtggatgtcactcccaggtgagcccaaggagaggcctgggccagagcctggaagtcatggtctatgcccatggaggcacccaaagcaagcctgaggcctggactttgcagtcacaaaattaagaatgatacccctgttttttgtttgtttttgatcagttggccaccttcctccaccaccccttccccaagttccatacagacccctggattgtatgaaatgcaaatcgaacctctctgcagatgaaaatccactggggatccccttgcctccaagagcaagtccagacctgcaccagcgcgggccaggcccccttaggaccccctccctgtccaagggcatttcagtaagtgttctgtggccaaggcagcctggtgactttctgcccgcacaaggctgaggaatggaagatgggtaggctggctctgcacaccccctcctgctgggcagcaatccctaccccatgttcacagagtgtggccggctgccccatggctctgtccccgtggccctgtcaactgttacccacatggcctaccctccctttctgccctgcctctgaccccatggcagggggcagagtatttgagcagccgccaggctgagccctttcagtgcagaagccctgggctgccagcctcaggcagctctccatccaagcagccgttgctgccacaggcgggccttacgctccaaggctacagcatgtgctaggcctcagcaggcaggagcatctctgcctcccaaagcatctacctcttagcccctcggagagatggcgatggatgtcacaaggagccaggcccagacagccttgactctggtaagggtcacaccaaagttagggactttgcactgggagagcagcacccagggcagggcccttggttttgcagattaccaaaactaaggctgggggcagggaaggcgagcaggcttggggcaccttggaaggaggcacatgggccttgggggtcctggctagggcagctgtgcctgccactggccctctgcccaccacccctcctcactgtggctatccagtgtccagcctctcgaggggttctagggtacttattcctggagctaacggtgacccaggacaccagtgtccggggcctggcctggggcttttatggggggagctggctggctgcccagggctgtctggctctctgggggctctgcatggcatttccaggggttggtggatcagggattctgtccctcaggagaatgtgggcactagcccaaggccactcacttctgtgtacatagccacctgagggcccaggaatggagggggccaggctacagctggacatctggcactcggatgggctctggagcccccaggcctgcagcatctgcccagggactgccctggcccttggccatttcctcagggacccacagctccaccagccggcccctcccagtgctggaatagacagttcctcagtccacatctgccaaaggcggcactagaaggcatcctgccttttttactgcgttctggaggtggggtcacaaagcactgctcactgcataaaagggacagcatcctgcccctggcagccctgcctgaccagctccgcctctcccactgctatccaacctgtacaccctggtgaccatgtccaggccagtggccttaaggactgtctctgtactgatggctccacatctacctctccagccagactctcctctgaactcgggcctcacatggccaactgctacttggaacaaatcgccccttggctggcagatgtgttaacatgcccagaccaagatcccaactcccacaacccaactcccaggtcagatggaacctcttcttcccaggcccttctgttcctctcctcagcccctcccacctcccttcagaataagtctagactcttatcgctttcaccaagcctgcgcccagcatccctgcacagggattgttaggacagcctgacgccctgcttccaccctgccccaagatgcccctgctctgcagcccggcgcctccaggcttctcacctcctgctgctcacagctcagcctcactccctccctccccgcctctgctccagcctcagtgcaggtcccctgctcccatcttctggcagcagctgcccgacctggtccctcttcatctgtccccattccttcaccccccagcctgtccccaacttgactgaggttctttcctgcagatccccgcccttgagaggggttggtcccactgtcaactctgcttctgtgccctgtgccgcacctggcattcagtgagcatctgctgaagagatgagggtcagatgccctgcagggagtgtgggggcgtcctcaggcaagaaaagttgtacgtttggctgtgggccctgattatgtgtcctgtgacctcttgggtgaggtcagcaagagaaacctctgcaagctggctggggctgcctcccagaggctgccagggggagggacaggctctgtctgtgctcttcttccgaggctacacctggggcgccaggctctcagggctccccaggtaccaccacatttcctacactgcttgggaaagccctgtaagtttgcacagacacccagcatgaggctcgccagagagatacttgtagctggggtctgggcaccaggaacagcttggtgctgggcctgaagtcgggcaggatgcagcctggccaggtgagaggaaagcttggagccagtgcctgggttcaaactcctctgtggcctatggttctgtgggcttggggaagggtttgtacctctgtgtccagtttcctcacttataaaaaaaggagataataaaagtacccatgtcccagggtggctgtagcaataatagggaggggtgcccagagcaggtctggcacacaggaagtgtgcatcagcctcagtccctgccattgggcttgtcctgggagtctgtgaagccaacctctgctccacaatgtgacccccaggcttgtgagaccaagctgggtcagagcttcctcctctggggttgcaccaggaggggaacttctgcaggcccagatgcaccctgaggaaagggcttgttcccaccaagaacaaggctcacctttggaggatgctccccacatgagaggtgaacccccaggtctactggtgactgcagcctcggaagctgacagcatctatcctccaacccatgcccactgggaagtgtgtgaggggtcctcataggccctgcggtgtggacaatgcagagaccctgtagcatctggctagggcggggcccagataagagccctgtgccaggagagcctggccggttctgccactgtggggagacaggctcccccaccccatgtcccctgcttccctgcagcccacagagaatacagacctacttttacagaaatccagatttttgtgtaaaagtgtctctattttaagtagattttaagtggtggcagcaaatttaagcttttgagaatattatacagaacaaatcagattcacaggccagatgcaactttatttacagaaatgggatcaggtcctacctcaggtcccatctcacgttttcacttatgcctatacgtctccttcacgggaaaggccacaagaggccctgcggtaagtgtcccggtgttgatttaaagtccccaacagtgaatatgagggtcctcactgttgcagcaagaggatacccccctgtgtatcttggaaatgcctgcagccctcttgctgcagaacagattcttaggagagaaactgtcagatcaaagttaaacttagagaaactccaaattgccctctgaacagacggtatcagtttgacatcatccaataccgggattcctcggggagaactttctggcctagaaggcagtagagccaggacttcacccagtcagtggcagggccacacgtgggccttgatacagagggggaagacttgagcctcctcgacaccctacagggcccagcctcccaacatgtgataagagaaacaacagccaacttgtacctagctctccttattctccaagggctgggccagttctccccacagccctgcaagggaggatcactcaagggccccaactgtctgacaatacagccacactctgatcagccacctgggcataggctccatgccattgtcctccgccaagacctcagactgaaatgttggctcctcccatgaagaacctggggccaaaggaccagagtccaggtccgtggctgccaggatgggccacttggagagaggcacaagggtggtgccaggcaggtgtgagggctggacctttgcaagagcagcatcacttttgttgagagcccacaggtatcttataattgggtcctaggacttcctgccagtagccattgtgtgcatggatttgggtgctggcctcaccatggtgtgctggctgcccatgcctgcaataatgacttctgtaagcctttcttcatctgcaagatgggtgctgctggcacctcctccccggtgctgtggtgacagggcatagtgtgtgaggctgctatgtgaagcacctaatgcagggcctggcatatggaggaattcagcaaatgacagatgccttcacagttagttcctggcatcctctacattggtgggtgtaggaaagaaagacagaggaggcaaaagttgtagctgtggggcattgaggacagcctggattgttccacagagccctgaggacatctccaggggtgtgctctgcaggggcagctggattggagggttaggggtcggggagggcgtgcactcccacccatgctcacagcctcggaacagtgcctgctcagccaacatgggtgtttgattctgtgtcttttgtcacagactttatcagccccatccctttctgaccttgcctcagtttaaattttacatgtggggcctcattaagagacatggttcttaactaaagatctgtatccattaggaatgctttgggctgcaggaagacaaacacctgactcactgtggcataagtggtttgcgtctgctcccataagctgcacgtggagggtggatctggcattactctctcttccctacatttgcagtatgctaacagctttaacctccagccttgtttcttcatggttgcagggtggctatcacagcgctggccatcacatccttacacagctgtgtttacaaatttagggggacattgaagctcctcccctgctaaaatcaggcttcccttcacctgtcattggccagaactgggtgaaatgcccaactctagaccgatcatcagtaagaggagtatagaattgctgtgcccaccttagattaatcatggcgcaatgtgctccccataccaacaaaatctgagttctagaaactgaggaagaagaggaaaatggccgtcttgcctcctggctgggattcagagcatctccaaccctctgagcttatgtgtaagactgtgggcaaaagtgtgtgagtttttgtggaatggatccacggcttttatcagagcatctttcctttttctttttgattcaagatgaaaatattcttatgattatttttctcaccactgcccagagataaccagcacattaacatggccttttctccatgaatagcactagggtgcccagtggacagacacatagctgtccacacaccagcttgctggggatgcataggcagagtcacatctgcactcacggcctgtcctcacactgccatgtggagagccagcagccacaccatgggccgtccatgctcacgggagtggcagtatcagatctgagcttcgtgtgcccaggcgtctctcacatcagtgcatagggaccctctttgttctgtggcccagtgtgcccatgccacagatggcttcagtcagcagacacctccttctagacactcacactcactcctggctggcccttagcacacctgtgcagacaggcccatttattttcttgtgtaaatcccaagtaggaggactgggtctctctgacagcaatgccagctgcctggcaccctccagacaggtggctcaagccccacctcgccagctctcccagttagcccctcctttccctggctctgacctgagggacgaagcagggtgctacaggacgctgtgccacagggatatcgtcagggacagaagctactctgccctctgctgctcacccctccaacacgctgtgggctgcatttgttgagtggctggtaccagactctgctcttctgactttccagctggttttacctgtagtaaagtttgagaagatgggtcatcctgaccccggggtcagaagacagaaggaggcccatggcgtgtgggggagatgccccgtgaggccctcggtgtgcagatgcctggtgacagccccaccctgaggtccccagcctaccccctccccagcccgactgctcccatccccctccctgtgcaggtagagcagatcctggcagagttccagctgcaggaggaggacctgaagaaggtgatgagacggatgcagaaggagatggaccgcggcctgaggctggagacccatgaagaggccagtgtgaagatgctgcccacctacgtgcgctccaccccagaaggctcaggtaccacatggtaaccggctcctcatccagaagcagctgtgggctcagccctagctgggagaagcaccccaggcactcccagactcacagccagcccgagacagaatctcctggggagcaatgaagtcctcgacttgggccagttctcacccttggctcctctggtccggccctggggcactcgggctcaccctggagctggcaaacctcaggaaaactggcgttttaaatctcactcctggccaggtgcagtggctcacccctgtaacttcaacactttgggaggccaaagcaggcggatctcttgaggccaggagtttgagaccagcctgcccaacatggtgaaaccccgtctctactaaaaatacaaaaattatccaggcatggtggcacattcctgtagttccagctactcgggaggctgaggcataagaattgcttgaacccgggaggccgaggttgcagtgagccaaaatcgcgccactgcactccagcctggggtgacagggtgagacaccatctcaaaaaaaaaaaaaaaaaaagacctcactgctccccatgggcacttagggaactctcccagcccagttctgcagctgggccattgcactagatcctcagttggtccctgggctctcggtgactgtccagggcaggagtttcccattgacttttccctggttgacctttgaccccttccacagttgacactggtgtccccaggtgtctggtggccccttgtccagctcccttagtcccttgtgccttccctcctcctctttgtaatatccgggctcagtcacctggggcccacccagcccaaggccagcctgtgggtgtccctgaggctgacacacttctctctgtgcctttagaagtcggggacttcctctccctggacctgggtggcactaacttcagggtgatgctggtgaaggtgggagaaggtgaggaggggcagtggagcgtgaagaccaaacaccagatgtactccatccccgaggacgccatgaccggcactgctgagatggtgagcagcgcaggggccggggcagggggccaaggccatgcaggatctcagggcccagctagtcctgacgggaggtgccacctgtctaccaggggtggggagagcgggggctggaggaccacccagcctcagaggcagctggaggcctgggtgaacaggactggccaacatgtccccaagtcccacagtcaccatctggccagcattgagaggggaacgggctgaggaagagttagtggcaagaggaaccccagccagtcacaccttgtccagtttaccagaggaaaaaccaatgtgtaagaacagaaatgtgacccggcagccagtgcactgcccccctctccaaaggccacccctcaccctccaccagcatgcacagaaagtggggtgacagcaatcacaatgtctacccaggcagcaaggacccctgaccatggggaggactggggtgcagggaacatagaagcagaatgaggcctagggggagttgggcaaggccagagccctagctgcagccaagcacatggccaaggccagctcctggaagggcagggctccgaggcaggaggcaggaggctgcccgtggctacccgtcctcacacccctgcagcttgctagtctgtctgtgggctgggtgtgaatcaaggcagtgggatggtgtggggacctccctggccccagcagccagtgaggagcctggtcagtcagcagagcattcagcagtatccagttccatggagaggcccgtgtgaggggagtcggggctggtcttcagtaaggatgggtggccagggcccctagaagtagaaaaggagactccgggtgctggagacagaaatcaaggatgtgcctccatgtggagcctcaggaatagctggccaggcctgaggctgaacctcacaaggttcagctgggagggctaggctgacagagcacagccgggccagggaccagcctgccctgtgttgccttgtcccgagggccactgtcagcaggtctctggcatgggggaggcttagggcctgagcccaacaagcagcagcggaagaggagagggaaactgtggacaggcctggcattcagtggccaggtgttgcagtgtccctgaggaatagcttggcttgaggccgtggggagggctgccggccagcgcacccccccatgccagatggtcaccatggcgtgcatcttccagctcttcgactacatctctgagtgcatctccgacttcctggacaagcatcagatgaaacacaagaagctgcccctgggcttcaccttctcctttcctgtgaggcacgaagacatcgataaggtgggccgggtggaggggcagaaggcagatgaggggaggcacaggcaccccagaggaactctgccttcaaatgtagcccccataccatgtgctcagaagggagatctggattcaaattgtggccatgtcacctgccacctctaatgctgtggaaaagaagcatcacattagctaattctggctgtgcgccttgtgaggcaccagctatgatcaccccactccagtggaaagagcagctggcagtagggtggggctcaaactcaggcagccgggctctgggtcacctgcaggccacggtcatgtcacactgcctctagctgagtcagaaatgtgaaggaactgagattctacccttcctgcaagctagcaaagtggcctgccagttacatctgtgcatgcacacacacacacagttatatatgcacacacataaaacacgagacctttgggtcagggagaaagccagatcctcactcacggcagaagcagcagccaaagcaacatctcatgtggttttccaagccccagtccctacagagacagagagggccaggtggcacctgtgcatgcagcggggtaccttgcaggagggaaatcctgattttacacaaagctgctccccccacgccctgccttgactctgggatgacgtctcagagctgtgcagtacaacattcttaaattggctgggactcagccctgcagaaatatgatatcttcaaggagaatcgttcccaaaacctctcaaagctatggggctgctctgagcctgtttcctcagctgtaaagtagggtgcatacttttatggccctgtgcaggaggtagtgacaggccctagcaccctgcctccagtatatgttagcagccacgaggcctatctctccccacagggcatccttctcaactggaccaagggcttcaaggcctcaggagcagaagggaacaatgtcgtggggcttctgcgagacgctatcaaacggagaggggtgagggggcacctgtacctgccgggggggctgccctgggccacccaccccagcactgcctgcctttctccttggcttccagcactgcagcttctgtgcttcttggcaggactttgaaatggatgtggtggcaatggtgaatgacacggtggccacgatgatctcctgctactacgaagaccatcagtgcgaggtcggcatgatcgtgggtaagggctccttgcacccctgccccttccagactgctgaggctccctgtgtacaacaggcttcaagggccctgtggggtgaggaccaaactacttaacaaccggtgatgtcagagcagagcctggtgctacagcctgggtggtcttggggtatcaagatggaagcaccgtgtacagtaggaagcatttcaacgccatgatgccacattcctgcatcagatggtatgccagctgcatatccacctcacccatcaggattataattaaaacacttatctggtaaattgaccaactggacagattggtccaagtggaagaggataagcaaaagtggtaccatctccacccgaatggtctttccacgggcctgcccctgcccctgcccccacccaaagtgaaggcaggtaccaggaaagggagcagcagtccgcccctcccagcagaggggtcttccacaccaactcggacctttctcagaagttccggaggtcattataaccagccttcactgaggagcaatccaatcagatcagttatctgctgtgcgcacagccgtgtggttctatacttctcttacttccattttcacctttcagaaggaacgttgtctttaaatccagcatctaaacgtgagccccagccatccctggctgtgatccccccagccctttccaccctatcctctggaactgcctggggctccccaagacacttccacatgaattcccaccaagccaagctgcagctgctgggcccaggcataacccctcctggggcagaggtggcaaggagtgacccaccactcacatctgccccacatccactcttgactctgctcagtgtttaaaaacatgtttataacaattaccaagatctgaaaattaggagaattcacatcaaagtctggatttctgtttgttcataaaaaactagaaggcagccaggcaaggtggctcacgccagtaatcccaacactttgggaggctaaggcaggcgggtcacttgaggtcaggatttgaagactagctggccaacaaggtgtaacctcgtctctactaaaaatacaaaaattagctgggtgtgatggcgcatgcctgtaatcccaggtactcaggagactgaggcaggagaattgcttaaaccctggaggcagaggttgcagtgagccaagatcacgccactgcactccagcctgggtgatggagtgagtgagactctgtctccaaataaataaataaataaataaaaactggaagtctaagcatcactgagccctgattcctatgtggcagctcgactgaccagcatttgagttgctgtccctgacagctttgggggtgtgcagcccacacagtcatgctagcttgaggctctgctgtcagcagtttgaaactcttaataacttgtgaacaaaagactccatgttgtcactctgcacaggggccagcaaattacaaaattccatatccggaattgtctacaggagcctctgggctgctcccaagggcccacaccatgccttactcactttgggttgccatccaaacatgtctcatgacaaagaagctcaaacatgtgcatggacagtgccagaaaacaagggtcgtacatagacaaaataaaatgataacgtcccacaaccatttctttgatacacactgtttctctcagtcctcccaaccacctaggtaacaggcagggaaggtgttactgttgcctgttaggaaagaggacagccctgaaagctgtccctggccactgaagcaacccaggtcttccagccccagggagagccgcctttccattgttccagacaaagcagagacaggcatgggggagcgggagagggactcctgtgggcaggaaccaggccctactccggggcagtgcagctctcgctgacagtccccccgacctccaccccaggcacgggctgcaatgcctgctacatggaggagatgcagaatgtggagctggtggagggggacgagggccgcatgtgcgtcaataccgagtggggcgccttcggggactccggcgagctggacgagttcctgctggagtatgaccgcctggtggacgagagctctgcaaaccccggtcagcagctgtaaggatgcccccctcccccacaacccaggccctgggccgctctggtgcagcggcagatgggagccgggccattgcagataatgggcttgtttttaaacaactctggggaaaagcaaactgacaatccgttcgtaagctccatcccttctgctcagtcatgacctgcccctgtgagagatgaagggttagtcccagttgtgatgtgataagcccagacctctttccttccgacaggtgatcgtgcatgcagaggaggctctgagacgcccccagcaaggttcctgggtttaacccaacattccccaaagtatgtatttggccacattcacagaaagaatattagtcttttgtggaatgctgcgggttgacagtcacagcttggaaaccaacccacagagagctcatcattaatcatggctatcacttgtttaccacctactgtgccaggcctatgctaattactttattagcgtcctctctgccgctcgcaggcctctattattataggtcagtagtattcgatttatttaaattaaatacggaaggtcatagattaagcaagaaagtgccagcaacatggtgcgtgcctctgactgggcactaaccctccaagtcttagttttcccaaccataactggccaatgaacagcagctctggatgcagctaaaggaagactgaagctgtaggtcccgtgctcggcgcagggccccctgcaaggaaggtttcggagggactggatggggtctttgaactatctgtctttccctttactgcagtgggcccaggggcaggccaaagttgctcccgtgattgacttgaacgtgcacgttcctaatccctgacatttctaaagctctggctcattaacgagggaaagacgtgaaccagctgggggagtggggatcgcagtgccccacgtggccgcctcgtgacctcagtggggagcagtggggccggctcccggcttccacctgcatgaggggccctccctcgtgcctgctgatgtaatggacctgccctatgtccaggtatgagaagctcataggtggcaagtacatgggcgagctggtgcggcttgtgctgctcaggctcgtggacgaaaacctgctcttccacggggaggcctccgagcagctgcgcacacgcggagccttcgagacgcgcttcgtgtcgcaggtggagaggtgtgcggaggaggagggtgggtgcaaagggcaggggctggggacgcccgggcactgcagacttggtctcagggcgacgctgagtcccaggcccggggcgcagggatgggaaactagggcctggggcgggattccgggcgtgggcggggcccggggcggggcacagggggcgggggagtgggcggggcccgaggccgggcgctggaggcgagggcggggcagggacgggtccaagggcaggaggctgggacaggacggggatgcaaagggaggggcggggcccgagacggggaggagggggagggcccaaggggaggaggcggggtccggacggggatgccaagagcagggatgggagcgagcctgcgtccgggcactggtccccatccgtgagtcccctcggtgctccctgcccgccgtggccatcctctcacatcactcacaaccccaaggcgcggcatggttgacacccccacgttaggacggagaccctgggcttagttagagggggcagtactaaccagtccctggcggaaacgctttggctgggtgaggtgagcgggatcgcccccatttctccagagaggggtcccggctcagcgagggaaagaggccgccgctggggggacggctggccggggcccctccctggagaacgagaggccgccgctggagggggatggactgtcggagcgacactcagcgaccgccctacctcctcccgccccgcagcgacacgggcgaccgcaagcagatctacaacatcctgagcacgctggggctgcgaccctcgaccaccgactgcgacatcgtgcgccgcgcctgcgagagcgtgtctacgcgcgctgcgcacatgtgctcggcggggctggcgggcgtcatcaaccgcatgcgcgagagccgcagcgaggacgtaatgcgcatcactgtgggcgtggatggctccgtgtacaagctgcaccccaggtgagcccgccccgctctctccctggtaaagtggggcccaaaaagcgcgcgctccaaggttccttgcggttcccaagctccaagatttcgtagtcctcttctcgtcccccttggcctagatttgggggaagggtcgactgcgtgcagggcgcccggtaatgaatgtggaggatgaggtgggaggagggacggcagccctgcttctcttctgcccagcttcaaggagcggttccatgccagcgtgcgcaggctgacgcccagctgcgagatcaccttcatcgagtcggaggagggcagtggccggggcgcggccctggtctcggcggtggcctgtaagaaggcctgtatgctgggccagtgagagc

SEQ ID NO: 15583 - DNA, 44780 bp, Homo sapiens
tgaacccttctttttgcttgcgttgttgaaagaaggcaagtctatggataggaatgagtgaggcacagctccctgaggatgccatatcttgcccgtttcttgtgtattaagtgacatcacgtgttaccaaactaaaccggctgcatttgcctgcgcacaacataaaaccaaacacccaagcattggatttttgtagcaagaaagatgtattgccaagcagccttgcaaggggacagaagacgggctcaaatctgtctcccaatacttgcttcgcagcagtagatttaagggagagattttggaagtggagtttcgggctggacggtgattggctgaaacgaagaagtgtttagaaaatctcttggtcatgagctgttgcttcttcatgctgcttcaagggtcacatgcagattcaggaggtggtataaaacaagctgtgggaatttgggctgtgacatcaaagggccgctcctcgggctagtaagtctattttgcacaggctccagtcagccatattggttccaacctgttccagcaagttgtataagcagaggggattatagcaaactgtttccttatcggctgccctgcaagacaagctcaagatttctgttagttaccagtttctttaaccctgtcgggcacagtttcacatgtaatcagaaaggaacttgcaagacacatacaactgaaagaaacttggtctttggaagttgtcagtaaggtcacaaagttgtgatgctagaagcagccgtatctgagattatgggaaagagatgatatattggaaaaacaacagcatcactttaaacattactctaaatcaaggtttctcaaccttggcactattgacattttgggttagatagttctttcttgttgggagactgccctgtacattgtgtaggcagcatctcaggcctttgtagaaatgtcagtaccaacccaccccctccccactgcacaatcaaaaacgtcaaaatgtcctttgggagcagtagttttgagaaacattgctttgcagatatatatgtttgtttgtttgttttgctttgtgacagggtcttactctgttgcccaggcagaagtgcaatggtgtgatcccactcactgcaacctctgcctcccaggttcaagcgattctcatgcctcagcctcccgagtagctgggattacaggaatgcatccatacacgcggctaatttttgtatttttaatagagatgggatttcaccatgttggccaggctggtctgaaactcctggcctcatgtgatccacccacctcgacctcccaaattgctgggattacaagcttaagccactgcgcccagctgagaaacattgctttaaataatctgtggtgaaaggaagttcccaccacctgcccactcactcagtacctctgtcaccaaccctcttccctgggtgtttccaagtacagagggtggaaagggcttttccacatttcccctgttttggtagtaaacattaggaacagccattggccgtggctaggctcagccacccacagatatggacacagtagtctgacaagctgggttgctgggtgctatcagtccaggctcaactgcttgcactgacaccatttccctataggaggcaggtgagagccatttctgaggaaagtctctggagcccctcttccttccactgaaagttgtgcaaaaagatcaggaagacagcgcttggatggaataaatttcagtgtatccacttgacacattatagtggctgtcccaaagtttaccttatgccaagtactttccatgtgccacatcatttaatcctcacaaaaacaggggaaaatattattgccaccctacagacatagagactgagattcaatttaaggagatggttggtaagggacagagttggggttcagatgtcaacagtgaaatgcttaacaaactgtcatgcagcccactcctggcaactcttcctgctcctctctggcctcactcagcctctactgttccaggaagcctcattcatagtcatgtggttgcagacttcccaagctcactgtgttaccaaaaagcaagacctgccttctgctgcatcgccccagctgtcacccaacttggattcagtcccagcactgacacatcacaaaatcacaaaagtgagcaaaccattacctccctgagtctccttttgtttttatctataaaactagaaaaatattctttccataggaatgttgttggaaataataaaacattatattacaagctctagtcattgttgatgtttaacaggtaacagtgataattatttgtcttctcattaatgaagaaaaggattattaatcatagagggtggaaggcatctatgggaagtagagatttgaagataggctaaaacccaagtaaggcctctagattagataatagtattgtatctattttaatttcctgctttccatcactgtgccatggttatataagagaagtctttgtttataggaaatatacacaagaatttagaagtaaagggacattgtgtctgcaacttactcttacagggtgtgtgtgtgtgtgtgtgtgtgtgtgtgtgagagagagagagagacagagagagagagagacagagagaaagagaatgataaagcaaatacaggaatcaggatgaagcgtatctgtttgtttgttttgctttgtgacagggtcttgctctgttgcccaggcaggagtgcaatggtgtgatcccgctcactgcaacctctgcctcccaggttcaagcgattctcatgcttgtattgttcttgcacctgttctgcaagtacaacattgtgggaatggaaaatgcaggaaatgggcagtaaggctatgaacgaagcccgcacaggagtgtgggtagcagagttctctagtccaggctcccacctgaggtgctgggacctagaagaaaagcctctctgcagacagaactggagttaacgctgtccacgataaatggcccaggccctgttaagtttgccccattgagcaaaacaagtacccacccgcctttgcagccttgcctagctcacataaggtgccagcccttgctgtacagcagaacctttggggagctggacaaaagcctatcaaggagcatacccccaggaagcccagtccaggtggggagcccagccacacaatggcccttgcccccacacctcctcattcagtcagctaaggccatggcagctgagctgcctccacagctcatataggaaaagggtgtggaaaggggccaccaatgtggtcaggcctccatggcctgagtaggtcaccaagcctcaggtgcacagacttgatgtcatcaatcagggtctgtcagcacacctagccctcaggaacactgctccccactgcaaccccacaccaaggcatcctgggctccctctgggttctccaggccccagggaagacagacagagtctgccaccaaaggtttgagctctgccactggctacgaagcaataggggatgtcagagcaagggaggaacaggacaggagtatacgtgggcaggaagggattacagccaaggaagacaggaggcaggtgccctgattttgaggctgtgccccagcaggggcttcccagaagctgtatttgtcctaagacacccctctgcagctgaggggctagagatggatatgtagctgtgttaggccattcttgcattgctataaagaaatacctgagaccaggtaatttataaagaaaagaggtttcattggttcacagttctgctggctttgcaagaggcatggtgctggcatctgctcagcctttgaggaggcctcaggaaacttacagtcatggcggaaggcaaaggggaagcaggcacatcacacagtggaagcaggagtgagagagagagaggcactgggaggtgccacacttttaaacaaccagatctcgtgtgaactcagagcaagagctgactcatcaccaaggggatggcccaagccattcatgagggatccacccccatgactcagacacctcccaccaggccccacctccaatattggggattacaattcagatgagatttggtggggacacatatccaaaccatatcagttatcagtagccatactggatgaatgccaggaacttagaattaggacacatggtcatttaggcaagtggcttgtcctgtcaatggtaccctgatagtcgtggggttgccccgtacaaaaagcgagaggaagtctacagagctgtcaaagaggggcaggtggaaaggcctgcagaggagtcccctgctccacaaccaggcgtgcacctcccacatcctcggggctgtaggccccacatgagagcagaaagaaggatgcagaggaaggccaagaacacaaggtgtgcccttggaaaggctgggcacaccaaacacaacctaataaacaacagcaatgagcacacagggaaagtactcacagggaaaccatcatgaactagaggctgatcccacaccctgccacatggggccccaggccccagcctatcaaccagtggtccttattgccacagcgattggtctttggataggcacctgatgcaagcttcagccaatcaacaggccactcagctggccatcagtaggccatccaatcagagcaaagcccaggactttcttcgactcttaagaaaagagaagcaaagtaactggcacagattggagaggatcaaggaaccccgagctggatacatacaaactttgggttaacatggatgattaaatacatatgtttatgtgaaccacctcccaaatatgctccactataatgacacaagacaaagggcagggggagaccaattgcaaggtggcgcaaatgagagatgctaccaagggtggcgggggagagaggggagcagttgtcaagttaggaggcaacaggctgagggacagggaccagcagacggggagggaggggctgaagcagaagtgtccagtgtctggagggatggggccagaaaggcaaggggcatcctgaagaagctatacctggggagggcagctctctccccacctgctccccaattcatcagccaggaatgccccatccaccccaccccagggaggaggacagaggactttcgtttgggagcattgaatggttcagagattctgcaactctgcggtccccaactaaactgctcattgtttcaagcagtccctgttgggtaaatgtcccccattgtaaccggactcggattccaccgcttgaaagccaaatacaagaggagaggtttggtgggaggaaaagtggttttaactagagccagcaaaccaagaagatggtgaattgttgttttaaagcattcaattatctcaaattttaaaatttatcataggattctgaaaggaaaacttggtatgggacatacgtgggagcagtgcagggtacagggtctatgtgtcttgatccaatggctgtcttgagtatcacctatcctgaggtctggttggtgttatctttccttcggccagatggtggtgggtgaattgtttcgactccccctaagttggaggattccgcaggggttccgtgtctggtttttgtttcaagattagcccctggaattcccaaataagcatagagttagataagcgggcatggtgcaaaggagtgtctagtgggaaagggagagaagcagagtttcaaagtacatttcaaggttacattttaagactaaagaaaaagccttaaaatgcatttttaaagctgatttaatgcttggctacactaggctgtggccagtgtgcagtgtggctgctcttggatcaggtgatgtttcatcagctgtgtccagggagggcagggccatgtggcagaacctgggacctctgtgtgagggactaccttggcccctgtccttagcaggaagctatggtaaggaacccttagggagacattaaattggggagaccgtccctgccaatcctttaacctccccagcctcagcgacctcagttggaaagtggtggtaataatactaccactgaccaggtgtggtggccagacattccacactttggcttcagccgctccctccccactctactgtaatcccagcactttgggaggaagaggtaggcggaacctgaggtctggagttgagaccagcctggtcaacatggtgaaaccccatatctactaaaaagaaagtacaaaaaattagccaggtgcagtggcacacgtgtgtggtcccagctactcgtgggtctgaggcatgaaaattgtttgagcctgggaggcagaggttccattgagtggagatcgagccactgcactccagcctgggtgatagaacgagattctgtctcaaaaaaataaaaataaaataataataataataccactgcctgccacactaagattgtctgattagatgacagaatgaatgcaaaagtactttgtgaatcataaatgttttcatcaatattagttataatgacaattgctccttctcctaataaatgtattgcctttctttaggaataaatataacaagaaatgtgtaagatatatatgagaaaaataataaaattcacctgaaggacataaaagaagaccaaaataaatgaaacaacacatacttctagatgagaaaactcaatattataaagaggttagttctctaaaatgaatccctaaacccacaaagtcaatgtatttccaatgaaattgtcaacagcattattttccgaagtgggatgagtagtgctaagatttataagaaagccaacattccagagcagtggggaagggattgcttcaccaccaaatagccatattagagattcccttgcaccatacccaaaccaccatctcccaggacccgggagagcagaaaagaggaatgagaagaaaggcgaggatgtgaggtgtgccctcataatggcggtgcacgcagcacaagcaattgcagaaagactaaagtactgaacaaatagaaaacttggaaaaatattagaaggaaatgtgggagaacatttttgcaatttggggattggaaacggttttcttaacaagatataaaaaccccaaaacaagaaaacaaaggttgaaattcataaaaactagatacttctgtatgatgaaagacacgattaatcaagttgttaagtttagcaatagactaggggagatatcatagtatatttaacagacaaaggattaatagatactacagatgaaatataaaatagtttctccaagtccataggcagaagataatccaatagcaacatagttaagtaatgtaaacaaatcatccttagaagaagaaatgcaatcaccaagaaacacatgaaaaggtgtccagcattttgcaattcaagcaacaatgaggtgacagatcggcaaaaaactcataaagatttatcatctgaaggattggccaagataaagccaaacttctcgtgttggcagaagaaactggtgaagccatgtgaagaggccacgtggtcctgcctaccaagatgtaaaatgtgtacagcatttgaactagcaattcagcctccaggagccatccagaagaaacactgacacacacttagactccggtgaaattcaaggacttctgccacagcctgcttcgtaatagtgaaaatctgaaactgcctcaatgaccgtcaataggaagttgattttaaagtgttacagcacatctgtctggagagatcgcactggccactcctcctcaccccctctgctggacctctgagcgtaggtggcctggagctgggtcctgagccctctttggtctataccgacactacccaatatggtagccaccagtcacgctggacacttgaaaagtggccgatcctgactgagaagggccacgagtgggaaaaacacaccagacctcagtgacttaggcagaagtatgttttgttccagactattgactgagcccgcagctgagttggctccagcaccctggccccctgctccatccactcactgggactccccactgcacagggcaacctctccaggggcacttgggctgcgaaggggagagtgggtggcatcccaggctgaagcttcctgagcagggccagaggaggagccagtccctgtgggcctctgttctgacagtgtcaacctcagccaggcttgtgtgggccaggtgtactgttctggttcagatttcaaggagatagtcagggcaggccgcgccaaagccctccgatgggctcccctactgcctggcagacctgtccagctttggactctggccctgcgacctggaagtcaggctgccaagaggtccaggcagtggcctccactgtggagggtctctggagagtttacagccctagataggggggttagggatgtgagatggtcccaggggcctgctcctgagccacgccaagctgcctgctccctttcctctgcttccagactcacgggatcctctgctcatcagaacaggagtgtgggagaccctgagacactgccccaggatctgaacaggtggcaaaggcttaacaggctagcggtcactgtagtgacaaggcgattgagtggtcaccatggtgatggggatggaggctctttgccaccagtcccagttttatgcatggcagctctaatgacaggatggtcagccctgctgaggccactcctggtcaccatgacaaccacaggccctctcaggagcacagtaagccctggcaggagaatcccccactccacacctggctggagcaggaaatgccgagcggcgcctgagccccagggaagcaggctaggatgtgagagacacagtcacctgcagcctaattactcaaaagctgtccccaggtcacagaagggagaggacatttcccactgaatctgtctgaaggacactaagccccacagctcaacacaaccaggagagaaagcgctgaggacgccacccaagcgcccagcaatggccctgcctggagaacatccaggctcagtgaggaagggtccagaagggaatgcttgccgactcgttggagaacaatgaaaaggaggaaactgtgactgaacctcaaaccccaaaccagcccgaggagaaccacattctcccagggacccagggcgggccgtgacccctgcggcggagaagccttggatatttccacttcagaagcctactggggaaggctgaggggtcccagctccccacgctggctgctgtgcagatgctggacgacagagccaggatggaggccgccaagaaggagaaggtatctcgccctccattgggcattctgggagtgtttgcttgcctgtccccaacattccatggtttgtttgagcctcagaatctgattttatgcacaggctctttgagaagggtcttgccaggggtgccttctggggcaggaaggcccctactgcctggcagacccatccagctttggactctggtcctgcgacccggaagtcaggctgccaagaggtccaggcagtggcctccactggggaggggctctggagagtttagagccctagatgtgggggttagggacatgaggtcttgtggacaaagcccactacctgattttgagacaacactcactagacatggtgacaagtcaaagatgccttgcctcctaccaggaatcacttcgcagggagcccgagggctgctgtggcctgctgaggagtgcagggcagttactttttccaaaaacaaagagaaatccaggcatgctctgagccagccctgagcccagcagtgagcaaggagagagctggagacaggggactttgctgtgaaacactggggggaatgtgcctgcatcaccccagctgggggcccaggcagagtgggggagaaggggtaagtgggcagagccagtcactttgggcatgcttccctctcgcctctgtgtgaaatgaccaggtcagcataaaccccgggctggctgtgcttctggcagagctaatgatgttaggaggaaaacaaccaacccaagtgagagggtgcgcagccagacagctggaccggccgaggccccaaccaagtcccagatctgcctgtcactggtgctatggcagcaatttggatgagaaatcctgcccaaagggccccttcaggccacccggggagaaggaagcggctgtctttggcatgaccagaaagatggctcggagctagggagaggtggacatgtgggctgtggagatctggcactttccccaaacaaggagagaaagcatagtgtgcctatgtgtgaatgtgctatgtgtgcatgtttgtgcctgtgcatacctgcatgtgtacatgcatgtgcacatatgtgtgcacagggaatcactttaataaaggccacagcagagctgtccctgagccccttgcattcacagtggcatgtgagtgaaccaccttcttaggctgggcatccagtctcagactctggggctgcccatgccccatcctttatctgctccacgtgtgaggggttgctggtcctgaccagggccagctgtgaaccccagaatcctgggaagtcactgacattcttgtcagggccaagagtggagcaaggcaatgcctcgggcacaaactttaaggggtcaccagaaacatcaatcatcaagatatatgctattttaaataatcaaaatgaatgcaaaaaaaatttatgatggacaacataccaaattctaaacaaaggcaggatgagtatcactggcttctgcacttttctccacccagtctacccctcttctagtgcctggatcgcagggtgccaaggcctggatgagggaagcgtggagctgcaatggccactcctgtctgcctgttctggctgcacagaggactcagtccttgtcttgggggaacctatcttggttttagggtcatcctaaggatctgatgttttccaagtgagctggctgtccaggcccacccaggttcagtccagtcctgtgtctctgggaagtgctgcccctaccccaagccagtgtttgaccttggagcaatgagcaatgccctccttccactttcaaagttgtccccaagacgtcagctgtggttgtctctgtgcagacaccgaggaggaactgtcttctttctccttttggttgctttggaggaaagtaaagtgttgctggtttccctctttctacttctttgattgagagcagccgtcttgccggtaccaaccttccagatcttacctgtggttgcaggagcctgtggcctcagtcctgtgcccagtgacttctccatgtggatgtcagctccttaggggcaagcctgattccactgacactactcccacccctcataagccccttcttaccagctgcagttgcctggtaccccaccatcgctgactcattcctttggcatcaaggttcatcccttactgggccaccacttctgggtggcctgaaatagggccctgggcatccctcttggggaccttttggtctatattttcactctcacctcactaaggacagatgagtaaatctggttaactttgcctgatagatttggtgaccttttttcaggaaggagcctggaaagatgagattcaggtgtattggtcagcttagactgccataagagaataccatccactgatggcttagaaacaacagaaatctatttctcactattctagaggctggacgtccaagatcagatgccagcatggtcaggttgcagggagggctctcttcctgacttgcagaccgccaccttcttgctgtgtcctcacatcgtggagagagagtgaaaacaagctctctggtgtctcttcttataagaatgctaatcctatgatgggggctccccctccttacctcatctaaacctaattatctcccaaaggtctcatctccagataccatcacactggggttagggctttgacatatgaatctggggggacacaattcaatctgtaacaccaggagggcatgccgggaggaactgaccttcctccctccagctgccctggacacctttgccccattgaaggagcaggctcagaagtggaatgaggatggaataaggtgcactccatcatgcttacccacatccctggcaggaattgtcctgggccccagcaggagagatgcccccccatactgccatggcacctgctctgagacaggtgtgcagagtgcaaagctccaggtggcccccaagcaggtgtgctgggaggaggggcccgtgtgggaggagcaggcagcgccaaggcctagcggagcagtgacaggtccctgacttcagggaatgggcacgctgtgggcaggcagctggtgtgggggtgagggctggggctgcatctgtgggaccagggctgggccatccatcatatgccgtgtcacaaccccagtgcccctgctgtagccaggacaggaggctgggccaggctgggaggtgacaagagtgggggctgtccccaggagaagcactctgctgcctgtgcccaggcctctggggatgaggacccctcagaaggagtagctatgtctaggaagccccagggcaggagcaagccaaaggggacatcattagtgagatccaggggatcagtgggccacagaagccccagcgtgagcccctctgactgatgcagctaggcccacacctgcacctgcccacagcaagacccccaggaggagaggggacagatggagagaggcacaaagtgcccctggcctctgccttgaagccaccccaaggcaagagagatttgagcccctgtttagtgacctccaggggaacattctggcccatctgatgtgggaagccccttgtggagtctgtcattcctcagctgagccaggcctttggaggcagcccaggcatgtcccctgtgtgctcctatccctgtgttgggacacctggcccagcccctccttctgcctttctcttcccttcccttctcaggagtggacacttcctcctttagccccctcacagctgtgtgaacttctctgtatctctctctttctgtctctttctccccctctctctctgtctcattgtctctctgtgtgtctgtctgtagtattctctctctgtctctgtcactctgtctctctctctctctgtgtctacctttctgtatttcgctttgtttctttttctctgtgtgtgtgtgtgtgtatctgtttttctcactctctctctgtgtctatctttctgtatttcgctttgtttctttttctgtgtgtgtgtgtgtgtatatctgtttttctcactctctcaatctctctctctctttctgtctctcttttgctggcctgagcaaagagggagccccatcctgatgctacataaccgtgaaccagcacagacagaattgtaggaaagtcctgcaagtagaaggatagaaggatgagggaagaaacgccatgtgagtcatgacagatccctttccaggagccactgactcaccctgcctcctgccctcccactgtgacactattactcacagacaggcccggattaaacctatgttccaggtgccctgtggttcccacagtgtggctccctgggtctggcctcaggctccacaggtgcccagccctgccaaagtctccagagcagctgtccagctggggagctgcggggccccttcacagagcgcatgggaagaagttccatcctacacattacatcgagagggacgtgcctgagaaggggagctggagcccgtgcagccccctgcttgcgtgcagaacatagtgtaccctgagcatgccatgaaaaacacaaacgcacaaagttgtaaagaaaaaagaaatgacaggtggctgtaaaatcagttatagcccacgagaggcccactaatgagtggtgatttcagctgattacaaagaaatgatggtgtttctgtaatgaactaaacatgcactcgtgcgtgcacacacgcgcacgtatagtcacataactgaccagccctatgcatcacttgttaattacttagtaactgtaacaataatagtttccaataagtgagccttagtctctgcgcaagggtcagtttattgagcacacgggggccttgcagtgggggcaggtgatctgctcctgggagccgccagcctctcctctcctgctcttcatcttcctccgtggtgggaaattgtctcactgcttctacacctgaggctgaacatctccctttatttcagtctgaaacacatgtaaaaatatactggaatgaattaaggttgcaattattgatatcaggcagtgagtacatcagggtttattatactatctcctttacttacttcgaagttctctattaccaaaaaattaaaaactataaaagaaagaaaaaggaaatgaggctagattcaacacagattactcttaccaaacccttcgtagtcccaggagtcccctaacacaagcacttgtgacctggagtgatattcacagcattccttacctggcaatacctgagtattagcccccccagtgggatctttgttgtagacaaccagcaactatcagcccagccaataaacaagtaggaaaggggagtgctggagaggccaagaagtgggattttccatgctcctgggctgtgatccagagggcacggctgtgaggctgatctcaatgaacactctgtcttggaagtacagggatcctctgctacctgaaaacgttctgagtattcactttcatggattgcaaagtcatttacccaaaattcactctccaaatgaaaagtgagtatgatgaatcagtattcaagttccacctgggtcctgggagagggcatggacatcatatcccagctgttccgacaggaggacccaatctgagtctcactgcctgcctgcatcgtttgtctgctgccagcctgcacagtaggaagggaaaacatgatttgtatctgttttaggtcaggttcccaagaagtagagcctgagattggaattcttggaaaatggtgtttgcgggagcgctgtcagcagaagctataaggaagttggggggacagaaaacgagaggtaagaagccagtcaaaaaggcaggtccagcttaagtccgcctcagtctggttccacaagggctctgatgcatgaagaatatcacagggttgtccctcctgggagaggggccagcctattgtacctgtatcaaagccaccagctgagggccagtggggagggaagatcttccaggcatttccaggaaactctcaggagaagggtgtagctgtgagcagtctgcagctgctgctcactgcggctaaaggctgggtgtgcaggccagtcagccagtgaggtgccaacagcaggcactacagtccaccccttgactgctcagacctactgctttccactttaagctctctccatccaggcacagcttcagggaaaacttacaattggagaaacagagggatgaactacaatgcccacttctgcatgtgattgtaagactgtcactgatactcaccatcatgccccatccccaccatccattctagtgtccccttccccttggctaacactgctggtctaggtgacttccctagagcaggagccaaacccttatccctgaggcatctgaatcctggattcctttatcaggctattgttgttgtaagttgtccattcccaattacaactggacatgagactaccaagaaacaccctggcaaatcatctgagtgcaagccatattcttcctgctccattatgtagcggtagtcctacctcctaatgacaagggtaaattgccacattttgctccttgtgccaggatggtaatacctttctctacctgcttggctactggcacaaggaagcacagcatgaccaggaggcaattgtagctgtacatttagtgaatgtgttaatgtatcacctggtggaaggaccccctctgagaaccaggacttctagacccacaaaacctaaagttgtgaatggcggaagcacaaatttcccaagtggatcatggagagtgatgaagagttcttggttcccaaacccacatattttacctttcaggaacatggcctcatcccatagccattagagtgcatattgcattctggaggagactgggccctcctcatgggtgtcatcttcaagatgacagctccactgtgcctccaagaggatgctccaccaccctatctgtgattccttggttagcaggacaggctgctgcactgagggtaggaaaggcaagtccattgatggctggaatacatgtcaatccaagtcaagagaaaatgccgccctttccaggttggaaggggcccgatttagccaacttgtcacccagtagtggctggttggtctcctccaggagcagtgttataccaggaattcagcaccagtcgctattgctggcagttcttacattcaacagcagcaaaactaggtcagccttgatgagagggaatgtatgcttctgggcacaggcatggcttccttctctgactccatgactatctatttctgagtgcatggtggccgacattcagctgcctgcccatcctatccacttggttattattgcctcttccacaagaagtggtttctggctgtcattaatgtctcatactttgtgcccactcacacaggtttagctctacaacttttccccatgccaccacttttccacaatcttctaatgttgctccttccaagctactgaagaacgagctaagctattcaccaatgtccatgagtctatatttaccttaggccacatctctctccacacaaagtgaataagcaggtgcaccctccaaaactctactaagaggatttcttctccccagtgtctttcagggccaccttgagtggggctgaagtacagcagaagtccatttccagcttgcatcaacattccaaactaacctatccatgatcaatgcatagatgggtttttccctcctccagcagctagacaaaagacaccccccaccaggaggccatatttgcatgtgggtgaaagagaggcacaggggccaatattcgtgcaacagtggtagatggcaggtgggtctgggccacctgtccctgcagcttatctgtgccatctggacctgctcaagcctgattccagatataccatttccatcttatgatggatggcttatgacctagtgggtctgacagcaccaaactcataatgggcagttatggccacatggtcacttaatgtcctatggtcagacactctgctgagtggcatgccaggaaatgctttacaagtggtgtttggttctctgctgcagatggcatgaccttggtccggagccctaggggtttggacagtgactcctgttggggcctaatctcacattccatgcagagtatcatcagatttgccaatcacatagcctaagggtcaggactgatccaaccagtttttgcagagatcaaactggagaatgaaaggttgatatgatgtgaccatcatatcacgtttttctctcttgaaaagtatgcagatgtctgaaagagacaagtgccccaggagaaaatgcatgccttcctcaggatcggcccccacctcccctcctggccacaaggagggtcaaatctcagcatggcccaacttggacctgtcaaggaagaagaaaaaaattgtatgccaaaggaactcagtctttggctaacaagtactagacatcctttaagtctttgagaatggtaataatttctgccatccctccagatttgtgtttttctgttttggctgggtgggaatgcagcattttcactttgcctttgttattacaaatgttgcttattctataaatcaaggaaccattgtaagggctcttctgatggttaagtatatccattccaatgatttattcgggatccaaggaaatgatttctgggtgaatacacagaactagtggatccaatttgagacatacctgggccagaactatatttgtcgtcttaccccaataagcctgcactctactaggacagccatgacagcactttgggaccctagatataagtgtgaattgctggctgggcatggtggctcacgcctgtaatcccagcattttgggaggctgaggcaggtagatcacctgaggtcaggagttgaagaccagcctggccaacacggtgaaaccccatctctactaaaaaatacaaaaattagctgggcgtggtggtgggtgcctgtaatcccagctactcgggaggctgaggcagggagaattgcttgaacccaggaggcggaggttgcagtgagccaaaatcacaccactgcactccagcctgggtgacagagcgagattccatctcaaaaaaagaaaaaaaaaagtgtgaattgctatgaaatcactatcaaaagatctgagtgttacccttactcagtgtggtcgaatataaatagccataggttcctgttatacacacttgctgtggtgctacagagtctttcctcatgggaacccagtccctctttcagtcaatgggttctggttcgagaactggctgaggtttggaaactgtgcctttccatcataactttccactggggtgactgaccttggccttctgttcatcctttctagcccctaagaatccaacactctattagccttctccttagacccctataagctaatcccttctagttgttagtctgaccttggtgcccaatatgataattattcccactttgcttctgatatgcttctaagtgctgcccctggtctctgcccttaagtgatctatcatccccactgccattagggggagaagctctgaaaaagagttgtctcccatcaactctggtctacaaaggacagccctactgagcctcagccatgtgcccgacaccagcagattctttacagcctgggaagcagagtgtcttccctgcctttccagggaacatagccagcttacaggctttttgatcttatagagtaggtcagttatattttgccccatttcttttatccttttgatcacttcctcttggcccaccatgtaaactcaagcatccctgcttcatttaatcgagctgttgctttttctaagctaccaagagcaaccccagcaatatatcagagccctctcttgggacccttgctagggtgttaaatcctgcatcataggagaatgcccccacatcagcaaagtccccttatcctcttgatatcccacctgccccagtccagcaccttcaggatctggtctcaatcacaggatccagcacctttgggactgttgcaagcataagatccagcacttttgggatctagtctcccacttcctgctagtacttgttagccaaagactgagttcctttggcatacaatttttttcttcttccttgacaggtccaagttgggccatgctgagatttgaccctccttgtggccaggaggggaggtaggggccgatcctgaggaaggcactcattttctcctggggcacttgtctctttcagacatctgcatacttttcaagagagaaaaggcctccttctcacagcaagactacttctgtagatgcaggtggctcgtgggaatctggcaattcaaaattctcaagtgtactcactagcacattagaaaaccagtagtacacatctctttccaaatcttcattcagtgacactatgtcagtagctggaaatgggccatggtgggtgtatttaaaccatgaaaatcagaaaatgctacaaaccagggcatcccgcatctctagacagcagattgttggccatttcccagcataccattgtgtatactccttcccatcagggccgtggcttgccttggtggaggactcagcccttgctgaagttctgctactgctcttacaattgagtcctatgcctggtctccagctctgcctgcctcactacaggagacaagcatctctttgaacactgccgagaagaccctctggctctcaggcttggctttaaatcgatagacctgagcctgccattttctcttttccatgcatcactccactgatccacaggtctcagtggcatagtccttcgggttagcatctcccccacaccctcggtgccagagacactgagtaagaaagtacctccctgtctacccccatccccgctccccacaggcagggccttggcgatccactgctgcaatgtgccagagactgtcagtactcctaccaccagtgaggtggcaaccagctgggaagtgatccaactccagagtcccgccctcataggctgatttctaggaccacccctggtatactgtgttaggttcttgaagcagagcctgagataaggattctggcacctgtgattgagtgggagggtgctctcaggatgagatggggtagaaataggcaaaggtacagattcagcagcagttgagcctcagtctgacccagcagggagctctcaaatgtgaatgacatcacagagttgtccctctgaggcaggggccagcctttgtgctcctacatgagtcagtcactggctggaggcccctggggaaaggctagggctgccagctttagcaaataaaaaattagggcactcagttaaattgaatttcagataaacaacaaattattttttagtatatgtcccaaattgtgcataacataatgtgttttctccgccagccctgggaagggcgtaacttcccaggtatttctaggtgaagtaactttgtagatcaggagtaagtcccaggaaagaagtccagctcttctcttcagccctgggcagctgggggtaggcacaggggcccagcaggcacccatagcatctcctacagcatctgaaatgaacagggtcatcacgtactacatacaaatgtacccactgctgagttcttcagggattatatcattaggtacttggtattttaaatacattacattatgcagaagtcctttgtggattgctatatttggagagttttgtgatattggggggattagatggagttttcagatgggcatcatacggtttttcatttaaaaccctagagtattgtaatcctagggagtgatcctgcgattagtaaattagctctccaatagattttcaatgtggttgcaaaggacatgcatgtggttcaccctcccaggaaatccagaagggcagcattggcctgagtggcctgagtttggctggttgggctggtaatgctggacaaagacaatgggtggaatggtttgcttccctcagtcctttcagacacagcccagcccaccacgtcaagccagtgggtgcatctgcaaccaatccccatgagaactgcagcctctcagaggtgggcaagttggcccgggtgggtcaggaggatcagatgttgaggaaatctttggattggaggcaggcagagcagggaagcatcgggtgattctatgacagacccagggctccaagctgcagttcaggaggggcactggcacggcctctgctcaactcccccttgagtgacatcaggtgaagtgccgacaacacagaaggcagcaaatgctgccagtcaggtctgcttcccaggacagccagttgctaacccttctccagcacagcactggattttggtcacctggctgggagctccacctccccagctgctgcctcacctgcttttccaaaccccaccctgtaaacggtaactacattttgtgcccactacgcctcgtttccatctctttggagcacctctcacgtggagctgaacagaacgacctgttaagcccaccgtgtctgttagggttgtctaggctgtatcagatacccaactaaaactggattcaccaacaggtattgtcaaagcacataagaaagagtccagaggcaggcagctctcagcctggtgtcaggctctgggtcagctttccagattctcttaaccttccccacatctgccagatgccgccacaggcacaggaggtacaaacaaacccaaaaatgttctggaaacaagaagggaaggggatccccaccatatctccccagaggccttccttctcacatctcactgtactgaagccagctctagcagaagacagcagggtgaatttgtccagggtattcagcccccagtgctgggtccattactacttgacccctgaataaaacagaggttccatgagcaagaaggaaggggaactggatgttagagggcaagaatgtatccatcccacccctaggagcacgcatggacaactgccccatttttgctcctattgcagcccaggggctagcccagagaccttgccagtgctgagtcacaagatgctgggaaagtgagaccagagcctggtcttggggaacagctcaaggccgcattggtctgcaggtcatagagcagctgctgagcagtgagagcccacgatgggccaggccctgggtcttggagacctgaatgagatagactgggttcctgttctcctgggcattgcctcttagagggcaaagacaattaacaataaacaaatagaacatgaagtgttttccgatagtgactgatatactttggatatttgtcctctccaaatctcatgttgaaatgtaattccttatgttggaggtggggcctggaaggaggtgtctgggtcatgggggcagatccctcatgaatggtttagtgccatccccttggtgatgagtgagttcacgtgagagctggttgtttgaaagagcctggccccctctcattctcctgctcccactcttgcatgagacacctgctcccccttctccttctgccatgattttaagattccagggacttcacaagaagcaaatgctaacgccatgcttcttgttctgtctgcaaaactgtaagccaattaaacctcttttctttgtaatttatccagtcttgggtatttctttataacagcacaagaacagcctaatacagtgatgctctccaagtgacctttgggctgagacctgaagaagaaggggaagcagttaggtctgatagctcatgcctgtaatcccagctctttaggaggctgaagtgggaggactgcttgagcctaggagttgaagaccagcttggaaaacatagcaagaccctggctctacaaaaatattttttaattggccaggtgtggtggtgcacacctgtagtcccacctacttggaaggctgaggcaggagcatctcttgagcccaggaggttgagactgcagtgagtcatgttcacaccactgcactccagcttgggtgacagagcaagacctgtctcgaaaaagaagaaagaagaaagtaggaagaagaagaagaagaagaagaagaagaagaagaagaagaagaagaagaagaagaagaagaagaagaggaagaggaacaagaacaagaagaagaacaagaagaacaagaagaagaacaaggagaacaagaagaagaataagaagaagaaggagaagaagaagaaggagaggaagaagaagaagaggaagaggaggaagaggaggaggaggaagatgaggaggaggaagcagaagcagaagaaaaagaaagaaaagaaagaaagagaaagaaagaaaagggaaggagggaaggaaggaaggaaggaaaaagggaaggaaagggaaggagagggagagggagaaggaagaacaaagaagaaagaaggagaagcagaggcttgtgctggatagccttgcttttgccaatgaccttgctgattttcagggggtcctggtgtcttagtccatttgtgttgctgtaaaggcatacctgaggctggataatttacagagaaaagaggtttatttggctgagagttctgcaggctctacaagaagcatggcaccaatgcctacttctgatgagggcctcagtctgcttccactcatggcagaaggtgaagcagagcctgcatgtgcagatatcacatggtgagagaggaagcacgagggggcagggaggtgccagcctcttcctaatagtaagctgtcttgagaactaatagagtaagaaataactcacaccctgcccccaaggaagggcattaatctattcatgaagtatctgcccccatgacccaaacatctcccattaggccccccacctccaacattgaggatcaaatttcaacatgaggttccggtgggcaaacatccagctataatactgggcaatgctgaccagactcttcccctctcaggcccagagctccttggccctgtaacaacagaaaattgcgtttgagtgtcaagatttttcctttagtccccatgcagctccttagaatgaggtggcatcttctcccttttcataggtgaagaaacagaagctctggaggaacgaatcattcatccaaggtcaggtagctagtaagcgtcccaccagctccccagatctcctgtttcctgtcccaagtcccactgagtgagctggaacaatggcttcactggcacctgccgggaatggtggcaggtgcctataatcccagctactcgggaggctgaggcatgagaatcacttgaacccgggaggcagaggttgcagcgagccaagatcacaccactgcactccagcctggataacaaacggagattccatttaaaaaaattaacatataatatacatacagtaacattcactttttaagtgtacagtttgatgagttttatcaaatgtatatggttatataaccaccatcaccattaaggcagaatcttcccatcactcaaataattccctcagccccacctcttgctgtcaatcacttctcccaccctagccactggaaatcattcatctgttttctgtccccttggttttgccttttctagaatgttctatacatgagaccactgagaatatagtcttctgtgtctggcttctttcacttaacataatgcctagctcagcagtgtgtcaatcctccctcccttgccattgctgagcagtgagtattccactgtatggctgtgctacggtgtgttcatccatttattcattcaccagctaatgggcatttggattgtttccaggctttggctatgatgagtgaagctgctgtgaatgttcaagtacaagtctttgtgtagacaggggttttcaattggcgggataaatacctaggagtagtatcgtgtggttaagcgtacgtttaaacttagaaaaactgtcaaactgttttccaatgtggcctgtaccatgttgcatttccatcagcagtgtttgagaattccaattgctccacatcctcctcccgacacttggtttcacccatcttttaaatattagccactctggtgactgtgtagtgatatgtcagtgtggttgtaatttgcatttctatgattgactaataataatgttgcagatatttctgtatgcttagtgggcatttttggtgagtttttaaaaattgggttgttgtcaccgtcttattgagttggaagaattctttatatgttctggatgtttattcatgtgtgtgtctgctaagaggtgagactggttctaccctggtcctaacaagcaccctgggcctgcatccctttttgtgtctgtgagctgggtctgcagccctctcctcccactacctactgcccagcagtacccctcacccatcactgtggctcctgcaatgacatctcagcctgtctctccctccctccagctagccagaggcaggatggctcagtgacacagggtgggccctgaagacagagtgccagggtttggaccttgtattagcaagagtcacaagggaaacttactttatctctccatagctctgttgtgaggatccaataaattaatccatagaagagcttaggacagcacctggcacaaagtatacatgagctattatgatgttattcttccaacccattgtttctgtgttgtcataaacatgaatgcaggactcagtgtcccagctctgtgtccctcgcatacattccctaacagcccacaggtcttgcctgtcaccgcctcattcaataagtgatgactctgcctcttccttggctggggccttgcattggacatttctgtatccatatttgttttttaaaaactagctgttggccgggcgcggtggctcacatctctaatcccagcacttgggaggcagagacaggtggatcatgaggtcaggagttcaaggccagcctggccaacatggtgaaaccccatctgtacaaaaaatacgaaaattagctgggcgtggtggcatgcacctgtaatcccagctacttgggaggctgaagcaggagaatcgcttgaacctgggaggcagaggttgtagtgagccaatatagcgccactgcactccagcctgggcaacacagcaaaactccatctcaaaaaaaaaaaaaacaaaaaacaacctagctggacttgacactcttgttagaggaagatttttccacatctgttaacttttcttctattgttatccatctgtgcaggtttttctgtcctcctgagtcattttgataatttatattatattttgaaaatcatccatttcctatagttgtttattagtgtcttctctgttatatttgatcagattaccaaatcttgctcattgattgcccatttattttattgtgtttatttttttgagacagggtctcactcgacagcccaggctgaagtgcagtggtgcaatcatggctcactgcagccttgacctcctgggctcaagcaattctcccacctcagcctcctgagtagctgggacctcaggcacacgccaccacagctggctaatattttatttatttatttatttatttatttttgtagagatggggtctcactatgttgcccaggctggtttcaaactccttggttcaagtgatcctcctgcctcagcttcccaaagtactgggattacaggagtgagccaccatgcccagcccctatttactttatagtaagtgccttcatgggcataaatgttcctctgagacagctttggctattagccatacttttaatattttgtacattcatggttattcatttataaatggtctgtaatgcaatgcagatttcccctttggcccaaatgccatttacagcagcacttttctctttctgagcagacagaatattttggtttcccctctgttgtttatttctcgtctgcctcgcctcatttgctaggtgttcccttggtgtgccttaagtatgagccactcaaatatttgtgtttctctaaacacccctgacactgtcctgctggtttctctatctggaatatccttcccttcttggccagttccccctagtgcatcaaagaaatcctgctcttttgccttcagaaaacaaaacaaaacgaaacctatcagtctccttatgtccccaaagacatagctttgctggtatctggttgtattgagctgttcatttgtctcttctgctagatggtaagctccttggaaactaaaaactaatcacttttctaacttcagactgagcacaaattaggttctcaagaaacattgaataatgagtgatccggtatccccttccaacatatttttggtcattgataccatcattctgagtagttactagggaacacttcactgcagtaaccaatacagcaaaacgtgaaatacagttacatagtagaattgtatttcttgcccatataatagtcaagtgcagttcttcatcagctgggaggttctcctccacacagtcatttaggaatccagggaacatagcagaggttgctagctctagacccaaacccatgtcctctttgtccacagtgaggacaatgccagcaacagctggccagctgttctgtagttctcagcctccctcgcagtgagatgtctccatgcaatttcagtggagcaacatataccatttccatttccaggtgtaggctcctaagaagagggtggcttcttcatgttctttctcacctttccgtaggctagctgcagataatgatgaggctttagggagtgggtggagccataaagtagaagcctggattcctaaatgacggtgtgaagtgttccctaatttcacgtaattgtttcttaatttcctgtttgggttatttgttgctaaggtataaaaaaaccctgatttttgtgtgttgatatttgtgtgctgcaactttgctgaattagcttattagctcaatttgatctcagatattagctcaaatattttgggagattatttatggttatctacataagatcatgtcatctgaaataaagatagttctatttccttctttctatcttagtccatttgggctgctgtaacaaaatgccataaattggaggctgagaagtccaagatcaaggcccaagctaattcactgtctgatgaaggcctgctttctggttcatacatggcaccttctagctgtgtcctcacatggtggaaaaggcaaggtagctctctgggattcctttttgtttgtttgtttgttttgttgtttttgtttgattttttgagacagagtctcactctgtcaccaggctggagtgcagtggcacaatctcggctcattgcaacctctgactccctggttcaaacgattctcctgcctcagcctcctgagtagctgggattacaggtacccatcaccatgtccagctactttttgtatttttagtagagacagggtttcaccatgttggccaggatggtctcgatctcttgacctcgtgatctgcccaccttggcctcccaaagtgctgggattacaggcatgagccaccgtgcctgtcctccggtattctttttataagggctctttttctttttatgtgggctctaccctcatgacctagcaccttctaaggccccacctcttaatatcatcacacagcagatttaatatatgaattttgaggggacacattctttccatagcactttccagtatggataccttttatttatttttcttccctaattgctttggttagaaatgtcttccctaattgctccactactatgttgaaaagaagtggcaaaagtgggtattcttgtcttgctcctctcttaggaagaaagtttaagtcttttgccattaaatatgacgttagctatggggttttcatatatgacatttatcatgttgaggaaattttcttcttgtttcaatgatgacagggtgttgagttttgtcagatgctttttctgcatcaatcaatatgaccatgtagtttctttgttttattccattattgtagtacattacattaatttttgcatgttgaactattcttgtgttcctgggataaatttcacttggttatggtgtataatccataaccataacctgaagatatgctgaagaggctaagtgccatggctcatgcctgtaattccaacactttgggaggctggtgtgggaggatcacctgaaatcaggagttttagaagagcctgggcaagtaaacaagatcccatctctacaaaaaattgaaaattaccgctgggcatggtggctcacgcctgtaatcccagcactttgggtggccgaggcaggcagatcacctgaggtcgggagttctagaccagcctgaccaacatagaaaaaccccgtctctactgaaaatacagaattagccaggcgtggtggcacatgcctgtaatcccagctactcaggaggctgaggcaggaaaatcacttgaacctgggagacggaggttgcagcgagccaagatcatgccattgcactccagcctgggcaacaagagcaaatctccgtctcaaaaaaaaaaaaaagaaaagaaagaaagaaagaaaagaaaagaaagaaaattagcttgatgtggtggttgtgcacctttagtcctagctactcaggaggctgaggcaggaggattgtttgagcccaggaggttgaggctgcagtgagccatgattgcaccactgcactccagcctgagcaacaaagtaagacctcatcactaaaaacaaattttttaatactgaagaattttatttgctggtattttgttgaggattttgcatctatattcacaagaaatattactctgtagtttttcttcttgtagtatctttgtctggtttcagtatcaaggcaatgctggcctcatgagatcaatcaggaagtgttacttcctcttttattttttggaagaatttgagagaattggtgttaattcttctttaaatggttggtagaattaccagtgtagacatctggtcctgggattttctttgttgggaggttttttagtactaattccatttccttacttgttattagtctaatgagattttctgtttcttcttgagctagttgtagtagctcatgtgtggaatttttctatttcatctaagttatccaagtttacctaagttaaagttccattttatctaacttgggtaagccaacaaacaatactaaattgttcatagtattctctcatagtcctttttttctctaaagtcagtaataacgttcactctttcattttttcattcctgattttaataatctgagttctttctctccccctccctgcaattgagagtcatttaaaagtgtcttgattaaattttatatatctgtgagttttccagttttccctctgttattctcttctagttttatttcatgtgatccaaaaagatactttatatgatttcaatttttttacatttactaagacttgttttgtgactaaaatatccttgagaatttccatgcacatttgagaaaaatgcacattctgctgttgttggacagagtgttctgtatatgtctgttaggtctaattggtttagagtattgttctagtcctctctttccttattgatcttctgtctagttgtttaatccattattcaaagtagtggccgggcacggtggctcacacctgtaatcccagcactttgggaggccgaggagggtggatcacaatgtcaggaggttgagaccagcctggccaacatggtgaaactccgtctctactgaaaatacaaaaaatttgctggacatggtggcacacgcctgtaatcccagctactcaggaggccaaggcaggagaatcacttgaacccaggaggcagaagttgcagtgagctgagatcgcaccattgcactgcagcctgggcaacagagcaagactctgtctcgagaaacaacaaaaacaaaaacaaaaaacaaagtagtgtactaaagtctccaactactattgtagaactctatttctcccttcaatgttgcaaaattttgtttcatgtattttggtgttctgttctttataatttttatatcttcttaatggatgaaaacttttatcaacatataatgttctttgtctcttgagacttttttttttaacttaaaatctatttgggctgataatacagccaccacaactctcatattggttgttattttcatagaatatcttcttccatccttctactttaaaattcttctatctttatatctaaagtgagcctcttgtagatagcatataggtggataatgttctctttattcactctgccaatatctgccttttaactggagtttaatctatttatatataaaataattactgattaggaaggacttacttctaccactcagctattttttttctgtgtgtcttatacatttttaagtttctcaattcctccattactggatttttttttttacttcttgattttgtgtctgtgttgttacattttgattattttctccttttgatagcggcaggaggcagccaaatgcctggcagatagaagcttgtcccccatgaaaccccaccttcaagccaaaaaatagcctgaaggctgaaagaccggactgctggtcccagatgaaacccatgatccagagtgagaacttccattcctgtttgcctgccctctaaataatcccttttaaccaatcgaatgttgccttttccaatactacctatggcctgcccctcccccattctgagcccataaaagccctggaatcagccacattgggggcactttgccaacttcaggtagggggaccacctctgtatcccttctctgctgaaagctgttttcatcactcaatgaaactctcaccttgctccctctttgattgtcagcgtatcctcatttttcttgggtgtggtacaagaactcgggaaccagtgcacaagccagacttggtctgggcagcacgggttagtgggccatctcccacagcaggtagcatggccaagtgaggcctgggcagggcatcaccaaggtccctggcttgcaaagtgaccaaggaaaaaatcctgtgtcactttccttttctcatattttttagttattttcctaatgattgccttgaggatggcaattaacatcttacacttataagaagctagtttgaataatagttccaatagtacatgaacactctactcctatatatctccatccttcttcctttatattgttattcccacaaattatgtttttatacattatatcctcactaacataaacttattattattttctgcatttgccttttaaatcatacaggaaaacaagaatcacaaagaaaaactacattaatatttgctgttatatttacctatatagtgacatttaacagtgtatttttatgtcttcagatgtctttgaattactacttagtgtcttttcattttagcctcaatgtttccctttagcatttcctatagggcaggcctgccggtaattaattccctttggttttctttatctgaaatgtctaatttcttttttattcttgaagaatagttttgctggctataagattcttagttaatagtttttttcccagcacttcaattattattaaagtgttattattattattattattattttgagatggagtctccctctgtcactcaggctggagtgcagtggcgcaatctctgctcactgcaacctccgcctcccaggttcaagcaattctcctgcctcagcctcccgagttagctgggattacaggtgcccgccaccatgcccagctaatttttgtatttttagtagagacggggtttcaccatgttggtcaggctgatcttgaactcctgacctcaagtgatacacccaccttggcctcccaaagtgctgggattagaggcatgagccaccatgcctggtctaaagtgtaattattattacagctgccatttggcctccttggtttctaatgagaaatcatctgttaaacttattgcaaatccttggtatgtatgctatgtgtcatttctctcttgctgcttccaagattctctctctgtctttgtcttttgacaatttgactataatgtgtttcagtgtgaatttcttagagtttatcccacttggatttcattgagcttcttggatgtgtacgtttgtctttcaccaaatctgggaaattatttcaccatttctcaaatatctttttcttcccctttccatctctcttcttctggagctcccgtatacttagttggcatgactgatggtatcctactggtccctcaggttctgttcatttttcttctttctttttttctgctctgcagactggataacttcaatcgccttttcttcaagttcaatgattatttcttctgcctgctcaaattggccatttaacccctccagtgactttttcatttcagtattgtacttttcagatccagaatttctatttggttcctctttaataaattctttttattgtcattccccatctgttcatacattgctctcccaatttcctgtagttctttgtccatggttttctttagttaattaagcatatttaagacagttgacttaatgtctttgactagtaattccaatgtctaaaattccttatggatagcttcttttaaattatttttgtcctgttagagagtcatatcttcctctttatttgctttgtaatactttgttgaaaacttaacattttgagtagtaaaatgtggtaattctgaagccagattctccccctcctttgagattggttttgttgtttgttgagggctgcagttgtccatttgtatagtgacttttccaaacgatttttgcaaagtatgtattctctcttgtgtctggtcactgacgtttctgttctggtgcctctgcagtcagcctatgacctggaagagcattccttaaatgcatagatttttttaaaacccaagaaacaaaaaacctagcatgtatgtacctttttaaaaatcttctgatagatgccacctggaaggctgctgctgcctgaaggggcagaaacaaaggcaagctctactctgagccctcagggaaccaccagataaacaaaagaaatttgattctccaaatttctggaagacaaggtcctttctgcccactcctgctccagccagctgctctaggaacacaattactgtccacatggccacaggaatgttgaagaatgcaggatggtagctggtttgcccacaccactcacttatgagccatcagcatgcctctcccttcatcgagcactcccatggttgctgtaagtgtccaatcaggttccagaattctgaaagagttgactcttacaggatttttttcttttctaacttgctggttgtttagatagaggaaccaattcctgaagtttcctacgttgccagcttcatgaggatcattccctagtaactcttttcagacaaaaagcttcattgatttactgtaggactagcatcaaagagtctatgccacctagtctgtctccttaaaacacagaaataatcagtatgcattggggtaggagtttggcattagatctgccgtaaatcaagagctggggacagcccatgtcttaaactctgacccaagggctaaaatatcctttggtagcaacaacagctacaaactattgaacaacttgtatgtgccaagagccttacctgcattatcccattgaatcctctcaacagccctgtgaggtagtagaattgttgcctgccccttactgaggcctagaaacattaaggaatttgcccgaggccctagagccagtgagtggcaaagccagtctccagactcaggctggagatcctacagttctgtgttaccccagtgttatcctgcctctcagcacagagtcttggatgattctcctaacccctccctaggcaatgcacagggctgctccctgcacccttactcatgctctgctcttcaaccccaacagtgctggccttaggctttatccctgacacccagccccaggctccattccatctgttgacagaggcaaacactggggcaaaactgacctctgtggataccactgtgtccacctccaccagcttcagctgaagcctctgaacatctccagcatggaagaagccccaaaggatatttcctgtcccccagcatatgcttgaccctgaagccctccccatctagtcaagaagaccaaactgttaacaatcctggagtcagagtgacccatgggtgaatcttagccaagtcactcatagctgttgcatcctagtaaatcccttaactcccataggcttcagtttccctgcatataaaatgacagccttcagctcatcggccagtttcaatccatctaaagggtctagcacatcccctggcatgtggaagccacagggcacacactagttgtggtcatttgatcctggcatgctctgctgtctctcggctctccccttgcctctttccctgatgtcctggccatcagccactgcctaacaccctcccactcaccaggcccttagcctgccccttagcacaagagcacagccggtctcaagtctaccctgctgtaagcaaacacttgcaacatcatgctgacctccaggccctgttgcatcagcgtgcccacacttggtgcccagctggtactgagggtatcagggaacaggccagtggtggaagggcggacactttgggttccctggtttcctggctcccaatatctttcccaatggcatatggggtctagcagcttggctcatttaactgtgaacctctaccctttagaatctgggcctccaggcttgcttctgtgcaaaatggcagataaggctcaacctttctttttttaacttcattgttaaatattactccattaatacccatttactgcagaaaaggtaggaaatacagataagcaaaaaggaaaataaattaaaatcctcataccaccatcatcaagataattactgtcaccattttggtatatttcctcccaatacatatattatctatatcgtatatacgacaaaaatggatcatactatgtttcctgttcttcccctgtgttagtcatctattgctgtataacaaactgcctcaaaacttagtggcttcacctttccgtgtattatgatgacaagaatgtggtatgacactgtcttatatctggatcatatgctaaaagatagaaaatggtttctaaacttatttgttctgtaataacaaaattttatttcataaagtgtttttaaaaaaaaccatagtagcttgaaacaacaaacctttgttatctcacacagtttctgtaggtcaagaattcagaagcagcttagctgggtggtctggcttggtgtctctcctgaggtcagggttttggctggggctgcatcacctgaaggcttgactggggccagaggagctgcttccaaagtggtccactcacatggctggcaagttggagttgcgtattggcaagagacttcgcttcttctcaatggatcttcccagagttcttgtaggcaacctcatagcatagcagttggcttcccccagagggaacagtccaggagagaacaaggcagaaaccacagggtcttttctggcttaggctccaaagtcatactccaccatttctgcattatcatattagttacacaggctagacctattctgcatggaagagactataccatggggtgaataccagaagcagggctaattgaaggccagcttcaagggcggctacacattccctttcaacagtatgtcatgaacatctttccatgccaatagagcagatgaatcttaccatttttaatgactacatgtaagtgtagcataatttatttaaccaacctcctgtagttgggtatgtgggttgtgtctcgttttttgatagtagaattaatcatcttgaatatccatcaccaaacttgtcatattattttcttttgatgaatgaaaaagaaaatcaagtcatgtctgtcaatcagaaccctgagcaactaagaaatgggggtaccactgggacatagagcaaggtcccttctgattctgctcttgtctttctctccccatgaaatggggagttcactatctactgagacatcctagcccacagctgcacagttctgtctttttagaaagctctaagcagaaacaatgttcatccatcctcctcgggacagcccttgagctactgaagactctaagcatgtcctggtcatcctccatgagccatcatctctgaggccctccccttcttggcccctcttctctggacaggttctggacagtcttgcccttccaaaattcctggaaagcaggaactgttcctgctacaatgactctcaactccagtgcagtacagactgttggtgtcaccccttatcctgaagaagaggcactgagacaggacaagggtgggtgcccaggagggctggcatgagtcatgagaatctggtcccggagaattagacggtgtggggaagtaggggtgttgggccgctttctggcctcatggatgccaatgaatatcagcaggtggctcccagaaaggaactctaggggatgcctgttgctctaaatagaggctagagagggcactggcagttcagtcaaccaagaaagggggcccacttgcctcagcttcaggctttgtacacatcctcagcctttcttgagaactgaatttagattctcctcccctgtgctgtgtgcttggcccagaagaagggcaagtctcgctgggtggctgcttcttggcctggctgaaccagaaggccccagtgccactccaaacctgggtgtgagccctgcccccatgagcaaacagtagctcagagctgggggctgtgggggtcagtggcctgtcacatgagatctgatgaggccatctctgctctatattgggaaagggatcaattgtatcaagggctttcttgggagtgatcactctggccattggcgagagacctggcattctgacaaggcaccctccataccctgacccacttgccagctccagctaattttagcaggctttggcaggtgccagcaagtacatagcatgtggatgtcactcccaggtgagcccaaggagaggcctgggccagagcctggaagtcatggtctatgcccatggaggcacccaaagcaagcctgaggcctggactttgcagtcacaaaattaagaatgatacccctgttttttgtttgtttttgatcagttggccaccttcctccaccaccccttccccaagttccatacagacccctggattgtatgaaatgcaaatcgaacctctctgcagatgaaaatccactggggatccccttgcctccaagagcaagtccagacctgcaccagcgcgggccaggcccccttaggaccccctccctgtccaagggcatttcagtaagtgttctgtggccaaggcagcctggtgactttctgcccgcacaaggctgaggaatggaagatgggtaggctggctctgcacaccccctcctgctgggcagcaatccctaccccatgttcacagagtgtggccggctgccccatggctctgtccccgtggccctgtcaactgttacccacatggcctaccctccctttctgccctgcctctgaccccatggcagggggcagagtatttgagcagccgccaggctgagccctttcagtgcagaagccctgggctgccagcctcaggcagctctccatccaagcagccgttgctgccacaggcgggccttacgctccaaggctacagcatgtgctaggcctcagcaggcaggagcatctctgcctcccaaagcatctacctcttagcccctcggagagatggcgatggatgtcacaaggagccaggcccagacagccttgactctggtaagggtcacaccaaagttagggactttgcactgggagagcagcacccagggcagggcccttggttttgcagattaccaaaactaaggctgggggcagggaaggcgagcaggcttggggcaccttggaaggaggcacatgggccttgggggtcctggctagggcagctgtgcctgccactggccctctgcccaccacccctcctcactgtggctatccagtgtccagcctctcgaggggttctagggtacttattcctggagctaacggtgacccaggacaccagtgtccggggcctggcctggggcttttatggggggagctggctggctgcccagggctgtctggctctctgggggctctgcatggcatttccaggggttggtggatcagggattctgtccctcaggagaatgtgggcactagcccaaggccactcacttctgtgtacatagccacctgagggcccaggaatggagggggccaggctacagctggacatctggcactcggatgggctctggagcccccaggcctgcagcatctgcccagggactgccctggcccttggccatttcctcagggacccacagctccaccagccggcccctcccagtgctggaatagacagttcctcagtccacatctgccaaaggcggcactagaaggcatcctgccttttttactgcgttctggaggtggggtcacaaagcactgctcactgcataaaagggacagcatcctgcccctggcagccctgcctgaccagctccgcctctcccactgctatccaacctgtacaccctggtgaccatgtccaggccagtggccttaaggactgtctctgtactgatggctccacatctacctctccagccagactctcctctgaactcgggcctcacatggccaactgctacttggaacaaatcgccccttggctggcagatgtgttaacatgcccagaccaagatcccaactcccacaacccaactcccaggtcagatggaacctcttcttcccaggcccttctgttcctctcctcagcccctcccacctcccttcagaataagtctagactcttatcgctttcaccaagcctgcgcccagcatccctgcacagggattgttaggacagcctgacgccctgcttccaccctgccccaagatgcccctgctctgcagcccggcgcctccaggcttctcacctcctgctgctcacagctcagcctcactccctccctccccgcctctgctccagcctcagtgcaggtcccctgctcccatcttctggcagcagctgcccgacctggtccctcttcatctgtccccattccttcaccccccagcctgtccccaacttgactgaggttctttcctgcagatccccgcccttgagaggggttggtcccactgtcaactctgcttctgtgccctgtgccgcacctggcattcagtgagcatctgctgaagagatgagggtcagatgccctgcagggagtgtgggggcgtcctcaggcaagaaaagttgtacgtttggctgtgggccctgattatgtgtcctgtgacctcttgggtgaggtcagcaagagaaacctctgcaagctggctggggctgcctcccagaggctgccagggggagggacaggctctgtctgtgctcttcttccgaggctacacctggggcgccaggctctcagggctccccaggtaccaccacatttcctacactgcttgggaaagccctgtaagtttgcacagacacccagcatgaggctcgccagagagatacttgtagctggggtctgggcaccaggaacagcttggtgctgggcctgaagtcgggcaggatgcagcctggccaggtgagaggaaagcttggagccagtgcctgggttcaaactcctctgtggcctatggttctgtgggcttggggaagggtttgtacctctgtgtccagtttcctcacttataaaaaaaggagataataaaagtacccatgtcccagggtggctgtagcaataatagggaggggtgcccagagcaggtctggcacacaggaagtgtgcatcagcctcagtccctgccattgggcttgtcctgggagtctgtgaagccaacctctgctccacaatgtgacccccaggcttgtgagaccaagctgggtcagagcttcctcctctggggttgcaccaggaggggaacttctgcaggcccagatgcaccctgaggaaagggcttgttcccaccaagaacaaggctcacctttggaggatgctccccacatgagaggtgaacccccaggtctactggtgactgcagcctcggaagctgacagcatctatcctccaacccatgcccactgggaagtgtgtgaggggtcctcataggccctgcggtgtggacaatgcagagaccctgtagcatctggctagggcggggcccagataagagccctgtgccaggagagcctggccggttctgccactgtggggagacaggctcccccaccccatgtcccctgcttccctgcagcccacagagaatacagacctacttttacagaaatccagatttttgtgtaaaagtgtctctattttaagtagattttaagtggtggcagcaaatttaagcttttgagaatattatacagaacaaatcagattcacaggccagatgcaactttatttacagaaatgggatcaggtcctacctcaggtcccatctcacgttttcacttatgcctatacgtctccttcacgggaaaggccacaagaggccctgcggtaagtgtcccggtgttgatttaaagtccccaacagtgaatatgagggtcctcactgttgcagcaagaggatacccccctgtgtatcttggaaatgcctgcagccctcttgctgcagaacagattcttaggagagaaactgtcagatcaaagttaaacttagagaaactccaaattgccctctgaacagacggtatcagtttgacatcatccaataccgggattcctcggggagaactttctggcctagaaggcagtagagccaggacttcacccagtcagtggcagggccacacgtgggccttgatacagagggggaagacttgagcctcctcgacaccctacagggcccagcctcccaacatgtgataagagaaacaacagccaacttgtacctagctctccttattctccaagggctgggccagttctccccacagccctgcaagggaggatcactcaagggccccaactgtctgacaatacagccacactctgatcagccacctgggcataggctccatgccattgtcctccgccaagacctcagactgaaatgttggctcctcccatgaagaacctggggccaaaggaccagagtccaggtccgtggctgccaggatgggccacttggagagaggcacaagggtggtgccaggcaggtgtgagggctggacctttgcaagagcagcatcacttttgttgagagcccacaggtatcttataattgggtcctaggacttcctgccagtagccattgtgtgcatggatttgggtgctggcctcaccatggtgtgctggctgcccatgcctgcaataatgacttctgtaagcctttcttcatctgcaagatgggtgctgctggcacctcctccccggtgctgtggtgacagggcatagtgtgtgaggctgctatgtgaagcacctaatgcagggcctggcatatggaggaattcagcaaatgacagatgccttcacagttagttcctggcatcctctacattggtgggtgtaggaaagaaagacagaggaggcaaaagttgtagctgtggggcattgaggacagcctggattgttccacagagccctgaggacatctccaggggtgtgctctgcaggggcagctggattggagggttaggggtcggggagggcgtgcactcccacccatgctcacagcctcggaacagtgcctgctcagccaacatgggtgtttgattctgtgtcttttgtcacagactttatcagccccatccctttctgaccttgcctcagtttaaattttacatgtggggcctcattaagagacatggttcttaactaaagatctgtatccattaggaatgctttgggctgcaggaagacaaacacctgactcactgtggcataagtggtttgcgtctgctcccataagctgcacgtggagggtggatctggcattactctctcttccctacatttgcagtatgctaacagctttaacctccagccttgtttcttcatggttgcagggtggctatcacagcgctggccatcacatccttacacagctgtgtttacaaatttagggggacattgaagctcctcccctgctaaaatcaggcttcccttcacctgtcattggccagaactgggtgaaatgcccaactctagaccgatcatcagtaagaggagtatagaattgctgtgcccaccttagattaatcatggcgcaatgtgctccccataccaacaaaatctgagttctagaaactgaggaagaagaggaaaatggccgtcttgcctcctggctgggattcagagcatctccaaccctctgagcttatgtgtaagactgtgggcaaaagtgtgtgagtttttgtggaatggatccacggcttttatcagagcatctttcctttttctttttgattcaagatgaaaatattcttatgattatttttctcaccactgcccagagataaccagcacattaacatggccttttctccatgaatagcactagggtgcccagtggacagacacatagctgtccacacaccagcttgctggggatgcataggcagagtcacatctgcactcacggcctgtcctcacactgccatgtggagagccagcagccacaccatgggccgtccatgctcacgggagtggcagtatcagatctgagcttcgtgtgcccaggcgtctctcacatcagtgcatagggaccctctttgttctgtggcccagtgtgcccatgccacagatggcttcagtcagcagacacctccttctagacactcacactcactcctggctggcccttagcacacctgtgcagacaggcccatttattttcttgtgtaaatcccaagtaggaggactgggtctctctgacagcaatgccagctgcctggcaccctccagacaggtggctcaagccccacctcgccagctctcccagttagcccctcctttccctggctctgacctgagggacgaagcagggtgctacaggacgctgtgccacagggatatcgtcagggacagaagctactctgccctctgctgctcacccctccaacacgctgtgggctgcatttgttgagtggctggtaccagactctgctcttctgactttccagctggttttacctgtagtaaagtttgagaagatgggtcatcctgaccccggggtcagaagacagaaggaggcccatggcgtgtgggggagatgccccgtgaggccctcggtgtgcagatgcctggtgacagccccaccctgaggtccccagcctaccccctccccagcccgactgctcccatccccctccctgtgcaggtagagcagatcctggcagagttccagctgcaggaggaggacctgaagaaggtgatgagacggatgcagaagg

SEQ ID NO: 15584 - DNA, 45106 bp, Homo sapiens
actccacacctggctggagcaggaaatgccgagcggcgcctgagccccagggaagcaggctaggatgtgagagacacagtcacctgcagcctaattactcaaaagctgtccccaggtcacagaagggagaggacatttcccactgaatctgtctgaaggacactaagccccacagctcaacacaaccaggagagaaagcgctgaggacgccacccaagcgcccagcaatggccctgcctggagaacatccaggctcagtgaggaagggtccagaagggaatgcttgccgactcgttggagaacaatgaaaaggaggaaactgtgactgaacctcaaaccccaaaccagcccgaggagaaccacattctcccagggacccagggcgggccgtgacccctgcggcggagaagccttggatatttccacttcagaagcctactggggaaggctgaggggtcccagctccccacgctggctgctgtgcagatgctggacgacagagccaggatggaggccgccaagaaggagaaggtatctcgccctccattgggcattctgggagtgtttgcttgcctgtccccaacattccatggtttgtttgagcctcagaatctgattttatgcacaggctctttgagaagggtcttgccaggggtgccttctggggcaggaaggcccctactgcctggcagacccatccagctttggactctggtcctgcgacccggaagtcaggctgccaagaggtccaggcagtggcctccactggggaggggctctggagagtttagagccctagatgtgggggttagggacatgaggtcttgtggacaaagcccactacctgattttgagacaacactcactagacatggtgacaagtcaaagatgccttgcctcctaccaggaatcacttcgcagggagcccgagggctgctgtggcctgctgaggagtgcagggcagttactttttccaaaaacaaagagaaatccaggcatgctctgagccagccctgagcccagcagtgagcaaggagagagctggagacaggggactttgctgtgaaacactggggggaatgtgcctgcatcaccccagctgggggcccaggcagagtgggggagaaggggtaagtgggcagagccagtcactttgggcatgcttccctctcgcctctgtgtgaaatgaccaggtcagcataaaccccgggctggctgtgcttctggcagagctaatgatgttaggaggaaaacaaccaacccaagtgagagggtgcgcagccagacagctggaccggccgaggccccaaccaagtcccagatctgcctgtcactggtgctatggcagcaatttggatgagaaatcctgcccaaagggccccttcaggccacccggggagaaggaagcggctgtctttggcatgaccagaaagatggctcggagctagggagaggtggacatgtgggctgtggagatctggcactttccccaaacaaggagagaaagcatagtgtgcctatgtgtgaatgtgctatgtgtgcatgtttgtgcctgtgcatacctgcatgtgtacatgcatgtgcacatatgtgtgcacagggaatcactttaataaaggccacagcagagctgtccctgagccccttgcattcacagtggcatgtgagtgaaccaccttcttaggctgggcatccagtctcagactctggggctgcccatgccccatcctttatctgctccacgtgtgaggggttgctggtcctgaccagggccagctgtgaaccccagaatcctgggaagtcactgacattcttgtcagggccaagagtggagcaaggcaatgcctcgggcacaaactttaaggggtcaccagaaacatcaatcatcaagatatatgctattttaaataatcaaaatgaatgcaaaaaaaatttatgatggacaacataccaaattctaaacaaaggcaggatgagtatcactggcttctgcacttttctccacccagtctacccctcttctagtgcctggatcgcagggtgccaaggcctggatgagggaagcgtggagctgcaatggccactcctgtctgcctgttctggctgcacagaggactcagtccttgtcttgggggaacctatcttggttttagggtcatcctaaggatctgatgttttccaagtgagctggctgtccaggcccacccaggttcagtccagtcctgtgtctctgggaagtgctgcccctaccccaagccagtgtttgaccttggagcaatgagcaatgccctccttccactttcaaagttgtccccaagacgtcagctgtggttgtctctgtgcagacaccgaggaggaactgtcttctttctccttttggttgctttggaggaaagtaaagtgttgctggtttccctctttctacttctttgattgagagcagccgtcttgccggtaccaaccttccagatcttacctgtggttgcaggagcctgtggcctcagtcctgtgcccagtgacttctccatgtggatgtcagctccttaggggcaagcctgattccactgacactactcccacccctcataagccccttcttaccagctgcagttgcctggtaccccaccatcgctgactcattcctttggcatcaaggttcatcccttactgggccaccacttctgggtggcctgaaatagggccctgggcatccctcttggggaccttttggtctatattttcactctcacctcactaaggacagatgagtaaatctggttaactttgcctgatagatttggtgaccttttttcaggaaggagcctggaaagatgagattcaggtgtattggtcagcttagactgccataagagaataccatccactgatggcttagaaacaacagaaatctatttctcactattctagaggctggacgtccaagatcagatgccagcatggtcaggttgcagggagggctctcttcctgacttgcagaccgccaccttcttgctgtgtcctcacatcgtggagagagagtgaaaacaagctctctggtgtctcttcttataagaatgctaatcctatgatgggggctccccctccttacctcatctaaacctaattatctcccaaaggtctcatctccagataccatcacactggggttagggctttgacatatgaatctggggggacacaattcaatctgtaacaccaggagggcatgccgggaggaactgaccttcctccctccagctgccctggacacctttgccccattgaaggagcaggctcagaagtggaatgaggatggaataaggtgcactccatcatgcttacccacatccctggcaggaattgtcctgggccccagcaggagagatgcccccccatactgccatggcacctgctctgagacaggtgtgcagagtgcaaagctccaggtggcccccaagcaggtgtgctgggaggaggggcccgtgtgggaggagcaggcagcgccaaggcctagcggagcagtgacaggtccctgacttcagggaatgggcacgctgtgggcaggcagctggtgtgggggtgagggctggggctgcatctgtgggaccagggctgggccatccatcatatgccgtgtcacaaccccagtgcccctgctgtagccaggacaggaggctgggccaggctgggaggtgacaagagtgggggctgtccccaggagaagcactctgctgcctgtgcccaggcctctggggatgaggacccctcagaaggagtagctatgtctaggaagccccagggcaggagcaagccaaaggggacatcattagtgagatccaggggatcagtgggccacagaagccccagcgtgagcccctctgactgatgcagctaggcccacacctgcacctgcccacagcaagacccccaggaggagaggggacagatggagagaggcacaaagtgcccctggcctctgccttgaagccaccccaaggcaagagagatttgagcccctgtttagtgacctccaggggaacattctggcccatctgatgtgggaagccccttgtggagtctgtcattcctcagctgagccaggcctttggaggcagcccaggcatgtcccctgtgtgctcctatccctgtgttgggacacctggcccagcccctccttctgcctttctcttcccttcccttctcaggagtggacacttcctcctttagccccctcacagctgtgtgaacttctctgtatctctctctttctgtctctttctccccctctctctctgtctcattgtctctctgtgtgtctgtctgtagtattctctctctgtctctgtcactctgtctctctctctctctgtgtctacctttctgtatttcgctttgtttctttttctctgtgtgtgtgtgtgtgtatctgtttttctcactctctctctgtgtctatctttctgtatttcgctttgtttctttttctgtgtgtgtgtgtgtgtatatctgtttttctcactctctcaatctctctctctctttctgtctctcttttgctggcctgagcaaagagggagccccatcctgatgctacataaccgtgaaccagcacagacagaattgtaggaaagtcctgcaagtagaaggatagaaggatgagggaagaaacgccatgtgagtcatgacagatccctttccaggagccactgactcaccctgcctcctgccctcccactgtgacactattactcacagacaggcccggattaaacctatgttccaggtgccctgtggttcccacagtgtggctccctgggtctggcctcaggctccacaggtgcccagccctgccaaagtctccagagcagctgtccagctggggagctgcggggccccttcacagagcgcatgggaagaagttccatcctacacattacatcgagagggacgtgcctgagaaggggagctggagcccgtgcagccccctgcttgcgtgcagaacatagtgtaccctgagcatgccatgaaaaacacaaacgcacaaagttgtaaagaaaaaagaaatgacaggtggctgtaaaatcagttatagcccacgagaggcccactaatgagtggtgatttcagctgattacaaagaaatgatggtgtttctgtaatgaactaaacatgcactcgtgcgtgcacacacgcgcacgtatagtcacataactgaccagccctatgcatcacttgttaattacttagtaactgtaacaataatagtttccaataagtgagccttagtctctgcgcaagggtcagtttattgagcacacgggggccttgcagtgggggcaggtgatctgctcctgggagccgccagcctctcctctcctgctcttcatcttcctccgtggtgggaaattgtctcactgcttctacacctgaggctgaacatctccctttatttcagtctgaaacacatgtaaaaatatactggaatgaattaaggttgcaattattgatatcaggcagtgagtacatcagggtttattatactatctcctttacttacttcgaagttctctattaccaaaaaattaaaaactataaaagaaagaaaaaggaaatgaggctagattcaacacagattactcttaccaaacccttcgtagtcccaggagtcccctaacacaagcacttgtgacctggagtgatattcacagcattccttacctggcaatacctgagtattagcccccccagtgggatctttgttgtagacaaccagcaactatcagcccagccaataaacaagtaggaaaggggagtgctggagaggccaagaagtgggattttccatgctcctgggctgtgatccagagggcacggctgtgaggctgatctcaatgaacactctgtcttggaagtacagggatcctctgctacctgaaaacgttctgagtattcactttcatggattgcaaagtcatttacccaaaattcactctccaaatgaaaagtgagtatgatgaatcagtattcaagttccacctgggtcctgggagagggcatggacatcatatcccagctgttccgacaggaggacccaatctgagtctcactgcctgcctgcatcgtttgtctgctgccagcctgcacagtaggaagggaaaacatgatttgtatctgttttaggtcaggttcccaagaagtagagcctgagattggaattcttggaaaatggtgtttgcgggagcgctgtcagcagaagctataaggaagttggggggacagaaaacgagaggtaagaagccagtcaaaaaggcaggtccagcttaagtccgcctcagtctggttccacaagggctctgatgcatgaagaatatcacagggttgtccctcctgggagaggggccagcctattgtacctgtatcaaagccaccagctgagggccagtggggagggaagatcttccaggcatttccaggaaactctcaggagaagggtgtagctgtgagcagtctgcagctgctgctcactgcggctaaaggctgggtgtgcaggccagtcagccagtgaggtgccaacagcaggcactacagtccaccccttgactgctcagacctactgctttccactttaagctctctccatccaggcacagcttcagggaaaacttacaattggagaaacagagggatgaactacaatgcccacttctgcatgtgattgtaagactgtcactgatactcaccatcatgccccatccccaccatccattctagtgtccccttccccttggctaacactgctggtctaggtgacttccctagagcaggagccaaacccttatccctgaggcatctgaatcctggattcctttatcaggctattgttgttgtaagttgtccattcccaattacaactggacatgagactaccaagaaacaccctggcaaatcatctgagtgcaagccatattcttcctgctccattatgtagcggtagtcctacctcctaatgacaagggtaaattgccacattttgctccttgtgccaggatggtaatacctttctctacctgcttggctactggcacaaggaagcacagcatgaccaggaggcaattgtagctgtacatttagtgaatgtgttaatgtatcacctggtggaaggaccccctctgagaaccaggacttctagacccacaaaacctaaagttgtgaatggcggaagcacaaatttcccaagtggatcatggagagtgatgaagagttcttggttcccaaacccacatattttacctttcaggaacatggcctcatcccatagccattagagtgcatattgcattctggaggagactgggccctcctcatgggtgtcatcttcaagatgacagctccactgtgcctccaagaggatgctccaccaccctatctgtgattccttggttagcaggacaggctgctgcactgagggtaggaaaggcaagtccattgatggctggaatacatgtcaatccaagtcaagagaaaatgccgccctttccaggttggaaggggcccgatttagccaacttgtcacccagtagtggctggttggtctcctccaggagcagtgttataccaggaattcagcaccagtcgctattgctggcagttcttacattcaacagcagcaaaactaggtcagccttgatgagagggaatgtatgcttctgggcacaggcatggcttccttctctgactccatgactatctatttctgagtgcatggtggccgacattcagctgcctgcccatcctatccacttggttattattgcctcttccacaagaagtggtttctggctgtcattaatgtctcatactttgtgcccactcacacaggtttagctctacaacttttccccatgccaccacttttccacaatcttctaatgttgctccttccaagctactgaagaacgagctaagctattcaccaatgtccatgagtctatatttaccttaggccacatctctctccacacaaagtgaataagcaggtgcaccctccaaaactctactaagaggatttcttctccccagtgtctttcagggccaccttgagtggggctgaagtacagcagaagtccatttccagcttgcatcaacattccaaactaacctatccatgatcaatgcatagatgggtttttccctcctccagcagctagacaaaagacaccccccaccaggaggccatatttgcatgtgggtgaaagagaggcacaggggccaatattcgtgcaacagtggtagatggcaggtgggtctgggccacctgtccctgcagcttatctgtgccatctggacctgctcaagcctgattccagatataccatttccatcttatgatggatggcttatgacctagtgggtctgacagcaccaaactcataatgggcagttatggccacatggtcacttaatgtcctatggtcagacactctgctgagtggcatgccaggaaatgctttacaagtggtgtttggttctctgctgcagatggcatgaccttggtccggagccctaggggtttggacagtgactcctgttggggcctaatctcacattccatgcagagtatcatcagatttgccaatcacatagcctaagggtcaggactgatccaaccagtttttgcagagatcaaactggagaatgaaaggttgatatgatgtgaccatcatatcacgtttttctctcttgaaaagtatgcagatgtctgaaagagacaagtgccccaggagaaaatgcatgccttcctcaggatcggcccccacctcccctcctggccacaaggagggtcaaatctcagcatggcccaacttggacctgtcaaggaagaagaaaaaaattgtatgccaaaggaactcagtctttggctaacaagtactagacatcctttaagtctttgagaatggtaataatttctgccatccctccagatttgtgtttttctgttttggctgggtgggaatgcagcattttcactttgcctttgttattacaaatgttgcttattctataaatcaaggaaccattgtaagggctcttctgatggttaagtatatccattccaatgatttattcgggatccaaggaaatgatttctgggtgaatacacagaactagtggatccaatttgagacatacctgggccagaactatatttgtcgtcttaccccaataagcctgcactctactaggacagccatgacagcactttgggaccctagatataagtgtgaattgctggctgggcatggtggctcacgcctgtaatcccagcattttgggaggctgaggcaggtagatcacctgaggtcaggagttgaagaccagcctggccaacacggtgaaaccccatctctactaaaaaatacaaaaattagctgggcgtggtggtgggtgcctgtaatcccagctactcgggaggctgaggcagggagaattgcttgaacccaggaggcggaggttgcagtgagccaaaatcacaccactgcactccagcctgggtgacagagcgagattccatctcaaaaaaagaaaaaaaaaagtgtgaattgctatgaaatcactatcaaaagatctgagtgttacccttactcagtgtggtcgaatataaatagccataggttcctgttatacacacttgctgtggtgctacagagtctttcctcatgggaacccagtccctctttcagtcaatgggttctggttcgagaactggctgaggtttggaaactgtgcctttccatcataactttccactggggtgactgaccttggccttctgttcatcctttctagcccctaagaatccaacactctattagccttctccttagacccctataagctaatcccttctagttgttagtctgaccttggtgcccaatatgataattattcccactttgcttctgatatgcttctaagtgctgcccctggtctctgcccttaagtgatctatcatccccactgccattagggggagaagctctgaaaaagagttgtctcccatcaactctggtctacaaaggacagccctactgagcctcagccatgtgcccgacaccagcagattctttacagcctgggaagcagagtgtcttccctgcctttccagggaacatagccagcttacaggctttttgatcttatagagtaggtcagttatattttgccccatttcttttatccttttgatcacttcctcttggcccaccatgtaaactcaagcatccctgcttcatttaatcgagctgttgctttttctaagctaccaagagcaaccccagcaatatatcagagccctctcttgggacccttgctagggtgttaaatcctgcatcataggagaatgcccccacatcagcaaagtccccttatcctcttgatatcccacctgccccagtccagcaccttcaggatctggtctcaatcacaggatccagcacctttgggactgttgcaagcataagatccagcacttttgggatctagtctcccacttcctgctagtacttgttagccaaagactgagttcctttggcatacaatttttttcttcttccttgacaggtccaagttgggccatgctgagatttgaccctccttgtggccaggaggggaggtaggggccgatcctgaggaaggcactcattttctcctggggcacttgtctctttcagacatctgcatacttttcaagagagaaaaggcctccttctcacagcaagactacttctgtagatgcaggtggctcgtgggaatctggcaattcaaaattctcaagtgtactcactagcacattagaaaaccagtagtacacatctctttccaaatcttcattcagtgacactatgtcagtagctggaaatgggccatggtgggtgtatttaaaccatgaaaatcagaaaatgctacaaaccagggcatcccgcatctctagacagcagattgttggccatttcccagcataccattgtgtatactccttcccatcagggccgtggcttgccttggtggaggactcagcccttgctgaagttctgctactgctcttacaattgagtcctatgcctggtctccagctctgcctgcctcactacaggagacaagcatctctttgaacactgccgagaagaccctctggctctcaggcttggctttaaatcgatagacctgagcctgccattttctcttttccatgcatcactccactgatccacaggtctcagtggcatagtccttcgggttagcatctcccccacaccctcggtgccagagacactgagtaagaaagtacctccctgtctacccccatccccgctccccacaggcagggccttggcgatccactgctgcaatgtgccagagactgtcagtactcctaccaccagtgaggtggcaaccagctgggaagtgatccaactccagagtcccgccctcataggctgatttctaggaccacccctggtatactgtgttaggttcttgaagcagagcctgagataaggattctggcacctgtgattgagtgggagggtgctctcaggatgagatggggtagaaataggcaaaggtacagattcagcagcagttgagcctcagtctgacccagcagggagctctcaaatgtgaatgacatcacagagttgtccctctgaggcaggggccagcctttgtgctcctacatgagtcagtcactggctggaggcccctggggaaaggctagggctgccagctttagcaaataaaaaattagggcactcagttaaattgaatttcagataaacaacaaattattttttagtatatgtcccaaattgtgcataacataatgtgttttctccgccagccctgggaagggcgtaacttcccaggtatttctaggtgaagtaactttgtagatcaggagtaagtcccaggaaagaagtccagctcttctcttcagccctgggcagctgggggtaggcacaggggcccagcaggcacccatagcatctcctacagcatctgaaatgaacagggtcatcacgtactacatacaaatgtacccactgctgagttcttcagggattatatcattaggtacttggtattttaaatacattacattatgcagaagtcctttgtggattgctatatttggagagttttgtgatattggggggattagatggagttttcagatgggcatcatacggtttttcatttaaaaccctagagtattgtaatcctagggagtgatcctgcgattagtaaattagctctccaatagattttcaatgtggttgcaaaggacatgcatgtggttcaccctcccaggaaatccagaagggcagcattggcctgagtggcctgagtttggctggttgggctggtaatgctggacaaagacaatgggtggaatggtttgcttccctcagtcctttcagacacagcccagcccaccacgtcaagccagtgggtgcatctgcaaccaatccccatgagaactgcagcctctcagaggtgggcaagttggcccgggtgggtcaggaggatcagatgttgaggaaatctttggattggaggcaggcagagcagggaagcatcgggtgattctatgacagacccagggctccaagctgcagttcaggaggggcactggcacggcctctgctcaactcccccttgagtgacatcaggtgaagtgccgacaacacagaaggcagcaaatgctgccagtcaggtctgcttcccaggacagccagttgctaacccttctccagcacagcactggattttggtcacctggctgggagctccacctccccagctgctgcctcacctgcttttccaaaccccaccctgtaaacggtaactacattttgtgcccactacgcctcgtttccatctctttggagcacctctcacgtggagctgaacagaacgacctgttaagcccaccgtgtctgttagggttgtctaggctgtatcagatacccaactaaaactggattcaccaacaggtattgtcaaagcacataagaaagagtccagaggcaggcagctctcagcctggtgtcaggctctgggtcagctttccagattctcttaaccttccccacatctgccagatgccgccacaggcacaggaggtacaaacaaacccaaaaatgttctggaaacaagaagggaaggggatccccaccatatctccccagaggccttccttctcacatctcactgtactgaagccagctctagcagaagacagcagggtgaatttgtccagggtattcagcccccagtgctgggtccattactacttgacccctgaataaaacagaggttccatgagcaagaaggaaggggaactggatgttagagggcaagaatgtatccatcccacccctaggagcacgcatggacaactgccccatttttgctcctattgcagcccaggggctagcccagagaccttgccagtgctgagtcacaagatgctgggaaagtgagaccagagcctggtcttggggaacagctcaaggccgcattggtctgcaggtcatagagcagctgctgagcagtgagagcccacgatgggccaggccctgggtcttggagacctgaatgagatagactgggttcctgttctcctgggcattgcctcttagagggcaaagacaattaacaataaacaaatagaacatgaagtgttttccgatagtgactgatatactttggatatttgtcctctccaaatctcatgttgaaatgtaattccttatgttggaggtggggcctggaaggaggtgtctgggtcatgggggcagatccctcatgaatggtttagtgccatccccttggtgatgagtgagttcacgtgagagctggttgtttgaaagagcctggccccctctcattctcctgctcccactcttgcatgagacacctgctcccccttctccttctgccatgattttaagattccagggacttcacaagaagcaaatgctaacgccatgcttcttgttctgtctgcaaaactgtaagccaattaaacctcttttctttgtaatttatccagtcttgggtatttctttataacagcacaagaacagcctaatacagtgatgctctccaagtgacctttgggctgagacctgaagaagaaggggaagcagttaggtctgatagctcatgcctgtaatcccagctctttaggaggctgaagtgggaggactgcttgagcctaggagttgaagaccagcttggaaaacatagcaagaccctggctctacaaaaatattttttaattggccaggtgtggtggtgcacacctgtagtcccacctacttggaaggctgaggcaggagcatctcttgagcccaggaggttgagactgcagtgagtcatgttcacaccactgcactccagcttgggtgacagagcaagacctgtctcgaaaaagaagaaagaagaaagtaggaagaagaagaagaagaagaagaagaagaagaagaagaagaagaagaagaagaagaagaagaagaagaggaagaggaacaagaacaagaagaagaacaagaagaacaagaagaagaacaaggagaacaagaagaagaataagaagaagaaggagaagaagaagaaggagaggaagaagaagaagaggaagaggaggaagaggaggaggaggaagatgaggaggaggaagcagaagcagaagaaaaagaaagaaaagaaagaaagagaaagaaagaaaagggaaggagggaaggaaggaaggaaggaaaaagggaaggaaagggaaggagagggagagggagaaggaagaacaaagaagaaagaaggagaagcagaggcttgtgctggatagccttgcttttgccaatgaccttgctgattttcagggggtcctggtgtcttagtccatttgtgttgctgtaaaggcatacctgaggctggataatttacagagaaaagaggtttatttggctgagagttctgcaggctctacaagaagcatggcaccaatgcctacttctgatgagggcctcagtctgcttccactcatggcagaaggtgaagcagagcctgcatgtgcagatatcacatggtgagagaggaagcacgagggggcagggaggtgccagcctcttcctaatagtaagctgtcttgagaactaatagagtaagaaataactcacaccctgcccccaaggaagggcattaatctattcatgaagtatctgcccccatgacccaaacatctcccattaggccccccacctccaacattgaggatcaaatttcaacatgaggttccggtgggcaaacatccagctataatactgggcaatgctgaccagactcttcccctctcaggcccagagctccttggccctgtaacaacagaaaattgcgtttgagtgtcaagatttttcctttagtccccatgcagctccttagaatgaggtggcatcttctcccttttcataggtgaagaaacagaagctctggaggaacgaatcattcatccaaggtcaggtagctagtaagcgtcccaccagctccccagatctcctgtttcctgtcccaagtcccactgagtgagctggaacaatggcttcactggcacctgccgggaatggtggcaggtgcctataatcccagctactcgggaggctgaggcatgagaatcacttgaacccgggaggcagaggttgcagcgagccaagatcacaccactgcactccagcctggataacaaacggagattccatttaaaaaaattaacatataatatacatacagtaacattcactttttaagtgtacagtttgatgagttttatcaaatgtatatggttatataaccaccatcaccattaaggcagaatcttcccatcactcaaataattccctcagccccacctcttgctgtcaatcacttctcccaccctagccactggaaatcattcatctgttttctgtccccttggttttgccttttctagaatgttctatacatgagaccactgagaatatagtcttctgtgtctggcttctttcacttaacataatgcctagctcagcagtgtgtcaatcctccctcccttgccattgctgagcagtgagtattccactgtatggctgtgctacggtgtgttcatccatttattcattcaccagctaatgggcatttggattgtttccaggctttggctatgatgagtgaagctgctgtgaatgttcaagtacaagtctttgtgtagacaggggttttcaattggcgggataaatacctaggagtagtatcgtgtggttaagcgtacgtttaaacttagaaaaactgtcaaactgttttccaatgtggcctgtaccatgttgcatttccatcagcagtgtttgagaattccaattgctccacatcctcctcccgacacttggtttcacccatcttttaaatattagccactctggtgactgtgtagtgatatgtcagtgtggttgtaatttgcatttctatgattgactaataataatgttgcagatatttctgtatgcttagtgggcatttttggtgagtttttaaaaattgggttgttgtcaccgtcttattgagttggaagaattctttatatgttctggatgtttattcatgtgtgtgtctgctaagaggtgagactggttctaccctggtcctaacaagcaccctgggcctgcatccctttttgtgtctgtgagctgggtctgcagccctctcctcccactacctactgcccagcagtacccctcacccatcactgtggctcctgcaatgacatctcagcctgtctctccctccctccagctagccagaggcaggatggctcagtgacacagggtgggccctgaagacagagtgccagggtttggaccttgtattagcaagagtcacaagggaaacttactttatctctccatagctctgttgtgaggatccaataaattaatccatagaagagcttaggacagcacctggcacaaagtatacatgagctattatgatgttattcttccaacccattgtttctgtgttgtcataaacatgaatgcaggactcagtgtcccagctctgtgtccctcgcatacattccctaacagcccacaggtcttgcctgtcaccgcctcattcaataagtgatgactctgcctcttccttggctggggccttgcattggacatttctgtatccatatttgttttttaaaaactagctgttggccgggcgcggtggctcacatctctaatcccagcacttgggaggcagagacaggtggatcatgaggtcaggagttcaaggccagcctggccaacatggtgaaaccccatctgtacaaaaaatacgaaaattagctgggcgtggtggcatgcacctgtaatcccagctacttgggaggctgaagcaggagaatcgcttgaacctgggaggcagaggttgtagtgagccaatatagcgccactgcactccagcctgggcaacacagcaaaactccatctcaaaaaaaaaaaaaacaaaaaacaacctagctggacttgacactcttgttagaggaagatttttccacatctgttaacttttcttctattgttatccatctgtgcaggtttttctgtcctcctgagtcattttgataatttatattatattttgaaaatcatccatttcctatagttgtttattagtgtcttctctgttatatttgatcagattaccaaatcttgctcattgattgcccatttattttattgtgtttatttttttgagacagggtctcactcgacagcccaggctgaagtgcagtggtgcaatcatggctcactgcagccttgacctcctgggctcaagcaattctcccacctcagcctcctgagtagctgggacctcaggcacacgccaccacagctggctaatattttatttatttatttatttatttatttttgtagagatggggtctcactatgttgcccaggctggtttcaaactccttggttcaagtgatcctcctgcctcagcttcccaaagtactgggattacaggagtgagccaccatgcccagcccctatttactttatagtaagtgccttcatgggcataaatgttcctctgagacagctttggctattagccatacttttaatattttgtacattcatggttattcatttataaatggtctgtaatgcaatgcagatttcccctttggcccaaatgccatttacagcagcacttttctctttctgagcagacagaatattttggtttcccctctgttgtttatttctcgtctgcctcgcctcatttgctaggtgttcccttggtgtgccttaagtatgagccactcaaatatttgtgtttctctaaacacccctgacactgtcctgctggtttctctatctggaatatccttcccttcttggccagttccccctagtgcatcaaagaaatcctgctcttttgccttcagaaaacaaaacaaaacgaaacctatcagtctccttatgtccccaaagacatagctttgctggtatctggttgtattgagctgttcatttgtctcttctgctagatggtaagctccttggaaactaaaaactaatcacttttctaacttcagactgagcacaaattaggttctcaagaaacattgaataatgagtgatccggtatccccttccaacatatttttggtcattgataccatcattctgagtagttactagggaacacttcactgcagtaaccaatacagcaaaacgtgaaatacagttacatagtagaattgtatttcttgcccatataatagtcaagtgcagttcttcatcagctgggaggttctcctccacacagtcatttaggaatccagggaacatagcagaggttgctagctctagacccaaacccatgtcctctttgtccacagtgaggacaatgccagcaacagctggccagctgttctgtagttctcagcctccctcgcagtgagatgtctccatgcaatttcagtggagcaacatataccatttccatttccaggtgtaggctcctaagaagagggtggcttcttcatgttctttctcacctttccgtaggctagctgcagataatgatgaggctttagggagtgggtggagccataaagtagaagcctggattcctaaatgacggtgtgaagtgttccctaatttcacgtaattgtttcttaatttcctgtttgggttatttgttgctaaggtataaaaaaaccctgatttttgtgtgttgatatttgtgtgctgcaactttgctgaattagcttattagctcaatttgatctcagatattagctcaaatattttgggagattatttatggttatctacataagatcatgtcatctgaaataaagatagttctatttccttctttctatcttagtccatttgggctgctgtaacaaaatgccataaattggaggctgagaagtccaagatcaaggcccaagctaattcactgtctgatgaaggcctgctttctggttcatacatggcaccttctagctgtgtcctcacatggtggaaaaggcaaggtagctctctgggattcctttttgtttgtttgtttgttttgttgtttttgtttgattttttgagacagagtctcactctgtcaccaggctggagtgcagtggcacaatctcggctcattgcaacctctgactccctggttcaaacgattctcctgcctcagcctcctgagtagctgggattacaggtacccatcaccatgtccagctactttttgtatttttagtagagacagggtttcaccatgttggccaggatggtctcgatctcttgacctcgtgatctgcccaccttggcctcccaaagtgctgggattacaggcatgagccaccgtgcctgtcctccggtattctttttataagggctctttttctttttatgtgggctctaccctcatgacctagcaccttctaaggccccacctcttaatatcatcacacagcagatttaatatatgaattttgaggggacacattctttccatagcactttccagtatggataccttttatttatttttcttccctaattgctttggttagaaatgtcttccctaattgctccactactatgttgaaaagaagtggcaaaagtgggtattcttgtcttgctcctctcttaggaagaaagtttaagtcttttgccattaaatatgacgttagctatggggttttcatatatgacatttatcatgttgaggaaattttcttcttgtttcaatgatgacagggtgttgagttttgtcagatgctttttctgcatcaatcaatatgaccatgtagtttctttgttttattccattattgtagtacattacattaatttttgcatgttgaactattcttgtgttcctgggataaatttcacttggttatggtgtataatccataaccataacctgaagatatgctgaagaggctaagtgccatggctcatgcctgtaattccaacactttgggaggctggtgtgggaggatcacctgaaatcaggagttttagaagagcctgggcaagtaaacaagatcccatctctacaaaaaattgaaaattaccgctgggcatggtggctcacgcctgtaatcccagcactttgggtggccgaggcaggcagatcacctgaggtcgggagttctagaccagcctgaccaacatagaaaaaccccgtctctactgaaaatacagaattagccaggcgtggtggcacatgcctgtaatcccagctactcaggaggctgaggcaggaaaatcacttgaacctgggagacggaggttgcagcgagccaagatcatgccattgcactccagcctgggcaacaagagcaaatctccgtctcaaaaaaaaaaaaaagaaaagaaagaaagaaagaaaagaaaagaaagaaaattagcttgatgtggtggttgtgcacctttagtcctagctactcaggaggctgaggcaggaggattgtttgagcccaggaggttgaggctgcagtgagccatgattgcaccactgcactccagcctgagcaacaaagtaagacctcatcactaaaaacaaattttttaatactgaagaattttatttgctggtattttgttgaggattttgcatctatattcacaagaaatattactctgtagtttttcttcttgtagtatctttgtctggtttcagtatcaaggcaatgctggcctcatgagatcaatcaggaagtgttacttcctcttttattttttggaagaatttgagagaattggtgttaattcttctttaaatggttggtagaattaccagtgtagacatctggtcctgggattttctttgttgggaggttttttagtactaattccatttccttacttgttattagtctaatgagattttctgtttcttcttgagctagttgtagtagctcatgtgtggaatttttctatttcatctaagttatccaagtttacctaagttaaagttccattttatctaacttgggtaagccaacaaacaatactaaattgttcatagtattctctcatagtcctttttttctctaaagtcagtaataacgttcactctttcattttttcattcctgattttaataatctgagttctttctctccccctccctgcaattgagagtcatttaaaagtgtcttgattaaattttatatatctgtgagttttccagttttccctctgttattctcttctagttttatttcatgtgatccaaaaagatactttatatgatttcaatttttttacatttactaagacttgttttgtgactaaaatatccttgagaatttccatgcacatttgagaaaaatgcacattctgctgttgttggacagagtgttctgtatatgtctgttaggtctaattggtttagagtattgttctagtcctctctttccttattgatcttctgtctagttgtttaatccattattcaaagtagtggccgggcacggtggctcacacctgtaatcccagcactttgggaggccgaggagggtggatcacaatgtcaggaggttgagaccagcctggccaacatggtgaaactccgtctctactgaaaatacaaaaaatttgctggacatggtggcacacgcctgtaatcccagctactcaggaggccaaggcaggagaatcacttgaacccaggaggcagaagttgcagtgagctgagatcgcaccattgcactgcagcctgggcaacagagcaagactctgtctcgagaaacaacaaaaacaaaaacaaaaaacaaagtagtgtactaaagtctccaactactattgtagaactctatttctcccttcaatgttgcaaaattttgtttcatgtattttggtgttctgttctttataatttttatatcttcttaatggatgaaaacttttatcaacatataatgttctttgtctcttgagacttttttttttaacttaaaatctatttgggctgataatacagccaccacaactctcatattggttgttattttcatagaatatcttcttccatccttctactttaaaattcttctatctttatatctaaagtgagcctcttgtagatagcatataggtggataatgttctctttattcactctgccaatatctgccttttaactggagtttaatctatttatatataaaataattactgattaggaaggacttacttctaccactcagctattttttttctgtgtgtcttatacatttttaagtttctcaattcctccattactggatttttttttttacttcttgattttgtgtctgtgttgttacattttgattattttctccttttgatagcggcaggaggcagccaaatgcctggcagatagaagcttgtcccccatgaaaccccaccttcaagccaaaaaatagcctgaaggctgaaagaccggactgctggtcccagatgaaacccatgatccagagtgagaacttccattcctgtttgcctgccctctaaataatcccttttaaccaatcgaatgttgccttttccaatactacctatggcctgcccctcccccattctgagcccataaaagccctggaatcagccacattgggggcactttgccaacttcaggtagggggaccacctctgtatcccttctctgctgaaagctgttttcatcactcaatgaaactctcaccttgctccctctttgattgtcagcgtatcctcatttttcttgggtgtggtacaagaactcgggaaccagtgcacaagccagacttggtctgggcagcacgggttagtgggccatctcccacagcaggtagcatggccaagtgaggcctgggcagggcatcaccaaggtccctggcttgcaaagtgaccaaggaaaaaatcctgtgtcactttccttttctcatattttttagttattttcctaatgattgccttgaggatggcaattaacatcttacacttataagaagctagtttgaataatagttccaatagtacatgaacactctactcctatatatctccatccttcttcctttatattgttattcccacaaattatgtttttatacattatatcctcactaacataaacttattattattttctgcatttgccttttaaatcatacaggaaaacaagaatcacaaagaaaaactacattaatatttgctgttatatttacctatatagtgacatttaacagtgtatttttatgtcttcagatgtctttgaattactacttagtgtcttttcattttagcctcaatgtttccctttagcatttcctatagggcaggcctgccggtaattaattccctttggttttctttatctgaaatgtctaatttcttttttattcttgaagaatagttttgctggctataagattcttagttaatagtttttttcccagcacttcaattattattaaagtgttattattattattattattattttgagatggagtctccctctgtcactcaggctggagtgcagtggcgcaatctctgctcactgcaacctccgcctcccaggttcaagcaattctcctgcctcagcctcccgagttagctgggattacaggtgcccgccaccatgcccagctaatttttgtatttttagtagagacggggtttcaccatgttggtcaggctgatcttgaactcctgacctcaagtgatacacccaccttggcctcccaaagtgctgggattagaggcatgagccaccatgcctggtctaaagtgtaattattattacagctgccatttggcctccttggtttctaatgagaaatcatctgttaaacttattgcaaatccttggtatgtatgctatgtgtcatttctctcttgctgcttccaagattctctctctgtctttgtcttttgacaatttgactataatgtgtttcagtgtgaatttcttagagtttatcccacttggatttcattgagcttcttggatgtgtacgtttgtctttcaccaaatctgggaaattatttcaccatttctcaaatatctttttcttcccctttccatctctcttcttctggagctcccgtatacttagttggcatgactgatggtatcctactggtccctcaggttctgttcatttttcttctttctttttttctgctctgcagactggataacttcaatcgccttttcttcaagttcaatgattatttcttctgcctgctcaaattggccatttaacccctccagtgactttttcatttcagtattgtacttttcagatccagaatttctatttggttcctctttaataaattctttttattgtcattccccatctgttcatacattgctctcccaatttcctgtagttctttgtccatggttttctttagttaattaagcatatttaagacagttgacttaatgtctttgactagtaattccaatgtctaaaattccttatggatagcttcttttaaattatttttgtcctgttagagagtcatatcttcctctttatttgctttgtaatactttgttgaaaacttaacattttgagtagtaaaatgtggtaattctgaagccagattctccccctcctttgagattggttttgttgtttgttgagggctgcagttgtccatttgtatagtgacttttccaaacgatttttgcaaagtatgtattctctcttgtgtctggtcactgacgtttctgttctggtgcctctgcagtcagcctatgacctggaagagcattccttaaatgcatagatttttttaaaacccaagaaacaaaaaacctagcatgtatgtacctttttaaaaatcttctgatagatgccacctggaaggctgctgctgcctgaaggggcagaaacaaaggcaagctctactctgagccctcagggaaccaccagataaacaaaagaaatttgattctccaaatttctggaagacaaggtcctttctgcccactcctgctccagccagctgctctaggaacacaattactgtccacatggccacaggaatgttgaagaatgcaggatggtagctggtttgcccacaccactcacttatgagccatcagcatgcctctcccttcatcgagcactcccatggttgctgtaagtgtccaatcaggttccagaattctgaaagagttgactcttacaggatttttttcttttctaacttgctggttgtttagatagaggaaccaattcctgaagtttcctacgttgccagcttcatgaggatcattccctagtaactcttttcagacaaaaagcttcattgatttactgtaggactagcatcaaagagtctatgccacctagtctgtctccttaaaacacagaaataatcagtatgcattggggtaggagtttggcattagatctgccgtaaatcaagagctggggacagcccatgtcttaaactctgacccaagggctaaaatatcctttggtagcaacaacagctacaaactattgaacaacttgtatgtgccaagagccttacctgcattatcccattgaatcctctcaacagccctgtgaggtagtagaattgttgcctgccccttactgaggcctagaaacattaaggaatttgcccgaggccctagagccagtgagtggcaaagccagtctccagactcaggctggagatcctacagttctgtgttaccccagtgttatcctgcctctcagcacagagtcttggatgattctcctaacccctccctaggcaatgcacagggctgctccctgcacccttactcatgctctgctcttcaaccccaacagtgctggccttaggctttatccctgacacccagccccaggctccattccatctgttgacagaggcaaacactggggcaaaactgacctctgtggataccactgtgtccacctccaccagcttcagctgaagcctctgaacatctccagcatggaagaagccccaaaggatatttcctgtcccccagcatatgcttgaccctgaagccctccccatctagtcaagaagaccaaactgttaacaatcctggagtcagagtgacccatgggtgaatcttagccaagtcactcatagctgttgcatcctagtaaatcccttaactcccataggcttcagtttccctgcatataaaatgacagccttcagctcatcggccagtttcaatccatctaaagggtctagcacatcccctggcatgtggaagccacagggcacacactagttgtggtcatttgatcctggcatgctctgctgtctctcggctctccccttgcctctttccctgatgtcctggccatcagccactgcctaacaccctcccactcaccaggcccttagcctgccccttagcacaagagcacagccggtctcaagtctaccctgctgtaagcaaacacttgcaacatcatgctgacctccaggccctgttgcatcagcgtgcccacacttggtgcccagctggtactgagggtatcagggaacaggccagtggtggaagggcggacactttgggttccctggtttcctggctcccaatatctttcccaatggcatatggggtctagcagcttggctcatttaactgtgaacctctaccctttagaatctgggcctccaggcttgcttctgtgcaaaatggcagataaggctcaacctttctttttttaacttcattgttaaatattactccattaatacccatttactgcagaaaaggtaggaaatacagataagcaaaaaggaaaataaattaaaatcctcataccaccatcatcaagataattactgtcaccattttggtatatttcctcccaatacatatattatctatatcgtatatacgacaaaaatggatcatactatgtttcctgttcttcccctgtgttagtcatctattgctgtataacaaactgcctcaaaacttagtggcttcacctttccgtgtattatgatgacaagaatgtggtatgacactgtcttatatctggatcatatgctaaaagatagaaaatggtttctaaacttatttgttctgtaataacaaaattttatttcataaagtgtttttaaaaaaaaccatagtagcttgaaacaacaaacctttgttatctcacacagtttctgtaggtcaagaattcagaagcagcttagctgggtggtctggcttggtgtctctcctgaggtcagggttttggctggggctgcatcacctgaaggcttgactggggccagaggagctgcttccaaagtggtccactcacatggctggcaagttggagttgcgtattggcaagagacttcgcttcttctcaatggatcttcccagagttcttgtaggcaacctcatagcatagcagttggcttcccccagagggaacagtccaggagagaacaaggcagaaaccacagggtcttttctggcttaggctccaaagtcatactccaccatttctgcattatcatattagttacacaggctagacctattctgcatggaagagactataccatggggtgaataccagaagcagggctaattgaaggccagcttcaagggcggctacacattccctttcaacagtatgtcatgaacatctttccatgccaatagagcagatgaatcttaccatttttaatgactacatgtaagtgtagcataatttatttaaccaacctcctgtagttgggtatgtgggttgtgtctcgttttttgatagtagaattaatcatcttgaatatccatcaccaaacttgtcatattattttcttttgatgaatgaaaaagaaaatcaagtcatgtctgtcaatcagaaccctgagcaactaagaaatgggggtaccactgggacatagagcaaggtcccttctgattctgctcttgtctttctctccccatgaaatggggagttcactatctactgagacatcctagcccacagctgcacagttctgtctttttagaaagctctaagcagaaacaatgttcatccatcctcctcgggacagcccttgagctactgaagactctaagcatgtcctggtcatcctccatgagccatcatctctgaggccctccccttcttggcccctcttctctggacaggttctggacagtcttgcccttccaaaattcctggaaagcaggaactgttcctgctacaatgactctcaactccagtgcagtacagactgttggtgtcaccccttatcctgaagaagaggcactgagacaggacaagggtgggtgcccaggagggctggcatgagtcatgagaatctggtcccggagaattagacggtgtggggaagtaggggtgttgggccgctttctggcctcatggatgccaatgaatatcagcaggtggctcccagaaaggaactctaggggatgcctgttgctctaaatagaggctagagagggcactggcagttcagtcaaccaagaaagggggcccacttgcctcagcttcaggctttgtacacatcctcagcctttcttgagaactgaatttagattctcctcccctgtgctgtgtgcttggcccagaagaagggcaagtctcgctgggtggctgcttcttggcctggctgaaccagaaggccccagtgccactccaaacctgggtgtgagccctgcccccatgagcaaacagtagctcagagctgggggctgtgggggtcagtggcctgtcacatgagatctgatgaggccatctctgctctatattgggaaagggatcaattgtatcaagggctttcttgggagtgatcactctggccattggcgagagacctggcattctgacaaggcaccctccataccctgacccacttgccagctccagctaattttagcaggctttggcaggtgccagcaagtacatagcatgtggatgtcactcccaggtgagcccaaggagaggcctgggccagagcctggaagtcatggtctatgcccatggaggcacccaaagcaagcctgaggcctggactttgcagtcacaaaattaagaatgatacccctgttttttgtttgtttttgatcagttggccaccttcctccaccaccccttccccaagttccatacagacccctggattgtatgaaatgcaaatcgaacctctctgcagatgaaaatccactggggatccccttgcctccaagagcaagtccagacctgcaccagcgcgggccaggcccccttaggaccccctccctgtccaagggcatttcagtaagtgttctgtggccaaggcagcctggtgactttctgcccgcacaaggctgaggaatggaagatgggtaggctggctctgcacaccccctcctgctgggcagcaatccctaccccatgttcacagagtgtggccggctgccccatggctctgtccccgtggccctgtcaactgttacccacatggcctaccctccctttctgccctgcctctgaccccatggcagggggcagagtatttgagcagccgccaggctgagccctttcagtgcagaagccctgggctgccagcctcaggcagctctccatccaagcagccgttgctgccacaggcgggccttacgctccaaggctacagcatgtgctaggcctcagcaggcaggagcatctctgcctcccaaagcatctacctcttagcccctcggagagatggcgatggatgtcacaaggagccaggcccagacagccttgactctggtaagggtcacaccaaagttagggactttgcactgggagagcagcacccagggcagggcccttggttttgcagattaccaaaactaaggctgggggcagggaaggcgagcaggcttggggcaccttggaaggaggcacatgggccttgggggtcctggctagggcagctgtgcctgccactggccctctgcccaccacccctcctcactgtggctatccagtgtccagcctctcgaggggttctagggtacttattcctggagctaacggtgacccaggacaccagtgtccggggcctggcctggggcttttatggggggagctggctggctgcccagggctgtctggctctctgggggctctgcatggcatttccaggggttggtggatcagggattctgtccctcaggagaatgtgggcactagcccaaggccactcacttctgtgtacatagccacctgagggcccaggaatggagggggccaggctacagctggacatctggcactcggatgggctctggagcccccaggcctgcagcatctgcccagggactgccctggcccttggccatttcctcagggacccacagctccaccagccggcccctcccagtgctggaatagacagttcctcagtccacatctgccaaaggcggcactagaaggcatcctgccttttttactgcgttctggaggtggggtcacaaagcactgctcactgcataaaagggacagcatcctgcccctggcagccctgcctgaccagctccgcctctcccactgctatccaacctgtacaccctggtgaccatgtccaggccagtggccttaaggactgtctctgtactgatggctccacatctacctctccagccagactctcctctgaactcgggcctcacatggccaactgctacttggaacaaatcgccccttggctggcagatgtgttaacatgcccagaccaagatcccaactcccacaacccaactcccaggtcagatggaacctcttcttcccaggcccttctgttcctctcctcagcccctcccacctcccttcagaataagtctagactcttatcgctttcaccaagcctgcgcccagcatccctgcacagggattgttaggacagcctgacgccctgcttccaccctgccccaagatgcccctgctctgcagcccggcgcctccaggcttctcacctcctgctgctcacagctcagcctcactccctccctccccgcctctgctccagcctcagtgcaggtcccctgctcccatcttctggcagcagctgcccgacctggtccctcttcatctgtccccattccttcaccccccagcctgtccccaacttgactgaggttctttcctgcagatccccgcccttgagaggggttggtcccactgtcaactctgcttctgtgccctgtgccgcacctggcattcagtgagcatctgctgaagagatgagggtcagatgccctgcagggagtgtgggggcgtcctcaggcaagaaaagttgtacgtttggctgtgggccctgattatgtgtcctgtgacctcttgggtgaggtcagcaagagaaacctctgcaagctggctggggctgcctcccagaggctgccagggggagggacaggctctgtctgtgctcttcttccgaggctacacctggggcgccaggctctcagggctccccaggtaccaccacatttcctacactgcttgggaaagccctgtaagtttgcacagacacccagcatgaggctcgccagagagatacttgtagctggggtctgggcaccaggaacagcttggtgctgggcctgaagtcgggcaggatgcagcctggccaggtgagaggaaagcttggagccagtgcctgggttcaaactcctctgtggcctatggttctgtgggcttggggaagggtttgtacctctgtgtccagtttcctcacttataaaaaaaggagataataaaagtacccatgtcccagggtggctgtagcaataatagggaggggtgcccagagcaggtctggcacacaggaagtgtgcatcagcctcagtccctgccattgggcttgtcctgggagtctgtgaagccaacctctgctccacaatgtgacccccaggcttgtgagaccaagctgggtcagagcttcctcctctggggttgcaccaggaggggaacttctgcaggcccagatgcaccctgaggaaagggcttgttcccaccaagaacaaggctcacctttggaggatgctccccacatgagaggtgaacccccaggtctactggtgactgcagcctcggaagctgacagcatctatcctccaacccatgcccactgggaagtgtgtgaggggtcctcataggccctgcggtgtggacaatgcagagaccctgtagcatctggctagggcggggcccagataagagccctgtgccaggagagcctggccggttctgccactgtggggagacaggctcccccaccccatgtcccctgcttccctgcagcccacagagaatacagacctacttttacagaaatccagatttttgtgtaaaagtgtctctattttaagtagattttaagtggtggcagcaaatttaagcttttgagaatattatacagaacaaatcagattcacaggccagatgcaactttatttacagaaatgggatcaggtcctacctcaggtcccatctcacgttttcacttatgcctatacgtctccttcacgggaaaggccacaagaggccctgcggtaagtgtcccggtgttgatttaaagtccccaacagtgaatatgagggtcctcactgttgcagcaagaggatacccccctgtgtatcttggaaatgcctgcagccctcttgctgcagaacagattcttaggagagaaactgtcagatcaaagttaaacttagagaaactccaaattgccctctgaacagacggtatcagtttgacatcatccaataccgggattcctcggggagaactttctggcctagaaggcagtagagccaggacttcacccagtcagtggcagggccacacgtgggccttgatacagagggggaagacttgagcctcctcgacaccctacagggcccagcctcccaacatgtgataagagaaacaacagccaacttgtacctagctctccttattctccaagggctgggccagttctccccacagccctgcaagggaggatcactcaagggccccaactgtctgacaatacagccacactctgatcagccacctgggcataggctccatgccattgtcctccgccaagacctcagactgaaatgttggctcctcccatgaagaacctggggccaaaggaccagagtccaggtccgtggctgccaggatgggccacttggagagaggcacaagggtggtgccaggcaggtgtgagggctggacctttgcaagagcagcatcacttttgttgagagcccacaggtatcttataattgggtcctaggacttcctgccagtagccattgtgtgcatggatttgggtgctggcctcaccatggtgtgctggctgcccatgcctgcaataatgacttctgtaagcctttcttcatctgcaagatgggtgctgctggcacctcctccccggtgctgtggtgacagggcatagtgtgtgaggctgctatgtgaagcacctaatgcagggcctggcatatggaggaattcagcaaatgacagatgccttcacagttagttcctggcatcctctacattggtgggtgtaggaaagaaagacagaggaggcaaaagttgtagctgtggggcattgaggacagcctggattgttccacagagccctgaggacatctccaggggtgtgctctgcaggggcagctggattggagggttaggggtcggggagggcgtgcactcccacccatgctcacagcctcggaacagtgcctgctcagccaacatgggtgtttgattctgtgtcttttgtcacagactttatcagccccatccctttctgaccttgcctcagtttaaattttacatgtggggcctcattaagagacatggttcttaactaaagatctgtatccattaggaatgctttgggctgcaggaagacaaacacctgactcactgtggcataagtggtttgcgtctgctcccataagctgcacgtggagggtggatctggcattactctctcttccctacatttgcagtatgctaacagctttaacctccagccttgtttcttcatggttgcagggtggctatcacagcgctggccatcacatccttacacagctgtgtttacaaatttagggggacattgaagctcctcccctgctaaaatcaggcttcccttcacctgtcattggccagaactgggtgaaatgcccaactctagaccgatcatcagtaagaggagtatagaattgctgtgcccaccttagattaatcatggcgcaatgtgctccccataccaacaaaatctgagttctagaaactgaggaagaagaggaaaatggccgtcttgcctcctggctgggattcagagcatctccaaccctctgagcttatgtgtaagactgtgggcaaaagtgtgtgagtttttgtggaatggatccacggcttttatcagagcatctttcctttttctttttgattcaagatgaaaatattcttatgattatttttctcaccactgcccagagataaccagcacattaacatggccttttctccatgaatagcactagggtgcccagtggacagacacatagctgtccacacaccagcttgctggggatgcataggcagagtcacatctgcactcacggcctgtcctcacactgccatgtggagagccagcagccacaccatgggccgtccatgctcacgggagtggcagtatcagatctgagcttcgtgtgcccaggcgtctctcacatcagtgcatagggaccctctttgttctgtggcccagtgtgcccatgccacagatggcttcagtcagcagacacctccttctagacactcacactcactcctggctggcccttagcacacctgtgcagacaggcccatttattttcttgtgtaaatcccaagtaggaggactgggtctctctgacagcaatgccagctgcctggcaccctccagacaggtggctcaagccccacctcgccagctctcccagttagcccctcctttccctggctctgacctgagggacgaagcagggtgctacaggacgctgtgccacagggatatcgtcagggacagaagctactctgccctctgctgctcacccctccaacacgctgtgggctgcatttgttgagtggctggtaccagactctgctcttctgactttccagctggttttacctgtagtaaagtttgagaagatgggtcatcctgaccccggggtcagaagacagaaggaggcccatggcgtgtgggggagatgccccgtgaggccctcggtgtgcagatgcctggtgacagccccaccctgaggtccccagcctaccccctccccagcccgactgctcccatccccctccctgtgcaggtagagcagatcctggcagagttccagctgcaggaggaggacctgaagaaggtgatgagacggatgcagaaggagatggaccgcggcctgaggctggagacccatgaagaggccagtgtgaagatgctgcccacctacgtgcgctccaccccagaaggctcaggtaccacatggtaaccggctcctcatccagaagcagctgtgggctcagccctagctgggagaagcaccccaggcactcccagactcacagccagcccgagacagaatctcctggggagcaatgaagtcctcgacttgggccagttctcacccttggctcctctggtccggccctggggcactcgggctcaccctggagctggcaaacctcaggaaaactggcgttttaaatctcactcctggccaggtgcagtggctcacccctgtaacttcaacactttgggaggccaaagcaggcggatctcttgaggccaggagtttgagaccagcctgcccaacatggtgaaaccccgtctctactaaaaatacaaaaattatccaggcatggtggcacattcctgtagttccagctactcgggaggctgaggcataagaattgcttgaacccgggaggccgaggttgcagtgagccaaaatcgcgccactgcactccagcctggggtgacagggtgagacaccatctcaaaaaaaaaaaaaaaaaaagacctcactgctccccatgggcacttagggaactctcccagcccagttctgcagctgggccattgcactagatcctcagttggtccctgggctctcggtgactgtccagggcaggagtttcccattgacttttccctggttgacctttgaccccttccacagttgacactggtgtccccaggtgtctggtggccccttgtccagctcccttagtcccttgtgccttccctcctcctctttgtaatatccgggctcagtcacctggggcccacccagcccaaggccagcctgtgggtgtccctgaggctgacacacttctctctgtgcctttagaagtcggggacttcctctccctggacctgggtggcactaacttcagggtgatgctggtgaaggtgggagaaggtgaggaggggcagtggagcgtgaagaccaaacaccagatgtactccatccccgaggacgccatgaccggcactgctgagatggtgagcagcgcaggggccggggcagggggccaaggccatgcaggatctcagggcccagctagtcctgacgggaggtgccacctgtctaccaggggtggggagagcgggggctggaggaccacccagcctcagaggcagctggaggcctgggtgaacaggactggccaacatgtccccaagtcccacagtcaccatctggccagcattgagaggggaacgggctgaggaagagttagtggcaagaggaaccccagccagtcacaccttgtccagtttaccagaggaaaaaccaatgtgtaagaacagaaatgtgacccggcagccagtgcactgcccccctctccaaaggccacccctcaccctccaccagcatgcacagaaagtggggtgacagcaatcacaatgtctacccaggcagcaaggacccctgaccatggggaggactggggtgcagggaacatagaagcagaatgaggcctagggggagttgggcaaggccagagccctagctgcagccaagcacatggccaaggccagctcctggaagggcagggctccgaggcaggaggcaggaggctgcccgtggctacccgtcctcacacccctgcagcttgctagtctgtctgtgggctgggtgtgaatcaaggcagtgggatggtgtggggacctccctggccccagcagccagtgaggagcctggtcagtcagcagagcattcagcagtatccagttccatggagaggcccgtgtgaggggagtcggggctggtcttcagtaaggatgggtggccagggcccctagaagtagaaaaggagactccgggtgctggagacagaaatcaaggatgtgcctccatgtggagcctcaggaatagctggccaggcctgaggctgaacctcacaaggttcagctgggagggctaggctgacagagcacagccgggccagggaccagcctgccctgtgttgccttgtcccgagggccactgtcagcaggtctctggcatgggggaggcttagggcctgagcccaacaagcagcagcggaagaggagagggaaactgtggacaggcctggcattcagtggccaggtgttgcagtgtccctgaggaatagcttggcttgaggccgtggggagggctgccggccagcgcacccccccatgccagatggtcaccatggcgtgcatcttccagctcttcgactacatctctgagtgcatctccgacttcctggacaagcatcagatgaaacacaagaagctgcccctgggcttcaccttctcctttcctgtgaggcacgaagacatcgataaggtgggccgggtggaggggcagaaggcagatgaggggaggcacaggcaccccagaggaactctgccttcaaatgtagcccccataccatgtgctcagaagggagatctggattcaaattgtggccatgtcacctgccacctctaatgctgtggaaaagaagcatcacattagctaattctggctgtgcgccttgtgaggcaccagctatgatcaccccactccagtggaaagagcagctggcagtagggtggggctcaaactcaggcagccgggctctgggtcacctgcaggccacggtcatgtcacactgcctctagctgagtcagaaatgtgaaggaactgagattctacccttcctgcaagctagcaaagtggcctgccagttacatctgtgcatgcacacacacacacagttatatatgcacacacataaaacacgagacctttgggtcagggagaaagccagatcctcactcacggcagaagcagcagccaaagcaacatctcatgtggttttccaagccccagtccctacagagacagagagggccaggtggcacctgtgcatgcagcggggtaccttgcaggagggaaatcctgattttacacaaagctgctccccccacgccctgccttgactctgggatgacgtctcagagctgtgcagtacaacattcttaaattggctgggactcagccctgcagaaatatgatatcttcaaggagaatcgttcccaaaacctctcaaagctatggggctgctctgagcctgtttcctcagctgtaaagtagggtgcatacttttatggccctgtgcaggaggtagtgacaggccctagcaccctgcctccagtatatgttagcagccacgaggcctatctctccccacagggcatccttctcaactggaccaagggcttcaaggcctcaggagcagaagggaacaatgtcgtggggcttctgcgagacgctatcaaacggagaggggtgagggggcacctgtacctgccgggggggctgccctgggccacccaccccagcactgcctgcctttctccttggcttccagcactgcagcttctgtgcttcttggcaggactttgaaatggatgtggtggcaatggtgaatgacacggtggccacgatgatctcctgctactacgaagaccatcagtgcgaggtcggcatgatcgtgggtaagggctccttgcacccctgccccttccagactgctgaggctccctgtgtacaacaggcttcaagggccctgtggggtgaggaccaaactacttaacaaccggtgatgtcagagcagagcctggtgctacagcctgggtggtcttggggtatcaagatggaagcaccgtgtacagtaggaagcatttcaacgccatgatgccacattcctgcatcagatggtatgccagctgcatatccacctcacccatcaggattataattaaaacacttatctggtaaattgaccaactggacagattggtccaagtggaagaggataagcaaaagtggtaccatctccacccgaatggtctttccacgggcctgcccctgcccctgcccccacccaaagtgaaggcaggtaccaggaaagggagcagcagtccgcccctcccagcagaggggtcttccacaccaactcggacctttctcagaagttccggaggtcattataaccagccttcactgaggagcaatccaatcagatcagttatctgctgtgcgcacagccgtgtggttctatacttctcttacttccattttcacctttcagaaggaacgttgtctttaaatccagcatctaaacgtgagccccagccatccctggctgtgatccccccagccctttccaccctatcctctggaactgcctggggctccccaagacacttccacatgaattcccaccaagccaagctgcagctgctgggcccaggcataacccctcctggggcagaggtggcaaggagtgacccaccactcacatctgccccacatccactcttgactctgctcagtgtttaaaaacatgtttataacaattaccaagatctgaaaattaggagaattcacatcaaagtctggatttctgtttgttcataaaaaactagaaggcagccaggcaaggtggctcacgccagtaatcccaacactttgggaggctaaggcaggcgggtcacttgaggtcaggatttgaagactagctggccaacaaggtgtaacctcgtctctactaaaaatacaaaaattagctgggtgtgatggcgcatgcctgtaatcccaggtactcaggagactgaggcaggagaattgcttaaaccctggaggcagaggttgcagtgagccaagatcacgccactgcactccagcctgggtgatggagtgagtgagactctgtctccaaataaataaataaataaataaaaactggaagtctaagcatcactgagccctgattcctatgtggcagctcgactgaccagcatttgagttgctgtccctgacagctttgggggtgtgcagcccacacagtcatgctagcttgaggctctgctgtcagcagtttgaaactcttaataacttgtgaacaaaagactccatgttgtcactctgcacaggggccagcaaattacaaaattccatatccggaattgtctacaggagcctctgggctgctcccaagggcccacaccatgccttactcactttgggttgccatccaaacatgtctcatgacaaagaagctcaaacatgtgcatggacagtgccagaaaacaagggtcgtacatagacaaaataaaatgataacgtcccacaaccatttctttgatacacactgtttctctcagtcctcccaaccacctaggtaacaggcagggaaggtgttactgttgcctgttaggaaagaggacagccctgaaagctgtccctggccactgaagcaacccaggtcttccagccccagggagagccgcctttccattgttccagacaaagcagagacaggcatgggggagcgggagagggactcctgtgggcaggaaccaggccctactccggggcagtgcagctctcgctgacagtccccccgacctccaccccaggcacgggctgcaatgcctgctacatggaggagatgcagaatgtggagctggtggagggggacgagggccgcatgtgcgtcaataccgagtggggcgccttcggggactccggcgagctggacgagttcctgctggagtatgaccgcctggtggacgagagctctgcaaaccccggtcagcagctgtaaggatgcccccctcccccacaacccaggccctgggccgctctggtgcagcggcagatgggagccgggccattgcagataatgggcttgtttttaaacaactctggggaaaagcaaactgacaatccgttcgtaagctccatcccttctgctcagtcatgacctgcccctgtgagagatgaagggttagtcccagttgtgatgtgataagcccagacctctttccttccgacaggtgatcgtgcatgcagaggaggctctgagacgcccccagcaaggttcctgggtttaacccaacattccccaaagtatgtatttggccacattcacagaaagaatattagtcttttgtggaatgctgcgggttgacagtcacagcttggaaaccaacccacagagagctcatcattaatcatggctatcacttgtttaccacctactgtgccaggcctatgctaattactttattagcgtcctctctgccgctcgcaggcctctattattataggtcagtagtattcgatttatttaaattaaatacggaaggtcatagattaagcaagaaagtgccagcaacatggtgcgtgcctctgactgggcactaaccctccaagtcttagttttcccaaccataactggccaatgaacagcagctctggatgcagctaaaggaagactgaagctgtaggtcccgtgctcggcgcagggccccctgcaaggaaggtttcggagggactggatggggtctttgaactatctgtctttccctttactgcagtgggcccaggggcaggccaaagttgctcccgtgattgacttgaacgtgcacgttcctaatccctgacatttctaaagctctggctcattaacgagggaaagacgtgaaccagctgggggagtggggatcgcagtgccccacgtggccgcctcgtgacctcagtggggagcagtggggccggctcccggcttccacctgcatgaggggccctccctcgtgcctgctgatgtaatggacctgccctatgtccaggtatgagaagctcataggtggcaagtacatgggcgagctggtgcggcttgtgctgctcaggctcgtggacgaaaacctgctcttccacggggaggcctccgagcagctgcgcacacgcggagccttcgagacgcgcttcgtgtcgcaggtggagaggtgtgcggaggaggagggtgggtgcaaagggcaggggctggggacgcccgggcactgcagacttggtctcagggcgacgctgagtcccaggcccggggcgcagggatgggaaactagggcctggggcgggattccgggcgtgggcggggcccggggcggggcacagggggcgggggagtgggcggggcccgaggccgggcgctggaggcgagggcggggcagggacgggtccaagggcaggaggctgggacaggacggggatgcaaagggaggggcggggcccgagacggggaggagggggagggcccaaggggaggaggcggggtccggacggggatgccaagagcagggatgggagcgagcctgcgtccgggcactggtccccatccgtgagtcccctcggtgctccctgcccgccgtggccatcctctcacatcactcacaaccccaaggcgcggcatggttgacacccccacgttaggacggagaccctgggcttagttagagggggcagtactaaccagtccctggcggaaacgctttggctgggtgaggtgagcgggatcgcccccatttctccagagaggggtcccggctcagcgagggaaagaggccgccgctggggggacggctggccggggcccctccctggagaacgagaggccgccgctggagggggatggactgtcggagcgacactcagcgaccgccctacctcctcccgccccgcagcgacacgggcgaccgcaagcagatctacaacatcctgagcacgctggggctgcgaccctcgaccaccgactgcgacatcgtgcgccgcgcctgcgagagcgtgtctacgcgcgctgcgcacatgtgctcggcggggctggcgggcgtcatcaaccgcatgcgcgagagccgcagcgaggacgtaatgcgcatcactgtgggcgtggatggctccgtgtacaagctgcaccccaggtgagcccgccccgctctctccctggtaaagtggggcccaaaaagcgcgcgctccaaggttccttgcggttcccaagctccaagatttcgtagtcctcttctcgtcccccttggcctagatttgggggaagggtcgactgcgtgcagggcgcccggtaatgaatgtggaggatgaggtgggaggagggacggcagccctgcttctcttctgcccagcttcaaggagcggttccatgccagcgtgcgcaggctgacgcccagctgcgagatcaccttcatcgagtcggaggagggcagtggccggggcgcggccctggtctcggcggtggcctgtaagaaggcctgtatgctgggccagtgagagcagtggccgcaagcgcagggaggatgccacagccccacagcacccaggctccatggggaagtgctccccacacgtgctcgcagcctggcggggcaggaggcctggccttgtcaggacccaggccgcctgccataccgctggggaacagagcgggcctcttccctcagtttttcggtgggacagccccagggccctaacgggggtgcggcaggagcaggaacagagactctggaagccccccacctttctcgctggaatcaatttcccagaagggagttgctcactcaggactttgatgcatttccacactgtcagagctgttggcctcgcctgggcccaggctctgggaaggggtgccctctggatcctgctgtggcctcacttccctgggaactcatcctgtgtggggaggcagctccaacagcttgaccagacctagacctgggccaaaagggcagccaggggctgctcatcacccagtcctggccattttcttgcctgaggctcaagaggcccagggagcaatgggagggggctccatggaggaggtgtcccaagctttgaatacccccagagaccttttctctcccataccatcactgagtggcttgtgattctgggatggaccctcgcagcaggtgcaagagacagagcccccaagcctctgccccaaggggcccacaaaggggagaagggccagccctacatcttcagctcccatagcgctggctcaggaagaaaccccaagcagcattcagcacaccccaagggacaaccccatcatatgacatgccaccct

SEQ ID NO: 15585 - DNA, 46227 bp, Homo sapiens
actccacacctggctggagcaggaaatgccgagcggcgcctgagccccagggaagcaggctaggatgtgagagacacagtcacctgcagcctaattactcaaaagctgtccccaggtcacagaagggagaggacatttcccactgaatctgtctgaaggacactaagccccacagctcaacacaaccaggagagaaagcgctgaggacgccacccaagcgcccagcaatggccctgcctggagaacatccaggctcagtgaggaagggtccagaagggaatgcttgccgactcgttggagaacaatgaaaaggaggaaactgtgactgaacctcaaaccccaaaccagcccgaggagaaccacattctcccagggacccagggcgggccgtgacccctgcggcggagaagccttggatatttccacttcagaagcctactggggaaggctgaggggtcccagctccccacgctggctgctgtgcagatgctggacgacagagccaggatggaggccgccaagaaggagaaggtatctcgccctccattgggcattctgggagtgtttgcttgcctgtccccaacattccatggtttgtttgagcctcagaatctgattttatgcacaggctctttgagaagggtcttgccaggggtgccttctggggcaggaaggcccctactgcctggcagacccatccagctttggactctggtcctgcgacccggaagtcaggctgccaagaggtccaggcagtggcctccactggggaggggctctggagagtttagagccctagatgtgggggttagggacatgaggtcttgtggacaaagcccactacctgattttgagacaacactcactagacatggtgacaagtcaaagatgccttgcctcctaccaggaatcacttcgcagggagcccgagggctgctgtggcctgctgaggagtgcagggcagttactttttccaaaaacaaagagaaatccaggcatgctctgagccagccctgagcccagcagtgagcaaggagagagctggagacaggggactttgctgtgaaacactggggggaatgtgcctgcatcaccccagctgggggcccaggcagagtgggggagaaggggtaagtgggcagagccagtcactttgggcatgcttccctctcgcctctgtgtgaaatgaccaggtcagcataaaccccgggctggctgtgcttctggcagagctaatgatgttaggaggaaaacaaccaacccaagtgagagggtgcgcagccagacagctggaccggccgaggccccaaccaagtcccagatctgcctgtcactggtgctatggcagcaatttggatgagaaatcctgcccaaagggccccttcaggccacccggggagaaggaagcggctgtctttggcatgaccagaaagatggctcggagctagggagaggtggacatgtgggctgtggagatctggcactttccccaaacaaggagagaaagcatagtgtgcctatgtgtgaatgtgctatgtgtgcatgtttgtgcctgtgcatacctgcatgtgtacatgcatgtgcacatatgtgtgcacagggaatcactttaataaaggccacagcagagctgtccctgagccccttgcattcacagtggcatgtgagtgaaccaccttcttaggctgggcatccagtctcagactctggggctgcccatgccccatcctttatctgctccacgtgtgaggggttgctggtcctgaccagggccagctgtgaaccccagaatcctgggaagtcactgacattcttgtcagggccaagagtggagcaaggcaatgcctcgggcacaaactttaaggggtcaccagaaacatcaatcatcaagatatatgctattttaaataatcaaaatgaatgcaaaaaaaatttatgatggacaacataccaaattctaaacaaaggcaggatgagtatcactggcttctgcacttttctccacccagtctacccctcttctagtgcctggatcgcagggtgccaaggcctggatgagggaagcgtggagctgcaatggccactcctgtctgcctgttctggctgcacagaggactcagtccttgtcttgggggaacctatcttggttttagggtcatcctaaggatctgatgttttccaagtgagctggctgtccaggcccacccaggttcagtccagtcctgtgtctctgggaagtgctgcccctaccccaagccagtgtttgaccttggagcaatgagcaatgccctccttccactttcaaagttgtccccaagacgtcagctgtggttgtctctgtgcagacaccgaggaggaactgtcttctttctccttttggttgctttggaggaaagtaaagtgttgctggtttccctctttctacttctttgattgagagcagccgtcttgccggtaccaaccttccagatcttacctgtggttgcaggagcctgtggcctcagtcctgtgcccagtgacttctccatgtggatgtcagctccttaggggcaagcctgattccactgacactactcccacccctcataagccccttcttaccagctgcagttgcctggtaccccaccatcgctgactcattcctttggcatcaaggttcatcccttactgggccaccacttctgggtggcctgaaatagggccctgggcatccctcttggggaccttttggtctatattttcactctcacctcactaaggacagatgagtaaatctggttaactttgcctgatagatttggtgaccttttttcaggaaggagcctggaaagatgagattcaggtgtattggtcagcttagactgccataagagaataccatccactgatggcttagaaacaacagaaatctatttctcactattctagaggctggacgtccaagatcagatgccagcatggtcaggttgcagggagggctctcttcctgacttgcagaccgccaccttcttgctgtgtcctcacatcgtggagagagagtgaaaacaagctctctggtgtctcttcttataagaatgctaatcctatgatgggggctccccctccttacctcatctaaacctaattatctcccaaaggtctcatctccagataccatcacactggggttagggctttgacatatgaatctggggggacacaattcaatctgtaacaccaggagggcatgccgggaggaactgaccttcctccctccagctgccctggacacctttgccccattgaaggagcaggctcagaagtggaatgaggatggaataaggtgcactccatcatgcttacccacatccctggcaggaattgtcctgggccccagcaggagagatgcccccccatactgccatggcacctgctctgagacaggtgtgcagagtgcaaagctccaggtggcccccaagcaggtgtgctgggaggaggggcccgtgtgggaggagcaggcagcgccaaggcctagcggagcagtgacaggtccctgacttcagggaatgggcacgctgtgggcaggcagctggtgtgggggtgagggctggggctgcatctgtgggaccagggctgggccatccatcatatgccgtgtcacaaccccagtgcccctgctgtagccaggacaggaggctgggccaggctgggaggtgacaagagtgggggctgtccccaggagaagcactctgctgcctgtgcccaggcctctggggatgaggacccctcagaaggagtagctatgtctaggaagccccagggcaggagcaagccaaaggggacatcattagtgagatccaggggatcagtgggccacagaagccccagcgtgagcccctctgactgatgcagctaggcccacacctgcacctgcccacagcaagacccccaggaggagaggggacagatggagagaggcacaaagtgcccctggcctctgccttgaagccaccccaaggcaagagagatttgagcccctgtttagtgacctccaggggaacattctggcccatctgatgtgggaagccccttgtggagtctgtcattcctcagctgagccaggcctttggaggcagcccaggcatgtcccctgtgtgctcctatccctgtgttgggacacctggcccagcccctccttctgcctttctcttcccttcccttctcaggagtggacacttcctcctttagccccctcacagctgtgtgaacttctctgtatctctctctttctgtctctttctccccctctctctctgtctcattgtctctctgtgtgtctgtctgtagtattctctctctgtctctgtcactctgtctctctctctctctgtgtctacctttctgtatttcgctttgtttctttttctctgtgtgtgtgtgtgtgtatctgtttttctcactctctctctgtgtctatctttctgtatttcgctttgtttctttttctgtgtgtgtgtgtgtgtatatctgtttttctcactctctcaatctctctctctctttctgtctctcttttgctggcctgagcaaagagggagccccatcctgatgctacataaccgtgaaccagcacagacagaattgtaggaaagtcctgcaagtagaaggatagaaggatgagggaagaaacgccatgtgagtcatgacagatccctttccaggagccactgactcaccctgcctcctgccctcccactgtgacactattactcacagacaggcccggattaaacctatgttccaggtgccctgtggttcccacagtgtggctccctgggtctggcctcaggctccacaggtgcccagccctgccaaagtctccagagcagctgtccagctggggagctgcggggccccttcacagagcgcatgggaagaagttccatcctacacattacatcgagagggacgtgcctgagaaggggagctggagcccgtgcagccccctgcttgcgtgcagaacatagtgtaccctgagcatgccatgaaaaacacaaacgcacaaagttgtaaagaaaaaagaaatgacaggtggctgtaaaatcagttatagcccacgagaggcccactaatgagtggtgatttcagctgattacaaagaaatgatggtgtttctgtaatgaactaaacatgcactcgtgcgtgcacacacgcgcacgtatagtcacataactgaccagccctatgcatcacttgttaattacttagtaactgtaacaataatagtttccaataagtgagccttagtctctgcgcaagggtcagtttattgagcacacgggggccttgcagtgggggcaggtgatctgctcctgggagccgccagcctctcctctcctgctcttcatcttcctccgtggtgggaaattgtctcactgcttctacacctgaggctgaacatctccctttatttcagtctgaaacacatgtaaaaatatactggaatgaattaaggttgcaattattgatatcaggcagtgagtacatcagggtttattatactatctcctttacttacttcgaagttctctattaccaaaaaattaaaaactataaaagaaagaaaaaggaaatgaggctagattcaacacagattactcttaccaaacccttcgtagtcccaggagtcccctaacacaagcacttgtgacctggagtgatattcacagcattccttacctggcaatacctgagtattagcccccccagtgggatctttgttgtagacaaccagcaactatcagcccagccaataaacaagtaggaaaggggagtgctggagaggccaagaagtgggattttccatgctcctgggctgtgatccagagggcacggctgtgaggctgatctcaatgaacactctgtcttggaagtacagggatcctctgctacctgaaaacgttctgagtattcactttcatggattgcaaagtcatttacccaaaattcactctccaaatgaaaagtgagtatgatgaatcagtattcaagttccacctgggtcctgggagagggcatggacatcatatcccagctgttccgacaggaggacccaatctgagtctcactgcctgcctgcatcgtttgtctgctgccagcctgcacagtaggaagggaaaacatgatttgtatctgttttaggtcaggttcccaagaagtagagcctgagattggaattcttggaaaatggtgtttgcgggagcgctgtcagcagaagctataaggaagttggggggacagaaaacgagaggtaagaagccagtcaaaaaggcaggtccagcttaagtccgcctcagtctggttccacaagggctctgatgcatgaagaatatcacagggttgtccctcctgggagaggggccagcctattgtacctgtatcaaagccaccagctgagggccagtggggagggaagatcttccaggcatttccaggaaactctcaggagaagggtgtagctgtgagcagtctgcagctgctgctcactgcggctaaaggctgggtgtgcaggccagtcagccagtgaggtgccaacagcaggcactacagtccaccccttgactgctcagacctactgctttccactttaagctctctccatccaggcacagcttcagggaaaacttacaattggagaaacagagggatgaactacaatgcccacttctgcatgtgattgtaagactgtcactgatactcaccatcatgccccatccccaccatccattctagtgtccccttccccttggctaacactgctggtctaggtgacttccctagagcaggagccaaacccttatccctgaggcatctgaatcctggattcctttatcaggctattgttgttgtaagttgtccattcccaattacaactggacatgagactaccaagaaacaccctggcaaatcatctgagtgcaagccatattcttcctgctccattatgtagcggtagtcctacctcctaatgacaagggtaaattgccacattttgctccttgtgccaggatggtaatacctttctctacctgcttggctactggcacaaggaagcacagcatgaccaggaggcaattgtagctgtacatttagtgaatgtgttaatgtatcacctggtggaaggaccccctctgagaaccaggacttctagacccacaaaacctaaagttgtgaatggcggaagcacaaatttcccaagtggatcatggagagtgatgaagagttcttggttcccaaacccacatattttacctttcaggaacatggcctcatcccatagccattagagtgcatattgcattctggaggagactgggccctcctcatgggtgtcatcttcaagatgacagctccactgtgcctccaagaggatgctccaccaccctatctgtgattccttggttagcaggacaggctgctgcactgagggtaggaaaggcaagtccattgatggctggaatacatgtcaatccaagtcaagagaaaatgccgccctttccaggttggaaggggcccgatttagccaacttgtcacccagtagtggctggttggtctcctccaggagcagtgttataccaggaattcagcaccagtcgctattgctggcagttcttacattcaacagcagcaaaactaggtcagccttgatgagagggaatgtatgcttctgggcacaggcatggcttccttctctgactccatgactatctatttctgagtgcatggtggccgacattcagctgcctgcccatcctatccacttggttattattgcctcttccacaagaagtggtttctggctgtcattaatgtctcatactttgtgcccactcacacaggtttagctctacaacttttccccatgccaccacttttccacaatcttctaatgttgctccttccaagctactgaagaacgagctaagctattcaccaatgtccatgagtctatatttaccttaggccacatctctctccacacaaagtgaataagcaggtgcaccctccaaaactctactaagaggatttcttctccccagtgtctttcagggccaccttgagtggggctgaagtacagcagaagtccatttccagcttgcatcaacattccaaactaacctatccatgatcaatgcatagatgggtttttccctcctccagcagctagacaaaagacaccccccaccaggaggccatatttgcatgtgggtgaaagagaggcacaggggccaatattcgtgcaacagtggtagatggcaggtgggtctgggccacctgtccctgcagcttatctgtgccatctggacctgctcaagcctgattccagatataccatttccatcttatgatggatggcttatgacctagtgggtctgacagcaccaaactcataatgggcagttatggccacatggtcacttaatgtcctatggtcagacactctgctgagtggcatgccaggaaatgctttacaagtggtgtttggttctctgctgcagatggcatgaccttggtccggagccctaggggtttggacagtgactcctgttggggcctaatctcacattccatgcagagtatcatcagatttgccaatcacatagcctaagggtcaggactgatccaaccagtttttgcagagatcaaactggagaatgaaaggttgatatgatgtgaccatcatatcacgtttttctctcttgaaaagtatgcagatgtctgaaagagacaagtgccccaggagaaaatgcatgccttcctcaggatcggcccccacctcccctcctggccacaaggagggtcaaatctcagcatggcccaacttggacctgtcaaggaagaagaaaaaaattgtatgccaaaggaactcagtctttggctaacaagtactagacatcctttaagtctttgagaatggtaataatttctgccatccctccagatttgtgtttttctgttttggctgggtgggaatgcagcattttcactttgcctttgttattacaaatgttgcttattctataaatcaaggaaccattgtaagggctcttctgatggttaagtatatccattccaatgatttattcgggatccaaggaaatgatttctgggtgaatacacagaactagtggatccaatttgagacatacctgggccagaactatatttgtcgtcttaccccaataagcctgcactctactaggacagccatgacagcactttgggaccctagatataagtgtgaattgctggctgggcatggtggctcacgcctgtaatcccagcattttgggaggctgaggcaggtagatcacctgaggtcaggagttgaagaccagcctggccaacacggtgaaaccccatctctactaaaaaatacaaaaattagctgggcgtggtggtgggtgcctgtaatcccagctactcgggaggctgaggcagggagaattgcttgaacccaggaggcggaggttgcagtgagccaaaatcacaccactgcactccagcctgggtgacagagcgagattccatctcaaaaaaagaaaaaaaaaagtgtgaattgctatgaaatcactatcaaaagatctgagtgttacccttactcagtgtggtcgaatataaatagccataggttcctgttatacacacttgctgtggtgctacagagtctttcctcatgggaacccagtccctctttcagtcaatgggttctggttcgagaactggctgaggtttggaaactgtgcctttccatcataactttccactggggtgactgaccttggccttctgttcatcctttctagcccctaagaatccaacactctattagccttctccttagacccctataagctaatcccttctagttgttagtctgaccttggtgcccaatatgataattattcccactttgcttctgatatgcttctaagtgctgcccctggtctctgcccttaagtgatctatcatccccactgccattagggggagaagctctgaaaaagagttgtctcccatcaactctggtctacaaaggacagccctactgagcctcagccatgtgcccgacaccagcagattctttacagcctgggaagcagagtgtcttccctgcctttccagggaacatagccagcttacaggctttttgatcttatagagtaggtcagttatattttgccccatttcttttatccttttgatcacttcctcttggcccaccatgtaaactcaagcatccctgcttcatttaatcgagctgttgctttttctaagctaccaagagcaaccccagcaatatatcagagccctctcttgggacccttgctagggtgttaaatcctgcatcataggagaatgcccccacatcagcaaagtccccttatcctcttgatatcccacctgccccagtccagcaccttcaggatctggtctcaatcacaggatccagcacctttgggactgttgcaagcataagatccagcacttttgggatctagtctcccacttcctgctagtacttgttagccaaagactgagttcctttggcatacaatttttttcttcttccttgacaggtccaagttgggccatgctgagatttgaccctccttgtggccaggaggggaggtaggggccgatcctgaggaaggcactcattttctcctggggcacttgtctctttcagacatctgcatacttttcaagagagaaaaggcctccttctcacagcaagactacttctgtagatgcaggtggctcgtgggaatctggcaattcaaaattctcaagtgtactcactagcacattagaaaaccagtagtacacatctctttccaaatcttcattcagtgacactatgtcagtagctggaaatgggccatggtgggtgtatttaaaccatgaaaatcagaaaatgctacaaaccagggcatcccgcatctctagacagcagattgttggccatttcccagcataccattgtgtatactccttcccatcagggccgtggcttgccttggtggaggactcagcccttgctgaagttctgctactgctcttacaattgagtcctatgcctggtctccagctctgcctgcctcactacaggagacaagcatctctttgaacactgccgagaagaccctctggctctcaggcttggctttaaatcgatagacctgagcctgccattttctcttttccatgcatcactccactgatccacaggtctcagtggcatagtccttcgggttagcatctcccccacaccctcggtgccagagacactgagtaagaaagtacctccctgtctacccccatccccgctccccacaggcagggccttggcgatccactgctgcaatgtgccagagactgtcagtactcctaccaccagtgaggtggcaaccagctgggaagtgatccaactccagagtcccgccctcataggctgatttctaggaccacccctggtatactgtgttaggttcttgaagcagagcctgagataaggattctggcacctgtgattgagtgggagggtgctctcaggatgagatggggtagaaataggcaaaggtacagattcagcagcagttgagcctcagtctgacccagcagggagctctcaaatgtgaatgacatcacagagttgtccctctgaggcaggggccagcctttgtgctcctacatgagtcagtcactggctggaggcccctggggaaaggctagggctgccagctttagcaaataaaaaattagggcactcagttaaattgaatttcagataaacaacaaattattttttagtatatgtcccaaattgtgcataacataatgtgttttctccgccagccctgggaagggcgtaacttcccaggtatttctaggtgaagtaactttgtagatcaggagtaagtcccaggaaagaagtccagctcttctcttcagccctgggcagctgggggtaggcacaggggcccagcaggcacccatagcatctcctacagcatctgaaatgaacagggtcatcacgtactacatacaaatgtacccactgctgagttcttcagggattatatcattaggtacttggtattttaaatacattacattatgcagaagtcctttgtggattgctatatttggagagttttgtgatattggggggattagatggagttttcagatgggcatcatacggtttttcatttaaaaccctagagtattgtaatcctagggagtgatcctgcgattagtaaattagctctccaatagattttcaatgtggttgcaaaggacatgcatgtggttcaccctcccaggaaatccagaagggcagcattggcctgagtggcctgagtttggctggttgggctggtaatgctggacaaagacaatgggtggaatggtttgcttccctcagtcctttcagacacagcccagcccaccacgtcaagccagtgggtgcatctgcaaccaatccccatgagaactgcagcctctcagaggtgggcaagttggcccgggtgggtcaggaggatcagatgttgaggaaatctttggattggaggcaggcagagcagggaagcatcgggtgattctatgacagacccagggctccaagctgcagttcaggaggggcactggcacggcctctgctcaactcccccttgagtgacatcaggtgaagtgccgacaacacagaaggcagcaaatgctgccagtcaggtctgcttcccaggacagccagttgctaacccttctccagcacagcactggattttggtcacctggctgggagctccacctccccagctgctgcctcacctgcttttccaaaccccaccctgtaaacggtaactacattttgtgcccactacgcctcgtttccatctctttggagcacctctcacgtggagctgaacagaacgacctgttaagcccaccgtgtctgttagggttgtctaggctgtatcagatacccaactaaaactggattcaccaacaggtattgtcaaagcacataagaaagagtccagaggcaggcagctctcagcctggtgtcaggctctgggtcagctttccagattctcttaaccttccccacatctgccagatgccgccacaggcacaggaggtacaaacaaacccaaaaatgttctggaaacaagaagggaaggggatccccaccatatctccccagaggccttccttctcacatctcactgtactgaagccagctctagcagaagacagcagggtgaatttgtccagggtattcagcccccagtgctgggtccattactacttgacccctgaataaaacagaggttccatgagcaagaaggaaggggaactggatgttagagggcaagaatgtatccatcccacccctaggagcacgcatggacaactgccccatttttgctcctattgcagcccaggggctagcccagagaccttgccagtgctgagtcacaagatgctgggaaagtgagaccagagcctggtcttggggaacagctcaaggccgcattggtctgcaggtcatagagcagctgctgagcagtgagagcccacgatgggccaggccctgggtcttggagacctgaatgagatagactgggttcctgttctcctgggcattgcctcttagagggcaaagacaattaacaataaacaaatagaacatgaagtgttttccgatagtgactgatatactttggatatttgtcctctccaaatctcatgttgaaatgtaattccttatgttggaggtggggcctggaaggaggtgtctgggtcatgggggcagatccctcatgaatggtttagtgccatccccttggtgatgagtgagttcacgtgagagctggttgtttgaaagagcctggccccctctcattctcctgctcccactcttgcatgagacacctgctcccccttctccttctgccatgattttaagattccagggacttcacaagaagcaaatgctaacgccatgcttcttgttctgtctgcaaaactgtaagccaattaaacctcttttctttgtaatttatccagtcttgggtatttctttataacagcacaagaacagcctaatacagtgatgctctccaagtgacctttgggctgagacctgaagaagaaggggaagcagttaggtctgatagctcatgcctgtaatcccagctctttaggaggctgaagtgggaggactgcttgagcctaggagttgaagaccagcttggaaaacatagcaagaccctggctctacaaaaatattttttaattggccaggtgtggtggtgcacacctgtagtcccacctacttggaaggctgaggcaggagcatctcttgagcccaggaggttgagactgcagtgagtcatgttcacaccactgcactccagcttgggtgacagagcaagacctgtctcgaaaaagaagaaagaagaaagtaggaagaagaagaagaagaagaagaagaagaagaagaagaagaagaagaagaagaagaagaagaagaagaggaagaggaacaagaacaagaagaagaacaagaagaacaagaagaagaacaaggagaacaagaagaagaataagaagaagaaggagaagaagaagaaggagaggaagaagaagaagaggaagaggaggaagaggaggaggaggaagatgaggaggaggaagcagaagcagaagaaaaagaaagaaaagaaagaaagagaaagaaagaaaagggaaggagggaaggaaggaaggaaggaaaaagggaaggaaagggaaggagagggagagggagaaggaagaacaaagaagaaagaaggagaagcagaggcttgtgctggatagccttgcttttgccaatgaccttgctgattttcagggggtcctggtgtcttagtccatttgtgttgctgtaaaggcatacctgaggctggataatttacagagaaaagaggtttatttggctgagagttctgcaggctctacaagaagcatggcaccaatgcctacttctgatgagggcctcagtctgcttccactcatggcagaaggtgaagcagagcctgcatgtgcagatatcacatggtgagagaggaagcacgagggggcagggaggtgccagcctcttcctaatagtaagctgtcttgagaactaatagagtaagaaataactcacaccctgcccccaaggaagggcattaatctattcatgaagtatctgcccccatgacccaaacatctcccattaggccccccacctccaacattgaggatcaaatttcaacatgaggttccggtgggcaaacatccagctataatactgggcaatgctgaccagactcttcccctctcaggcccagagctccttggccctgtaacaacagaaaattgcgtttgagtgtcaagatttttcctttagtccccatgcagctccttagaatgaggtggcatcttctcccttttcataggtgaagaaacagaagctctggaggaacgaatcattcatccaaggtcaggtagctagtaagcgtcccaccagctccccagatctcctgtttcctgtcccaagtcccactgagtgagctggaacaatggcttcactggcacctgccgggaatggtggcaggtgcctataatcccagctactcgggaggctgaggcatgagaatcacttgaacccgggaggcagaggttgcagcgagccaagatcacaccactgcactccagcctggataacaaacggagattccatttaaaaaaattaacatataatatacatacagtaacattcactttttaagtgtacagtttgatgagttttatcaaatgtatatggttatataaccaccatcaccattaaggcagaatcttcccatcactcaaataattccctcagccccacctcttgctgtcaatcacttctcccaccctagccactggaaatcattcatctgttttctgtccccttggttttgccttttctagaatgttctatacatgagaccactgagaatatagtcttctgtgtctggcttctttcacttaacataatgcctagctcagcagtgtgtcaatcctccctcccttgccattgctgagcagtgagtattccactgtatggctgtgctacggtgtgttcatccatttattcattcaccagctaatgggcatttggattgtttccaggctttggctatgatgagtgaagctgctgtgaatgttcaagtacaagtctttgtgtagacaggggttttcaattggcgggataaatacctaggagtagtatcgtgtggttaagcgtacgtttaaacttagaaaaactgtcaaactgttttccaatgtggcctgtaccatgttgcatttccatcagcagtgtttgagaattccaattgctccacatcctcctcccgacacttggtttcacccatcttttaaatattagccactctggtgactgtgtagtgatatgtcagtgtggttgtaatttgcatttctatgattgactaataataatgttgcagatatttctgtatgcttagtgggcatttttggtgagtttttaaaaattgggttgttgtcaccgtcttattgagttggaagaattctttatatgttctggatgtttattcatgtgtgtgtctgctaagaggtgagactggttctaccctggtcctaacaagcaccctgggcctgcatccctttttgtgtctgtgagctgggtctgcagccctctcctcccactacctactgcccagcagtacccctcacccatcactgtggctcctgcaatgacatctcagcctgtctctccctccctccagctagccagaggcaggatggctcagtgacacagggtgggccctgaagacagagtgccagggtttggaccttgtattagcaagagtcacaagggaaacttactttatctctccatagctctgttgtgaggatccaataaattaatccatagaagagcttaggacagcacctggcacaaagtatacatgagctattatgatgttattcttccaacccattgtttctgtgttgtcataaacatgaatgcaggactcagtgtcccagctctgtgtccctcgcatacattccctaacagcccacaggtcttgcctgtcaccgcctcattcaataagtgatgactctgcctcttccttggctggggccttgcattggacatttctgtatccatatttgttttttaaaaactagctgttggccgggcgcggtggctcacatctctaatcccagcacttgggaggcagagacaggtggatcatgaggtcaggagttcaaggccagcctggccaacatggtgaaaccccatctgtacaaaaaatacgaaaattagctgggcgtggtggcatgcacctgtaatcccagctacttgggaggctgaagcaggagaatcgcttgaacctgggaggcagaggttgtagtgagccaatatagcgccactgcactccagcctgggcaacacagcaaaactccatctcaaaaaaaaaaaaaacaaaaaacaacctagctggacttgacactcttgttagaggaagatttttccacatctgttaacttttcttctattgttatccatctgtgcaggtttttctgtcctcctgagtcattttgataatttatattatattttgaaaatcatccatttcctatagttgtttattagtgtcttctctgttatatttgatcagattaccaaatcttgctcattgattgcccatttattttattgtgtttatttttttgagacagggtctcactcgacagcccaggctgaagtgcagtggtgcaatcatggctcactgcagccttgacctcctgggctcaagcaattctcccacctcagcctcctgagtagctgggacctcaggcacacgccaccacagctggctaatattttatttatttatttatttatttatttttgtagagatggggtctcactatgttgcccaggctggtttcaaactccttggttcaagtgatcctcctgcctcagcttcccaaagtactgggattacaggagtgagccaccatgcccagcccctatttactttatagtaagtgccttcatgggcataaatgttcctctgagacagctttggctattagccatacttttaatattttgtacattcatggttattcatttataaatggtctgtaatgcaatgcagatttcccctttggcccaaatgccatttacagcagcacttttctctttctgagcagacagaatattttggtttcccctctgttgtttatttctcgtctgcctcgcctcatttgctaggtgttcccttggtgtgccttaagtatgagccactcaaatatttgtgtttctctaaacacccctgacactgtcctgctggtttctctatctggaatatccttcccttcttggccagttccccctagtgcatcaaagaaatcctgctcttttgccttcagaaaacaaaacaaaacgaaacctatcagtctccttatgtccccaaagacatagctttgctggtatctggttgtattgagctgttcatttgtctcttctgctagatggtaagctccttggaaactaaaaactaatcacttttctaacttcagactgagcacaaattaggttctcaagaaacattgaataatgagtgatccggtatccccttccaacatatttttggtcattgataccatcattctgagtagttactagggaacacttcactgcagtaaccaatacagcaaaacgtgaaatacagttacatagtagaattgtatttcttgcccatataatagtcaagtgcagttcttcatcagctgggaggttctcctccacacagtcatttaggaatccagggaacatagcagaggttgctagctctagacccaaacccatgtcctctttgtccacagtgaggacaatgccagcaacagctggccagctgttctgtagttctcagcctccctcgcagtgagatgtctccatgcaatttcagtggagcaacatataccatttccatttccaggtgtaggctcctaagaagagggtggcttcttcatgttctttctcacctttccgtaggctagctgcagataatgatgaggctttagggagtgggtggagccataaagtagaagcctggattcctaaatgacggtgtgaagtgttccctaatttcacgtaattgtttcttaatttcctgtttgggttatttgttgctaaggtataaaaaaaccctgatttttgtgtgttgatatttgtgtgctgcaactttgctgaattagcttattagctcaatttgatctcagatattagctcaaatattttgggagattatttatggttatctacataagatcatgtcatctgaaataaagatagttctatttccttctttctatcttagtccatttgggctgctgtaacaaaatgccataaattggaggctgagaagtccaagatcaaggcccaagctaattcactgtctgatgaaggcctgctttctggttcatacatggcaccttctagctgtgtcctcacatggtggaaaaggcaaggtagctctctgggattcctttttgtttgtttgtttgttttgttgtttttgtttgattttttgagacagagtctcactctgtcaccaggctggagtgcagtggcacaatctcggctcattgcaacctctgactccctggttcaaacgattctcctgcctcagcctcctgagtagctgggattacaggtacccatcaccatgtccagctactttttgtatttttagtagagacagggtttcaccatgttggccaggatggtctcgatctcttgacctcgtgatctgcccaccttggcctcccaaagtgctgggattacaggcatgagccaccgtgcctgtcctccggtattctttttataagggctctttttctttttatgtgggctctaccctcatgacctagcaccttctaaggccccacctcttaatatcatcacacagcagatttaatatatgaattttgaggggacacattctttccatagcactttccagtatggataccttttatttatttttcttccctaattgctttggttagaaatgtcttccctaattgctccactactatgttgaaaagaagtggcaaaagtgggtattcttgtcttgctcctctcttaggaagaaagtttaagtcttttgccattaaatatgacgttagctatggggttttcatatatgacatttatcatgttgaggaaattttcttcttgtttcaatgatgacagggtgttgagttttgtcagatgctttttctgcatcaatcaatatgaccatgtagtttctttgttttattccattattgtagtacattacattaatttttgcatgttgaactattcttgtgttcctgggataaatttcacttggttatggtgtataatccataaccataacctgaagatatgctgaagaggctaagtgccatggctcatgcctgtaattccaacactttgggaggctggtgtgggaggatcacctgaaatcaggagttttagaagagcctgggcaagtaaacaagatcccatctctacaaaaaattgaaaattaccgctgggcatggtggctcacgcctgtaatcccagcactttgggtggccgaggcaggcagatcacctgaggtcgggagttctagaccagcctgaccaacatagaaaaaccccgtctctactgaaaatacagaattagccaggcgtggtggcacatgcctgtaatcccagctactcaggaggctgaggcaggaaaatcacttgaacctgggagacggaggttgcagcgagccaagatcatgccattgcactccagcctgggcaacaagagcaaatctccgtctcaaaaaaaaaaaaaagaaaagaaagaaagaaagaaaagaaaagaaagaaaattagcttgatgtggtggttgtgcacctttagtcctagctactcaggaggctgaggcaggaggattgtttgagcccaggaggttgaggctgcagtgagccatgattgcaccactgcactccagcctgagcaacaaagtaagacctcatcactaaaaacaaattttttaatactgaagaattttatttgctggtattttgttgaggattttgcatctatattcacaagaaatattactctgtagtttttcttcttgtagtatctttgtctggtttcagtatcaaggcaatgctggcctcatgagatcaatcaggaagtgttacttcctcttttattttttggaagaatttgagagaattggtgttaattcttctttaaatggttggtagaattaccagtgtagacatctggtcctgggattttctttgttgggaggttttttagtactaattccatttccttacttgttattagtctaatgagattttctgtttcttcttgagctagttgtagtagctcatgtgtggaatttttctatttcatctaagttatccaagtttacctaagttaaagttccattttatctaacttgggtaagccaacaaacaatactaaattgttcatagtattctctcatagtcctttttttctctaaagtcagtaataacgttcactctttcattttttcattcctgattttaataatctgagttctttctctccccctccctgcaattgagagtcatttaaaagtgtcttgattaaattttatatatctgtgagttttccagttttccctctgttattctcttctagttttatttcatgtgatccaaaaagatactttatatgatttcaatttttttacatttactaagacttgttttgtgactaaaatatccttgagaatttccatgcacatttgagaaaaatgcacattctgctgttgttggacagagtgttctgtatatgtctgttaggtctaattggtttagagtattgttctagtcctctctttccttattgatcttctgtctagttgtttaatccattattcaaagtagtggccgggcacggtggctcacacctgtaatcccagcactttgggaggccgaggagggtggatcacaatgtcaggaggttgagaccagcctggccaacatggtgaaactccgtctctactgaaaatacaaaaaatttgctggacatggtggcacacgcctgtaatcccagctactcaggaggccaaggcaggagaatcacttgaacccaggaggcagaagttgcagtgagctgagatcgcaccattgcactgcagcctgggcaacagagcaagactctgtctcgagaaacaacaaaaacaaaaacaaaaaacaaagtagtgtactaaagtctccaactactattgtagaactctatttctcccttcaatgttgcaaaattttgtttcatgtattttggtgttctgttctttataatttttatatcttcttaatggatgaaaacttttatcaacatataatgttctttgtctcttgagacttttttttttaacttaaaatctatttgggctgataatacagccaccacaactctcatattggttgttattttcatagaatatcttcttccatccttctactttaaaattcttctatctttatatctaaagtgagcctcttgtagatagcatataggtggataatgttctctttattcactctgccaatatctgccttttaactggagtttaatctatttatatataaaataattactgattaggaaggacttacttctaccactcagctattttttttctgtgtgtcttatacatttttaagtttctcaattcctccattactggatttttttttttacttcttgattttgtgtctgtgttgttacattttgattattttctccttttgatagcggcaggaggcagccaaatgcctggcagatagaagcttgtcccccatgaaaccccaccttcaagccaaaaaatagcctgaaggctgaaagaccggactgctggtcccagatgaaacccatgatccagagtgagaacttccattcctgtttgcctgccctctaaataatcccttttaaccaatcgaatgttgccttttccaatactacctatggcctgcccctcccccattctgagcccataaaagccctggaatcagccacattgggggcactttgccaacttcaggtagggggaccacctctgtatcccttctctgctgaaagctgttttcatcactcaatgaaactctcaccttgctccctctttgattgtcagcgtatcctcatttttcttgggtgtggtacaagaactcgggaaccagtgcacaagccagacttggtctgggcagcacgggttagtgggccatctcccacagcaggtagcatggccaagtgaggcctgggcagggcatcaccaaggtccctggcttgcaaagtgaccaaggaaaaaatcctgtgtcactttccttttctcatattttttagttattttcctaatgattgccttgaggatggcaattaacatcttacacttataagaagctagtttgaataatagttccaatagtacatgaacactctactcctatatatctccatccttcttcctttatattgttattcccacaaattatgtttttatacattatatcctcactaacataaacttattattattttctgcatttgccttttaaatcatacaggaaaacaagaatcacaaagaaaaactacattaatatttgctgttatatttacctatatagtgacatttaacagtgtatttttatgtcttcagatgtctttgaattactacttagtgtcttttcattttagcctcaatgtttccctttagcatttcctatagggcaggcctgccggtaattaattccctttggttttctttatctgaaatgtctaatttcttttttattcttgaagaatagttttgctggctataagattcttagttaatagtttttttcccagcacttcaattattattaaagtgttattattattattattattattttgagatggagtctccctctgtcactcaggctggagtgcagtggcgcaatctctgctcactgcaacctccgcctcccaggttcaagcaattctcctgcctcagcctcccgagttagctgggattacaggtgcccgccaccatgcccagctaatttttgtatttttagtagagacggggtttcaccatgttggtcaggctgatcttgaactcctgacctcaagtgatacacccaccttggcctcccaaagtgctgggattagaggcatgagccaccatgcctggtctaaagtgtaattattattacagctgccatttggcctccttggtttctaatgagaaatcatctgttaaacttattgcaaatccttggtatgtatgctatgtgtcatttctctcttgctgcttccaagattctctctctgtctttgtcttttgacaatttgactataatgtgtttcagtgtgaatttcttagagtttatcccacttggatttcattgagcttcttggatgtgtacgtttgtctttcaccaaatctgggaaattatttcaccatttctcaaatatctttttcttcccctttccatctctcttcttctggagctcccgtatacttagttggcatgactgatggtatcctactggtccctcaggttctgttcatttttcttctttctttttttctgctctgcagactggataacttcaatcgccttttcttcaagttcaatgattatttcttctgcctgctcaaattggccatttaacccctccagtgactttttcatttcagtattgtacttttcagatccagaatttctatttggttcctctttaataaattctttttattgtcattccccatctgttcatacattgctctcccaatttcctgtagttctttgtccatggttttctttagttaattaagcatatttaagacagttgacttaatgtctttgactagtaattccaatgtctaaaattccttatggatagcttcttttaaattatttttgtcctgttagagagtcatatcttcctctttatttgctttgtaatactttgttgaaaacttaacattttgagtagtaaaatgtggtaattctgaagccagattctccccctcctttgagattggttttgttgtttgttgagggctgcagttgtccatttgtatagtgacttttccaaacgatttttgcaaagtatgtattctctcttgtgtctggtcactgacgtttctgttctggtgcctctgcagtcagcctatgacctggaagagcattccttaaatgcatagatttttttaaaacccaagaaacaaaaaacctagcatgtatgtacctttttaaaaatcttctgatagatgccacctggaaggctgctgctgcctgaaggggcagaaacaaaggcaagctctactctgagccctcagggaaccaccagataaacaaaagaaatttgattctccaaatttctggaagacaaggtcctttctgcccactcctgctccagccagctgctctaggaacacaattactgtccacatggccacaggaatgttgaagaatgcaggatggtagctggtttgcccacaccactcacttatgagccatcagcatgcctctcccttcatcgagcactcccatggttgctgtaagtgtccaatcaggttccagaattctgaaagagttgactcttacaggatttttttcttttctaacttgctggttgtttagatagaggaaccaattcctgaagtttcctacgttgccagcttcatgaggatcattccctagtaactcttttcagacaaaaagcttcattgatttactgtaggactagcatcaaagagtctatgccacctagtctgtctccttaaaacacagaaataatcagtatgcattggggtaggagtttggcattagatctgccgtaaatcaagagctggggacagcccatgtcttaaactctgacccaagggctaaaatatcctttggtagcaacaacagctacaaactattgaacaacttgtatgtgccaagagccttacctgcattatcccattgaatcctctcaacagccctgtgaggtagtagaattgttgcctgccccttactgaggcctagaaacattaaggaatttgcccgaggccctagagccagtgagtggcaaagccagtctccagactcaggctggagatcctacagttctgtgttaccccagtgttatcctgcctctcagcacagagtcttggatgattctcctaacccctccctaggcaatgcacagggctgctccctgcacccttactcatgctctgctcttcaaccccaacagtgctggccttaggctttatccctgacacccagccccaggctccattccatctgttgacagaggcaaacactggggcaaaactgacctctgtggataccactgtgtccacctccaccagcttcagctgaagcctctgaacatctccagcatggaagaagccccaaaggatatttcctgtcccccagcatatgcttgaccctgaagccctccccatctagtcaagaagaccaaactgttaacaatcctggagtcagagtgacccatgggtgaatcttagccaagtcactcatagctgttgcatcctagtaaatcccttaactcccataggcttcagtttccctgcatataaaatgacagccttcagctcatcggccagtttcaatccatctaaagggtctagcacatcccctggcatgtggaagccacagggcacacactagttgtggtcatttgatcctggcatgctctgctgtctctcggctctccccttgcctctttccctgatgtcctggccatcagccactgcctaacaccctcccactcaccaggcccttagcctgccccttagcacaagagcacagccggtctcaagtctaccctgctgtaagcaaacacttgcaacatcatgctgacctccaggccctgttgcatcagcgtgcccacacttggtgcccagctggtactgagggtatcagggaacaggccagtggtggaagggcggacactttgggttccctggtttcctggctcccaatatctttcccaatggcatatggggtctagcagcttggctcatttaactgtgaacctctaccctttagaatctgggcctccaggcttgcttctgtgcaaaatggcagataaggctcaacctttctttttttaacttcattgttaaatattactccattaatacccatttactgcagaaaaggtaggaaatacagataagcaaaaaggaaaataaattaaaatcctcataccaccatcatcaagataattactgtcaccattttggtatatttcctcccaatacatatattatctatatcgtatatacgacaaaaatggatcatactatgtttcctgttcttcccctgtgttagtcatctattgctgtataacaaactgcctcaaaacttagtggcttcacctttccgtgtattatgatgacaagaatgtggtatgacactgtcttatatctggatcatatgctaaaagatagaaaatggtttctaaacttatttgttctgtaataacaaaattttatttcataaagtgtttttaaaaaaaaccatagtagcttgaaacaacaaacctttgttatctcacacagtttctgtaggtcaagaattcagaagcagcttagctgggtggtctggcttggtgtctctcctgaggtcagggttttggctggggctgcatcacctgaaggcttgactggggccagaggagctgcttccaaagtggtccactcacatggctggcaagttggagttgcgtattggcaagagacttcgcttcttctcaatggatcttcccagagttcttgtaggcaacctcatagcatagcagttggcttcccccagagggaacagtccaggagagaacaaggcagaaaccacagggtcttttctggcttaggctccaaagtcatactccaccatttctgcattatcatattagttacacaggctagacctattctgcatggaagagactataccatggggtgaataccagaagcagggctaattgaaggccagcttcaagggcggctacacattccctttcaacagtatgtcatgaacatctttccatgccaatagagcagatgaatcttaccatttttaatgactacatgtaagtgtagcataatttatttaaccaacctcctgtagttgggtatgtgggttgtgtctcgttttttgatagtagaattaatcatcttgaatatccatcaccaaacttgtcatattattttcttttgatgaatgaaaaagaaaatcaagtcatgtctgtcaatcagaaccctgagcaactaagaaatgggggtaccactgggacatagagcaaggtcccttctgattctgctcttgtctttctctccccatgaaatggggagttcactatctactgagacatcctagcccacagctgcacagttctgtctttttagaaagctctaagcagaaacaatgttcatccatcctcctcgggacagcccttgagctactgaagactctaagcatgtcctggtcatcctccatgagccatcatctctgaggccctccccttcttggcccctcttctctggacaggttctggacagtcttgcccttccaaaattcctggaaagcaggaactgttcctgctacaatgactctcaactccagtgcagtacagactgttggtgtcaccccttatcctgaagaagaggcactgagacaggacaagggtgggtgcccaggagggctggcatgagtcatgagaatctggtcccggagaattagacggtgtggggaagtaggggtgttgggccgctttctggcctcatggatgccaatgaatatcagcaggtggctcccagaaaggaactctaggggatgcctgttgctctaaatagaggctagagagggcactggcagttcagtcaaccaagaaagggggcccacttgcctcagcttcaggctttgtacacatcctcagcctttcttgagaactgaatttagattctcctcccctgtgctgtgtgcttggcccagaagaagggcaagtctcgctgggtggctgcttcttggcctggctgaaccagaaggccccagtgccactccaaacctgggtgtgagccctgcccccatgagcaaacagtagctcagagctgggggctgtgggggtcagtggcctgtcacatgagatctgatgaggccatctctgctctatattgggaaagggatcaattgtatcaagggctttcttgggagtgatcactctggccattggcgagagacctggcattctgacaaggcaccctccataccctgacccacttgccagctccagctaattttagcaggctttggcaggtgccagcaagtacatagcatgtggatgtcactcccaggtgagcccaaggagaggcctgggccagagcctggaagtcatggtctatgcccatggaggcacccaaagcaagcctgaggcctggactttgcagtcacaaaattaagaatgatacccctgttttttgtttgtttttgatcagttggccaccttcctccaccaccccttccccaagttccatacagacccctggattgtatgaaatgcaaatcgaacctctctgcagatgaaaatccactggggatccccttgcctccaagagcaagtccagacctgcaccagcgcgggccaggcccccttaggaccccctccctgtccaagggcatttcagtaagtgttctgtggccaaggcagcctggtgactttctgcccgcacaaggctgaggaatggaagatgggtaggctggctctgcacaccccctcctgctgggcagcaatccctaccccatgttcacagagtgtggccggctgccccatggctctgtccccgtggccctgtcaactgttacccacatggcctaccctccctttctgccctgcctctgaccccatggcagggggcagagtatttgagcagccgccaggctgagccctttcagtgcagaagccctgggctgccagcctcaggcagctctccatccaagcagccgttgctgccacaggcgggccttacgctccaaggctacagcatgtgctaggcctcagcaggcaggagcatctctgcctcccaaagcatctacctcttagcccctcggagagatggcgatggatgtcacaaggagccaggcccagacagccttgactctggtaagggtcacaccaaagttagggactttgcactgggagagcagcacccagggcagggcccttggttttgcagattaccaaaactaaggctgggggcagggaaggcgagcaggcttggggcaccttggaaggaggcacatgggccttgggggtcctggctagggcagctgtgcctgccactggccctctgcccaccacccctcctcactgtggctatccagtgtccagcctctcgaggggttctagggtacttattcctggagctaacggtgacccaggacaccagtgtccggggcctggcctggggcttttatggggggagctggctggctgcccagggctgtctggctctctgggggctctgcatggcatttccaggggttggtggatcagggattctgtccctcaggagaatgtgggcactagcccaaggccactcacttctgtgtacatagccacctgagggcccaggaatggagggggccaggctacagctggacatctggcactcggatgggctctggagcccccaggcctgcagcatctgcccagggactgccctggcccttggccatttcctcagggacccacagctccaccagccggcccctcccagtgctggaatagacagttcctcagtccacatctgccaaaggcggcactagaaggcatcctgccttttttactgcgttctggaggtggggtcacaaagcactgctcactgcataaaagggacagcatcctgcccctggcagccctgcctgaccagctccgcctctcccactgctatccaacctgtacaccctggtgaccatgtccaggccagtggccttaaggactgtctctgtactgatggctccacatctacctctccagccagactctcctctgaactcgggcctcacatggccaactgctacttggaacaaatcgccccttggctggcagatgtgttaacatgcccagaccaagatcccaactcccacaacccaactcccaggtcagatggaacctcttcttcccaggcccttctgttcctctcctcagcccctcccacctcccttcagaataagtctagactcttatcgctttcaccaagcctgcgcccagcatccctgcacagggattgttaggacagcctgacgccctgcttccaccctgccccaagatgcccctgctctgcagcccggcgcctccaggcttctcacctcctgctgctcacagctcagcctcactccctccctccccgcctctgctccagcctcagtgcaggtcccctgctcccatcttctggcagcagctgcccgacctggtccctcttcatctgtccccattccttcaccccccagcctgtccccaacttgactgaggttctttcctgcagatccccgcccttgagaggggttggtcccactgtcaactctgcttctgtgccctgtgccgcacctggcattcagtgagcatctgctgaagagatgagggtcagatgccctgcagggagtgtgggggcgtcctcaggcaagaaaagttgtacgtttggctgtgggccctgattatgtgtcctgtgacctcttgggtgaggtcagcaagagaaacctctgcaagctggctggggctgcctcccagaggctgccagggggagggacaggctctgtctgtgctcttcttccgaggctacacctggggcgccaggctctcagggctccccaggtaccaccacatttcctacactgcttgggaaagccctgtaagtttgcacagacacccagcatgaggctcgccagagagatacttgtagctggggtctgggcaccaggaacagcttggtgctgggcctgaagtcgggcaggatgcagcctggccaggtgagaggaaagcttggagccagtgcctgggttcaaactcctctgtggcctatggttctgtgggcttggggaagggtttgtacctctgtgtccagtttcctcacttataaaaaaaggagataataaaagtacccatgtcccagggtggctgtagcaataatagggaggggtgcccagagcaggtctggcacacaggaagtgtgcatcagcctcagtccctgccattgggcttgtcctgggagtctgtgaagccaacctctgctccacaatgtgacccccaggcttgtgagaccaagctgggtcagagcttcctcctctggggttgcaccaggaggggaacttctgcaggcccagatgcaccctgaggaaagggcttgttcccaccaagaacaaggctcacctttggaggatgctccccacatgagaggtgaacccccaggtctactggtgactgcagcctcggaagctgacagcatctatcctccaacccatgcccactgggaagtgtgtgaggggtcctcataggccctgcggtgtggacaatgcagagaccctgtagcatctggctagggcggggcccagataagagccctgtgccaggagagcctggccggttctgccactgtggggagacaggctcccccaccccatgtcccctgcttccctgcagcccacagagaatacagacctacttttacagaaatccagatttttgtgtaaaagtgtctctattttaagtagattttaagtggtggcagcaaatttaagcttttgagaatattatacagaacaaatcagattcacaggccagatgcaactttatttacagaaatgggatcaggtcctacctcaggtcccatctcacgttttcacttatgcctatacgtctccttcacgggaaaggccacaagaggccctgcggtaagtgtcccggtgttgatttaaagtccccaacagtgaatatgagggtcctcactgttgcagcaagaggatacccccctgtgtatcttggaaatgcctgcagccctcttgctgcagaacagattcttaggagagaaactgtcagatcaaagttaaacttagagaaactccaaattgccctctgaacagacggtatcagtttgacatcatccaataccgggattcctcggggagaactttctggcctagaaggcagtagagccaggacttcacccagtcagtggcagggccacacgtgggccttgatacagagggggaagacttgagcctcctcgacaccctacagggcccagcctcccaacatgtgataagagaaacaacagccaacttgtacctagctctccttattctccaagggctgggccagttctccccacagccctgcaagggaggatcactcaagggccccaactgtctgacaatacagccacactctgatcagccacctgggcataggctccatgccattgtcctccgccaagacctcagactgaaatgttggctcctcccatgaagaacctggggccaaaggaccagagtccaggtccgtggctgccaggatgggccacttggagagaggcacaagggtggtgccaggcaggtgtgagggctggacctttgcaagagcagcatcacttttgttgagagcccacaggtatcttataattgggtcctaggacttcctgccagtagccattgtgtgcatggatttgggtgctggcctcaccatggtgtgctggctgcccatgcctgcaataatgacttctgtaagcctttcttcatctgcaagatgggtgctgctggcacctcctccccggtgctgtggtgacagggcatagtgtgtgaggctgctatgtgaagcacctaatgcagggcctggcatatggaggaattcagcaaatgacagatgccttcacagttagttcctggcatcctctacattggtgggtgtaggaaagaaagacagaggaggcaaaagttgtagctgtggggcattgaggacagcctggattgttccacagagccctgaggacatctccaggggtgtgctctgcaggggcagctggattggagggttaggggtcggggagggcgtgcactcccacccatgctcacagcctcggaacagtgcctgctcagccaacatgggtgtttgattctgtgtcttttgtcacagactttatcagccccatccctttctgaccttgcctcagtttaaattttacatgtggggcctcattaagagacatggttcttaactaaagatctgtatccattaggaatgctttgggctgcaggaagacaaacacctgactcactgtggcataagtggtttgcgtctgctcccataagctgcacgtggagggtggatctggcattactctctcttccctacatttgcagtatgctaacagctttaacctccagccttgtttcttcatggttgcagggtggctatcacagcgctggccatcacatccttacacagctgtgtttacaaatttagggggacattgaagctcctcccctgctaaaatcaggcttcccttcacctgtcattggccagaactgggtgaaatgcccaactctagaccgatcatcagtaagaggagtatagaattgctgtgcccaccttagattaatcatggcgcaatgtgctccccataccaacaaaatctgagttctagaaactgaggaagaagaggaaaatggccgtcttgcctcctggctgggattcagagcatctccaaccctctgagcttatgtgtaagactgtgggcaaaagtgtgtgagtttttgtggaatggatccacggcttttatcagagcatctttcctttttctttttgattcaagatgaaaatattcttatgattatttttctcaccactgcccagagataaccagcacattaacatggccttttctccatgaatagcactagggtgcccagtggacagacacatagctgtccacacaccagcttgctggggatgcataggcagagtcacatctgcactcacggcctgtcctcacactgccatgtggagagccagcagccacaccatgggccgtccatgctcacgggagtggcagtatcagatctgagcttcgtgtgcccaggcgtctctcacatcagtgcatagggaccctctttgttctgtggcccagtgtgcccatgccacagatggcttcagtcagcagacacctccttctagacactcacactcactcctggctggcccttagcacacctgtgcagacaggcccatttattttcttgtgtaaatcccaagtaggaggactgggtctctctgacagcaatgccagctgcctggcaccctccagacaggtggctcaagccccacctcgccagctctcccagttagcccctcctttccctggctctgacctgagggacgaagcagggtgctacaggacgctgtgccacagggatatcgtcagggacagaagctactctgccctctgctgctcacccctccaacacgctgtgggctgcatttgttgagtggctggtaccagactctgctcttctgactttccagctggttttacctgtagtaaagtttgagaagatgggtcatcctgaccccggggtcagaagacagaaggaggcccatggcgtgtgggggagatgccccgtgaggccctcggtgtgcagatgcctggtgacagccccaccctgaggtccccagcctaccccctccccagcccgactgctcccatccccctccctgtgcaggtagagcagatcctggcagagttccagctgcaggaggaggacctgaagaaggtgatgagacggatgcagaaggagatggaccgcggcctgaggctggagacccatgaagaggccagtgtgaagatgctgcccacctacgtgcgctccaccccagaaggctcaggtaccacatggtaaccggctcctcatccagaagcagctgtgggctcagccctagctgggagaagcaccccaggcactcccagactcacagccagcccgagacagaatctcctggggagcaatgaagtcctcgacttgggccagttctcacccttggctcctctggtccggccctggggcactcgggctcaccctggagctggcaaacctcaggaaaactggcgttttaaatctcactcctggccaggtgcagtggctcacccctgtaacttcaacactttgggaggccaaagcaggcggatctcttgaggccaggagtttgagaccagcctgcccaacatggtgaaaccccgtctctactaaaaatacaaaaattatccaggcatggtggcacattcctgtagttccagctactcgggaggctgaggcataagaattgcttgaacccgggaggccgaggttgcagtgagccaaaatcgcgccactgcactccagcctggggtgacagggtgagacaccatctcaaaaaaaaaaaaaaaaaaagacctcactgctccccatgggcacttagggaactctcccagcccagttctgcagctgggccattgcactagatcctcagttggtccctgggctctcggtgactgtccagggcaggagtttcccattgacttttccctggttgacctttgaccccttccacagttgacactggtgtccccaggtgtctggtggccccttgtccagctcccttagtcccttgtgccttccctcctcctctttgtaatatccgggctcagtcacctggggcccacccagcccaaggccagcctgtgggtgtccctgaggctgacacacttctctctgtgcctttagaagtcggggacttcctctccctggacctgggtggcactaacttcagggtgatgctggtgaaggtgggagaaggtgaggaggggcagtggagcgtgaagaccaaacaccagatgtactccatccccgaggacgccatgaccggcactgctgagatggtgagcagcgcaggggccggggcagggggccaaggccatgcaggatctcagggcccagctagtcctgacgggaggtgccacctgtctaccaggggtggggagagcgggggctggaggaccacccagcctcagaggcagctggaggcctgggtgaacaggactggccaacatgtccccaagtcccacagtcaccatctggccagcattgagaggggaacgggctgaggaagagttagtggcaagaggaaccccagccagtcacaccttgtccagtttaccagaggaaaaaccaatgtgtaagaacagaaatgtgacccggcagccagtgcactgcccccctctccaaaggccacccctcaccctccaccagcatgcacagaaagtggggtgacagcaatcacaatgtctacccaggcagcaaggacccctgaccatggggaggactggggtgcagggaacatagaagcagaatgaggcctagggggagttgggcaaggccagagccctagctgcagccaagcacatggccaaggccagctcctggaagggcagggctccgaggcaggaggcaggaggctgcccgtggctacccgtcctcacacccctgcagcttgctagtctgtctgtgggctgggtgtgaatcaaggcagtgggatggtgtggggacctccctggccccagcagccagtgaggagcctggtcagtcagcagagcattcagcagtatccagttccatggagaggcccgtgtgaggggagtcggggctggtcttcagtaaggatgggtggccagggcccctagaagtagaaaaggagactccgggtgctggagacagaaatcaaggatgtgcctccatgtggagcctcaggaatagctggccaggcctgaggctgaacctcacaaggttcagctgggagggctaggctgacagagcacagccgggccagggaccagcctgccctgtgttgccttgtcccgagggccactgtcagcaggtctctggcatgggggaggcttagggcctgagcccaacaagcagcagcggaagaggagagggaaactgtggacaggcctggcattcagtggccaggtgttgcagtgtccctgaggaatagcttggcttgaggccgtggggagggctgccggccagcgcacccccccatgccagatggtcaccatggcgtgcatcttccagctcttcgactacatctctgagtgcatctccgacttcctggacaagcatcagatgaaacacaagaagctgcccctgggcttcaccttctcctttcctgtgaggcacgaagacatcgataaggtgggccgggtggaggggcagaaggcagatgaggggaggcacaggcaccccagaggaactctgccttcaaatgtagcccccataccatgtgctcagaagggagatctggattcaaattgtggccatgtcacctgccacctctaatgctgtggaaaagaagcatcacattagctaattctggctgtgcgccttgtgaggcaccagctatgatcaccccactccagtggaaagagcagctggcagtagggtggggctcaaactcaggcagccgggctctgggtcacctgcaggccacggtcatgtcacactgcctctagctgagtcagaaatgtgaaggaactgagattctacccttcctgcaagctagcaaagtggcctgccagttacatctgtgcatgcacacacacacacagttatatatgcacacacataaaacacgagacctttgggtcagggagaaagccagatcctcactcacggcagaagcagcagccaaagcaacatctcatgtggttttccaagccccagtccctacagagacagagagggccaggtggcacctgtgcatgcagcggggtaccttgcaggagggaaatcctgattttacacaaagctgctccccccacgccctgccttgactctgggatgacgtctcagagctgtgcagtacaacattcttaaattggctgggactcagccctgcagaaatatgatatcttcaaggagaatcgttcccaaaacctctcaaagctatggggctgctctgagcctgtttcctcagctgtaaagtagggtgcatacttttatggccctgtgcaggaggtagtgacaggccctagcaccctgcctccagtatatgttagcagccacgaggcctatctctccccacagggcatccttctcaactggaccaagggcttcaaggcctcaggagcagaagggaacaatgtcgtggggcttctgcgagacgctatcaaacggagaggggtgagggggcacctgtacctgccgggggggctgccctgggccacccaccccagcactgcctgcctttctccttggcttccagcactgcagcttctgtgcttcttggcaggactttgaaatggatgtggtggcaatggtgaatgacacggtggccacgatgatctcctgctactacgaagaccatcagtgcgaggtcggcatgatcgtgggtaagggctccttgcacccctgccccttccagactgctgaggctccctgtgtacaacaggcttcaagggccctgtggggtgaggaccaaactacttaacaaccggtgatgtcagagcagagcctggtgctacagcctgggtggtcttggggtatcaagatggaagcaccgtgtacagtaggaagcatttcaacgccatgatgccacattcctgcatcagatggtatgccagctgcatatccacctcacccatcaggattataattaaaacacttatctggtaaattgaccaactggacagattggtccaagtggaagaggataagcaaaagtggtaccatctccacccgaatggtctttccacgggcctgcccctgcccctgcccccacccaaagtgaaggcaggtaccaggaaagggagcagcagtccgcccctcccagcagaggggtcttccacaccaactcggacctttctcagaagttccggaggtcattataaccagccttcactgaggagcaatccaatcagatcagttatctgctgtgcgcacagccgtgtggttctatacttctcttacttccattttcacctttcagaaggaacgttgtctttaaatccagcatctaaacgtgagccccagccatccctggctgtgatccccccagccctttccaccctatcctctggaactgcctggggctccccaagacacttccacatgaattcccaccaagccaagctgcagctgctgggcccaggcataacccctcctggggcagaggtggcaaggagtgacccaccactcacatctgccccacatccactcttgactctgctcagtgtttaaaaacatgtttataacaattaccaagatctgaaaattaggagaattcacatcaaagtctggatttctgtttgttcataaaaaactagaaggcagccaggcaaggtggctcacgccagtaatcccaacactttgggaggctaaggcaggcgggtcacttgaggtcaggatttgaagactagctggccaacaaggtgtaacctcgtctctactaaaaatacaaaaattagctgggtgtgatggcgcatgcctgtaatcccaggtactcaggagactgaggcaggagaattgcttaaaccctggaggcagaggttgcagtgagccaagatcacgccactgcactccagcctgggtgatggagtgagtgagactctgtctccaaataaataaataaataaataaaaactggaagtctaagcatcactgagccctgattcctatgtggcagctcgactgaccagcatttgagttgctgtccctgacagctttgggggtgtgcagcccacacagtcatgctagcttgaggctctgctgtcagcagtttgaaactcttaataacttgtgaacaaaagactccatgttgtcactctgcacaggggccagcaaattacaaaattccatatccggaattgtctacaggagcctctgggctgctcccaagggcccacaccatgccttactcactttgggttgccatccaaacatgtctcatgacaaagaagctcaaacatgtgcatggacagtgccagaaaacaagggtcgtacatagacaaaataaaatgataacgtcccacaaccatttctttgatacacactgtttctctcagtcctcccaaccacctaggtaacaggcagggaaggtgttactgttgcctgttaggaaagaggacagccctgaaagctgtccctggccactgaagcaacccaggtcttccagccccagggagagccgcctttccattgttccagacaaagcagagacaggcatgggggagcgggagagggactcctgtgggcaggaaccaggccctactccggggcagtgcagctctcgctgacagtccccccgacctccaccccaggcacgggctgcaatgcctgctacatggaggagatgcagaatgtggagctggtggagggggacgagggccgcatgtgcgtcaataccgagtggggcgccttcggggactccggcgagctggacgagttcctgctggagtatgaccgcctggtggacgagagctctgcaaaccccggtcagcagctgtaaggatgcccccctcccccacaacccaggccctgggccgctctggtgcagcggcagatgggagccgggccattgcagataatgggcttgtttttaaacaactctggggaaaagcaaactgacaatccgttcgtaagctccatcccttctgctcagtcatgacctgcccctgtgagagatgaagggttagtcccagttgtgatgtgataagcccagacctctttccttccgacaggtgatcgtgcatgcagaggaggctctgagacgcccccagcaaggttcctgggtttaacccaacattccccaaagtatgtatttggccacattcacagaaagaatattagtcttttgtggaatgctgcgggttgacagtcacagcttggaaaccaacccacagagagctcatcattaatcatggctatcacttgtttaccacctactgtgccaggcctatgctaattactttattagcgtcctctctgccgctcgcaggcctctattattataggtcagtagtattcgatttatttaaattaaatacggaaggtcatagattaagcaagaaagtgccagcaacatggtgcgtgcctctgactgggcactaaccctccaagtcttagttttcccaaccataactggccaatgaacagcagctctggatgcagctaaaggaagactgaagctgtaggtcccgtgctcggcgcagggccccctgcaaggaaggtttcggagggactggatggggtctttgaactatctgtctttccctttactgcagtgggcccaggggcaggccaaagttgctcccgtgattgacttgaacgtgcacgttcctaatccctgacatttctaaagctctggctcattaacgagggaaagacgtgaaccagctgggggagtggggatcgcagtgccccacgtggccgcctcgtgacctcagtggggagcagtggggccggctcccggcttccacctgcatgaggggccctccctcgtgcctgctgatgtaatggacctgccctatgtccaggtatgagaagctcataggtggcaagtacatgggcgagctggtgcggcttgtgctgctcaggctcgtggacgaaaacctgctcttccacggggaggcctccgagcagctgcgcacacgcggagccttcgagacgcgcttcgtgtcgcaggtggagaggtgtgcggaggaggagggtgggtgcaaagggcaggggctggggacgcccgggcactgcagacttggtctcagggcgacgctgagtcccaggcccggggcgcagggatgggaaactagggcctggggcgggattccgggcgtgggcggggcccggggcggggcacagggggcgggggagtgggcggggcccgaggccgggcgctggaggcgagggcggggcagggacgggtccaagggcaggaggctgggacaggacggggatgcaaagggaggggcggggcccgagacggggaggagggggagggcccaaggggaggaggcggggtccggacggggatgccaagagcagggatgggagcgagcctgcgtccgggcactggtccccatccgtgagtcccctcggtgctccctgcccgccgtggccatcctctcacatcactcacaaccccaaggcgcggcatggttgacacccccacgttaggacggagaccctgggcttagttagagggggcagtactaaccagtccctggcggaaacgctttggctgggtgaggtgagcgggatcgcccccatttctccagagaggggtcccggctcagcgagggaaagaggccgccgctggggggacggctggccggggcccctccctggagaacgagaggccgccgctggagggggatggactgtcggagcgacactcagcgaccgccctacctcctcccgccccgcagcgacacgggcgaccgcaagcagatctacaacatcctgagcacgctggggctgcgaccctcgaccaccgactgcgacatcgtgcgccgcgcctgcgagagcgtgtctacgcgcgctgcgcacatgtgctcggcggggctggcgggcgtcatcaaccgcatgcgcgagagccgcagcgaggacgtaatgcgcatcactgtgggcgtggatggctccgtgtacaagctgcaccccaggtgagcccgccccgctctctccctggtaaagtggggcccaaaaagcgcgcgctccaaggttccttgcggttcccaagctccaagatttcgtagtcctcttctcgtcccccttggcctagatttgggggaagggtcgactgcgtgcagggcgcccggtaatgaatgtggaggatgaggtgggaggagggacggcagccctgcttctcttctgcccagcttcaaggagcggttccatgccagcgtgcgcaggctgacgcccagctgcgagatcaccttcatcgagtcggaggagggcagtggccggggcgcggccctggtctcggcggtggcctgtaagaaggcctgtatgctgggccagtgagagcagtggccgcaagcgcagggaggatgccacagccccacagcacccaggctccatggggaagtgctccccacacgtgctcgcagcctggcggggcaggaggcctggccttgtcaggacccaggccgcctgccataccgctggggaacagagcgggcctcttccctcagtttttcggtgggacagccccagggccctaacgggggtgcggcaggagcaggaacagagactctggaagccccccacctttctcgctggaatcaatttcccagaagggagttgctcactcaggactttgatgcatttccacactgtcagagctgttggcctcgcctgggcccaggctctgggaaggggtgccctctggatcctgctgtggcctcacttccctgggaactcatcctgtgtggggaggcagctccaacagcttgaccagacctagacctgggccaaaagggcagccaggggctgctcatcacccagtcctggccattttcttgcctgaggctcaagaggcccagggagcaatgggagggggctccatggaggaggtgtcccaagctttgaatacccccagagaccttttctctcccataccatcactgagtggcttgtgattctgggatggaccctcgcagcaggtgcaagagacagagcccccaagcctctgccccaaggggcccacaaaggggagaagggccagccctacatcttcagctcccatagcgctggctcaggaagaaaccccaagcagcattcagcacaccccaagggacaaccccatcatatgacatgccaccctctccatgcccaacctaagattgtgtgggttttttaattaaaaatgttaaaagttttaaacatggcctgtccactgttctttgacttctgtgcattaggactgtggggacaatctataaagagtctgcgtcacatgcatgaagacacttcagtatctcggcaatgccctccagacagctcctccagccatctgtgccaaggggagtgtgaggagtgacagaccaggctgtaggaacaggaatggggtgtcatgggggatggcagagcagtggacagtacactgcctggcccgggcccctgcttgcctgcccatggaatgtgtgcagagggagtgccaggccaggtgctgctctggagaagtgggggaatgaggctggtcctgctgcaggtcagtctcagcaccgtcctgtccagtcagagtcacttaggtttgccagtgagtaggggcccagatacatgttggatttctaaggtccctccagatgctcctgtcagtggaacgcctatttagagttagccaagcgtaggcataatgccatctttctgcagcataaaatacagtgacatagaaacatatttgtgtgattttcatgcattccttttttgatgagagatattacccagctaattaggaacaactgttttgtttccttcagatcataacccaaagttgtgattttgaaaagtcatgtcccccttcagatttcttgttttctgctacttctcatgtggaattgctttggctcttcttagttctcttgagtctaaattattccttataagttggtgcaagcatctgattattttgttatcattactgttatgctcaagcattcacagagtggaacacattttaatatcaattgctttctatttctcctttatattacagttcaggacattgtattaattattaaaattctattcgtaggtaggttatatgactgaattgaaatagataaaatgaatttcttttctagataacaaaggaggtgtcataaaacacttgttatgggccagtgtgatggctcatgcctataatctcagtgctttgagaggctgaggtggaggattgcttgaggccaggaatttgagaccagcctggggcaacatagcaagacc

SEQ ID NO: 15586 - DNA, 45256 bp, Homo sapiens
gcctggattctcccagagattgcctggaacaccagctcgggtcctcgcacaccatcctggtaggaatctctcagtgacaattgagagtttgtgggctggcttagggccagtggtgggcagggagtcagcagggcgcaagggactggagagcttggcatttctccaacaggagtttcagggagagctcagaggcctgcttatgtgacaggtttatcagcttgcctggcccagggccggctctcataccgttttgatttaaataatagattgctcacagaataaatgtatgttggtttaagctttcactttctcataatcctctctgctggcccctcccaccatctaccccattttgcctcactctggggagcctgaacaccctgttccagagtaggggcatagggaaacacttctatggcttctgagctgctgggcagggccagtccctaaaacaaggagagctgggagggagctggaccccaggatggagtgctgagagctgaaagtcctatttaacagaggggagggagcagagatcccaaaaagggaaaggcctggccaggtcccacagcaagtcaggagcagagcgggcctgaactgtgagatctccaatctctccaaagcctttgggtaagaagtccgcctaaagcagtgagatcagtggggtctgaggaaaatccttttcctcactgcctccatcccagtcctgggacccaacaccatcctgtcctcaccctccttggccatctccttttgccctgagaagctgttatgcatccagccagactgggaatgtgctggaatccatgcaccacaggggatggatgcgccgcttacagtccctgtgggccatggctgtgagggaaagtcagagctggtggctggggtgtgtaggcccaggaggacccctgcctcctccttagccttggagcccccctctgctgctgagtctttcctcatctagcagggccccactgcccccagaccttacctcctggcttagcacatgacttccccactctgggcctcagtatccccccggacatctctaaattcctttcccgcctgccctgcctgtcttctggttgggctgaactgtaactccccacacagggctgagggtgactgtggcattaggcttctggctgggagcccaccctgatggtgcttggggaggaagggagacacttccccctgccaagggcagccctaggactactctgcccccaaggccccctgctgctggtgatgcgcacctccacccgctgcatgctctcccacacggggactcccacacggggacccccagggcctggagggaacacacaagcactttgtctctggcttgctgtctcctaaccccacagagctgcccctcgccaagtacaagaggcctggggctgggtcctgagggtggcaagcagcactgtaccctgtgggaggcaggcaccaagtcctctcacttagtcggctgtggcccctgcctctggtctgtgcagccttgtcccctgcccagagggctgtggtggtgaggctggcagcctgggctcagacgtgagcttgctgtggggctccatgtagagctttgctcctcctggggctcccgacccgctccttcgcagctccccttctcaaggagcccaagccctgcccagatgtgagggcccgctccctggaggcctcctctaactctccagcccacagggatggacccaggacccccacatcttagactccatgggggacttgcccaaagagcacctgggggaaggtcagtgtgacctttgtcccacccttttggatagacacagccaccctttctccccaccccagcagcagggctgttgctcagtgaccctgaggttggtgatgcagaaaagcagaggcgggtgtcactctttattgcggggtccacactgtgggtgctggggcccctcccactgagggaaggctgagcctctagccagggctggccacctggccacctatgagtccattcttctgtccccttaatctcaggctgagcatttacactggatttctgggggcctgtgagtcctccttgaccttcatcgcccactatcatgtgcttgagagcatcacaagtcagtagcaatgagccaggtgggtggtgggtcacctggcacagcaggcctggggctcgggtcccagcccagcagctgtggagtcccaggtggaggcaggggtggtggccccggccgcactgccctcaggctcaaggtccaggccctcgtagatggtggggagtgaggtgcgctggctcagccgccggcgcaggccgaccagcaggggctggggcagggaagccacatccacgttgttgcccaggtccacccaagccaaagcagggaacttggtggtgtccttgatggcatcagtgagcttgcgggcagtggcccgcgtcagtcggttgccgttgagcaggagctgggtgaggcggggcagcgcccacaggctgggcagcaggaggtgcagcagctcatcactcagccccgtgaagctcaggtccagcaccgccagcacagcaccatggctgctcaggtagcgtgtgatgtgttgcacgtcctgtgtcgacagcgggatgcctgagaggtccacagtctcccctgccagcagagtcttctggaggctgctcttgaggctatgggagagtggcaggtggggatggactaggcaaccaggcagtccccccactgaccacagacagtgacctgtcgggaacagcccaggcctacagtctggcaaagccagattcaaactgtgtctttcgtattttttgagacaaagtttcgctctttttgtccaggctggagtgcagtggcacaatctcggcttacggcaacctctgcctcccggattcaagcgattctcctgcttcagcctcccaagtagctgggattaaaggcatgtgccaccacgcctggctaattttgtatttttagtagaggcggggtttctccatctttgtcaggctggtctcgaactcctgacctcaggtgatctgaccgcctcagcctcccaaagtgctgggattacaggcgtgagccactgcgcccgggcccaaactgtcactttctaagtgggtggccatgggcaatgctcagaggctcagtttcccctttggtgaaaatgggacgtggttgttgtgaggattaaatgcacacacagtaaggctctttcttcatgaactattatttgaaatctcactgtgtgcccagcatcccacacctgttttattgacatctcacttatttttcagataggtgaagtaactcttccatggccacacaccactaagcggggaaccaggtcctcaaactgagatgctctgactcttgagcccacatgtttttttccctgtgccccttctgatgtcgattcttttagggtagggagaaattctcctacaaagggacggctattaggctgtacagggcaccggggatagagagggacaggcccacagtagtgaaaggggaggtcctgggtgtgcaggctgggggccggccatgagggagggctccccgtgttttctcagttagaagggaagttcagagactgagaaggacccccgcccccaccaaccctctaggtctctccccagttatctgaacagagcccactaggcagacaggccttttgggggactgacagcagtgagcacaccctcaggacccccaccagccatggcagggaacaaccttgtggggtccaagctcagcgtggcctattaggcccaaggtgggacaggggtggagggcagacaggggaggcctgctagggtaagctcccggcagcagttcaggcctctgggcctgggtgcctgtggccagctctggactgagcctgtgtgtgaggctccatggatggagtcactccaggatggagtgtctgagagggacccatggcagagggagctattgggcagccacggaagcctcagttttaggcagcctggcagtggcaaagaattcccaacaaggtacaggaaaatcagggtagagtgtggccttaggcaagccacttctccgaacctgtttccttccctctaaaatgagaatcgcgatccagaatctgcctcccccgcaacctgttgggaagtctcagctgaagatgcctactgaggtcaccttggctgttgggtggaggggtggggtgtccaggccgtgtaacagaccagggattgagggatgtatgaatggcaggaggcaggaccgtcctgtgggaaatgccaaacgggtcactcagagggtgcagcttggcttggggagcatctgctaccacgggccaggctgacttccagggtagggccctcatgcggaccaggtgagggcctcaccaggtgggatttcagcaccagcctcttggtgagagtgcaggtgtcaacctgagaagggaccttggagcagcagtgaggaggggcagtggctgggctacccttaccagctctgggtcttcctctggcgcaggctggacccttgctgctgcttcgagtgaggggtgaggtggtagatgagctgtcggcagatcttgtccgaggacttccagagctcatagtcctgtgggagggcagtgtcaccatggtgaatctgagcccctcctgcccacctcagggccttggggagagggacccaggcagccaagtgtgtgtgtgagcacagtcatgcaccatgcatcaccgagttgcccaccagggcctccccctcctaccccccaacccggctgtggcctggcacagagccaggggaggctgccctctgggagctggacaggctggtccagtcccgcagtgcccggcgggaggaagcccagacaatgagcccttgttccctgtcctcgggcccagggccagcgtctcgggctatcagccggctgcctgcccaccctcagcacccttcggggacttgccacagggggaggaggccagaccaggcccctcgagggagccgtgctccactgacgccaatcccagggagtaggaacaagccaggtcagcgtgttcttcttcctctcactctccaagcgagactgcgcctgcggggtctgggtctgggctgacagggctgggggatgtaatgttttacagcaccaccacctggctctctctcagtcctaactgggctccggcagaggcccagctcagggtggaatccgaggtgcgcggcccacaaagctggcactgagcatgctccactgcatcctttatccagtccctctgtgagcagccccaggagcaggcagcacacacagcagctgcaagccctggctgttcctgtgatggccgtgggctaggcgcagagtcctaggggccgactgtgcagagacctgggcattcagagctggcagggcccagagcggataccctggttttggttggggactcactgtgactaggagtctgggtccggtggctggtcacagccacacatcctggggctgtgtcgatgctcatggcaggacatctgcaggtgctgtcagcatggggttctgggcagctgtggggtggaggctgcaggtggcaaactccaccccagcaaggaggagggccttgcttatgaccccagctgttgtaggggaaagcagtgagcacccgtccgcaagggtgtctgtacaggatggagacctgcggacagacgggggctctagccgagagcggctctcttctggcccaggaattcagaggctaggagtttgtttccgttggtggatttctcagaacagtctgtgacccgcagggtccccatatgacttctgcccagctatagtcttcctggtctgggcccccaggcctggtgcacagtgctgccacacagaaaatgggtctgcccaggactctgagggtcctgcaaagcacagctcacacttgctctagctggtggccagcctaatatactgatgctggcagcaggtctcagacagggacagtgacttgcctaaggccacacagcaagccgcagaaggacctagcctcccagtccccagccctgggctctgttggcccccctgtccaccacagtgcccagcccagggcccgtgcctgccagcctcaccttcttggggcactgcaggtcccgggccaggttcacaagcaggtcatgggagatggggtcgaccgggttgaggaaggccacatctctgtagaggatatcaggaaggagggtcctctcaaggcccaggtcctgtgagtggtgaagagagagttgagtgagcccgttgggtctcccatctcgaggcaccaccccagccagccagatgctgcttatgcccgttcctgtctctccatctcctccctaaggctggctggattctccccacaggcggccatgggccaacagtccagtggcgggtggcccccttctttttttgcttatttattttttgagacagggtctcaccctgtcacccaggctggagtgcagtggcgtgatctcagttcagtgtaacatctgcctcctcaaggaatcctcccacttcagcctcctgaggagctggggctatagacaggcaccactatgctcagctaattaaaaaaaaaatgttttgtagaaatggggtctcactatgttgcccagactggtctcaaactcctgggctcaagcgatcctcccaaagtgctgggattacaggtgtgagccactcagccttggaggaccctttggataagtagaggggagggacatgggagccctcagggaagtggtaagtgaatcccagaacccttagaccagttcccttgaggtagtgttgtgctgtgacactgccttctctggggttaggacttgtcagtgggattctttggggtctttcgtcttatggtgggggggtttgctcttcttatgacccctcaaattcccctgtcccccagtgttcccttcagatcctctgccttcccacctatcccttggttttcctaagctgcggccagcatctgtttgcggacaggtatggatccttcccttgggggcggacctctctctcagatgtctcaaaggcatgccaccctgaagccagcctcaccacccatgccccagctcagtatagggcacctccatgaccatcttcccaggcactggggccagaagctctggaaccccccagcactcttccgtcctcctctctcccccagctcacctagtcatcccttctctctccccaccactcctgccaagattcaggcctccagcctcctctcctacccatccctcaccccaccgcctgcatagacctgccctggccttcctgcctcactcctccactttctcctcctgtctactcccacaggactggtgtggggctgaatactctttcagagggtctctttgttttgagacggagttttgctcttgttgcccgggctggggcgcagtggtgcgaggtcagctcaccgcaacctccgcctcccgggttcaagcaattctcctgcctcagcctcctgagtagctgggattgcaggcatgtgccaccacgcccagctaattttgtatttttagcagggaaggggtttctccatgttggtcaggctggtctcgaattcccgacttcaggtgatctgcctgcctcagcctcccaaagtgctgggattataggcgtgagccactgcatctggcccagagggtctctttagaggacattttgagagctgatggggcagccacagccaggaggggcctctagaccccatgtgggccttctccaatccataggtgatatgctctgtgcgtgggtcccaagcacaggaagttgggccaggcaggggaggccgtgggtcacagctgcagggtccctgcaggttatggagcaggataggccccggctggacctcaaatcccaacctctgagacacaaagaggtggtctctgaggatccttctttccctctagtttcccagctaaaatgcccaactggtgtcttggactccaggcagcatcccagactgagatctgtgcctctggttgtctggctgattcagtgctgctctgctgtttgccacagatgccagctagggaagatccaggaggaaggctggctgatgagcctggcagacccagacagggccccagaccgcaacctgccagcctgccttccatgggtctagacagctcctcttaaacggacagctccatttttccagcctgctgaatccagagttggaggaggtggagaagggaagggaggaagaagggctctggccctggcttgccccacattttctctgtgggccctggggtgaccacttcgctccatgcctcagtttccccatttctaatctaccttctgcaggccgaacacctgcatggctgacttcctgctcacaggatggggcaggtagtggtggtagctgctgtagggggtggggacggggtggtgagggaagtggcatgcccaggtgattggggggaccagcatcctgggacaacccaggggttgggatctgggtttagtgtacctggtgtgtgtaggagcagagccaccaccggaccgagtgttgtgatgcacagatgctggggatgtgtactctaagggcatgagccgcctgttggagaactggtgatgcatggatggctctctgtgggctgccatggtgtcttggggtgaggctgcatccctagaccagccctgggtcctctctccagggtccactgtctcccggatcctggaggagggggaagttaccctcttccattgtctctcaatacaagatgatttgacctcacttgccactcctcccgggcccctcccatcttgccagggcctgaatttgggctcttaggtccaggctaccgggccaccctcaacacacacaacccctctcaaaccccaaagacccggacacactcagcagccccctcctccacacggtccgccgacctcacccagccctcactccaggcggtcgccctctcgcccacgcaagaccccgcgtgctgcagcctgtcgcgccctcggaacccgcctgcgcgcgccagagaccagctccgcctcgcctcccggcggatacaggcccacaacccatagccccgcgcctcccagacccccagacccccagaccctccctggccgccagcccaggggcggacggctccttctctcgcctggcgcaggaggcgcagcagctgccgggcgcgctccggccgccgctcgcggagcgtggactggatctcgcggagccaccgcacccggcgctcgtagggcgcgggcccgcagccggccgccgccccggcctcagagccagcctcgggcccggcccgccggcccagccgcgcccccatggccgccgcgcgatggtcgccgaacccacaggaggccgggctgtctgcgccccgctcccggggccgcccctagtcgccccgcctccaatcaccgcggccctgccccgtccgggtccgaaggctgagcgcccgccccaccccgcgccggagcgaggccagtgggttcctcggtttggcctgatcacactggaggaggccctgcttgcgtcagtcttggcgctagaacccgagggcctggagccgccaggggagacgcggagctcggccgagacgaggtggcttttggcacctctttaccctctggccccagtgctgactggggaatagtcgctttgaccgtgcaaagagcattctaggcggggtgggggggttctgctgtgtgtgccagtgttaggtattgcccccattgcttttagaaatatgccctgcatggtgaatctccgtctctactaaaatacaaaaattaggccgggcatggtggctcacgcctgtaatcccagcactttggggggccgaggcaggcggaatctaaggtcaggagttcaagactagcctggctaacatggtgaaaccacatttttattgaaaatacaaaaaattagccgggcgtggtggcgggcgcctgtaatcccagctattcgggaggttgaggtaggagaatcaattgaacctgggaggcggaggttacagtgagccgagatggcgccaccgcactctaccctgggtgacagagcaaaactctgtctcaaaaaaaaaaaaaagaaaagaaaagaaatctctgcagctggcagttgtggtgtaggacctgctcacgctacatggacactcctgcactggcaaatatttactgcctcctgcttcttggtttggggcaggcccccacctctgaccccagcctgggaaataaaccggacgaagagtcaggttaaccgttaagcccagctctgggcaagctggcagcaggcgggctgtatctgccgctggcttcagtctgcctccctgacaaggggtgggggtggcggcaggcagagtgagatgggggccctggctcctctgaggaccagggtgaggtacggacccacccagctcaaggtgtatcccacttcccagggctccctcagcagaagcctaggtctctgctgcaggcctgctgggcccctgcagccccaatcccggctctgggacgctcacatctcctgcgtggggaacgtttgaggcactgatctgcagttcccacttctctaagcaaggagcacgtgtttagcctgtgaggactggtacctgttgtgcaggaagggctgagcactgtccgagggcatatatgagggacgacagccaagcacccgtgtgtatgtgtgtgtgtgtgtgtgtgtgtgtgtgtgtgtgtctgctaattaccctatgaagattcaaggttccttcctttgggttaagcactgcctgcccagagatggcagtggggagagggcagggtgctaggctctgtcatcctgtggggctgggcccctgagacaaggcagaggacagcaggatgtcttagccccttgaccatccacggacccccaacccctgctggagcagtgcttgcacccccttctcccctggcacctgccagctggacccaacagcctctcctcccactccagtgcagccagcattgtcctggggccaccttggcaccacaggtttcctccctggcaaacctgcatgacggccttgcgtgccctcccccagggccaaggcgctgttgctgaactgaagtggcaacctacccggtcagagctttaagctgcagctctgatgccccagggacctctcagacccccctgcccagagcaggcagcccggtaagccctcctcctcttcccctgcagcctcagggctggagccacagctgggagggctcccagatcctgaccatatcctcccagaggctgagccaggcctgggcactgtcccctcaaatgtgagaatactgggcagggggaggggagaaaggagggaatggagggctgagcctggaggcatgaaaggggcaacctaggcagcggtatgggggagtgctcagagcttagagtcctgtggaaggcagagaactgccccagcccctgcctctcatcccccaccctctgtgtccctggccgagaggttcctggaggacatttttccagcaaaagagggagggtggtgtctgggcctagatccttggatgggcttttctctgcctgcttgtggggtgcctagggcgagtgggcttttggagacaatttctggcctaacctgacttggacagcagcccccagaggcacagctctcccctcaggcatgggggcatgattccacctcgctagcccacatgtgttcttcacggagggctgctggcccgtctccctggggttaccctgagcagcagagctgtgtttgttgagactccatggggtggagggattgcgatgttgtcctctcagttcccggggctgatgtggaagctcaagggcttgccctggattcttcagggtagccctgccatccctagtgagtcagtgagttgggaggttgggggctggagaatcaggtagggaggacacagctagacctcaggccctgatgggaacgtactaggctccaagtgggacctgccaggagacaagaattgatgacagccacacctttggagtctcaagccctctgccacccatgcggtggcctagttcaaatgacaggaacacaaggtccagctggcccaatgggcaggtagagggctgcagccagggctggaactggccttgcactgcctctgggcccttctctacccacccagtagtattgttcaagcccaggagggaaaaaggccagctcagggttaatgttacctcagcaagtagctgagtggcactgagcctcctggtagccactgtaaagaaggacacagaatggtttgggggcattcgctaggaggaaggaagcagatggatactctatggagacagaatgtcctctgtgtttgctctacaggaacgggttgtcaaccttctgcagggccaggaattgtcatgaggctgtagtaggcagcagagcttggcggggtgaggcgagatcacaggtataggctcagggcctggattcaaatcccctgggctgccacttgttggatgtgtaaccataggcagagtaaggacctgccatagcaaattaccacaaactcagtggcttaaagcaacagaatagttctggaggctaaaagtctgaaatccaagtataggccaagccacactccctttgaggactccaggggaagatccttccttgtctcttcagcttctggtggctcctggcaatccttggccttccttggctgctgctgcatcactccagtctctgaaaccatctaccctatgtgtctgtgtggccttcacatggcattccttatttttgcagtggggtctcactatgttgcccaggctggtcttgaactcctgggtccaagcagtcctcctgcttcagcctcccaagtagctgggattatgagtgagtgccaccatgcccggctcacatggcctccttgtaataacgctagtgcctgggtgcggtggctcacgcctgtaatcccagcacttttggaggctgcggtggacggaccatgaggtcaggaaattgaggccatcctgtccaacatggtgaaaccctgtctctactaaaatacaaaaaaaaaaaaaaaaaaaaattagcctggtgtggtgacacatgcctgtagtcccagctacttgggaggctgagacaggggaatcgcttgaacccgggacgcagaagttgcagtgagctgagattgcgtggtgacttcactccagcctggtgacagagcgagactctgtctcaaaaaaaaaaaaaaaaaaaaaagaactgaagctactggatttagggctcattcattctttttttaattttaatttttttttttttttgagacagtctcactctgttagcccaggctggagtgcaatggcatgatcttggctcactgcaacctccacctcccaggttcaagcgattctcctgcctcagccttccaagtagctgggattacaggtgcccgccaccacgcccagctaatttttgtatttttagtagagacagcgtttcaccatattggtcaggctggtcttgaactcctgacctcaggtgatccacccctgtcagcctcccagtgttgggattacaggcgtgagccactgtgcccaacagggctcattcattctaatcccgtatgatctcatcttaactaattacttatgtagagactctatttccaaataaggtcgtgtgaggaaaaaccaactcaaactgtgttttttggcctggcgtggtggctcacacctataattccagcactttggggaggctaaggtgggcggatcacttgaggctaggagtttgagaccagcctggccaacatagcaaaaccccatcttcactaaaaaatacaaaacaaaaattagctgggtatggtggcatgtgccagtagtcccagctactcaggaggctgaggcaggagaatcgcttgaacctaggaggcggaggtttcagtgagccgagatagcaccacggcattccagcctgggtgacagagtgagactccatctcaaaaacacacacacacacacacacacaaaacaactgtgtttcgcctctgttctcacaagacaataatcatcacagaagacttcttgtaaccaaatttgtggattctcccacacacccagcaagaatcaattctgcagcagactccagctggtgtcttccaattcaactcaattctggtgctgtctacctggagatggcctcagaaaccacaggttgagggcttggtcccacaagaccaacccccatcccaccagtcacaagtctgggcattgggaacatctgactaactggcttctagttggggttccaaggccccctctttgggttcaattaatttgctagagtagctcacacaactcagggagacctgtttatcggtttatttcaaaggatgttttattttattttctcctcagacatactttatcatcccttaaagtcagtagctcaaaggaaactttaaaagctataaataggccgggcacggtggctcacgcctgtaatcccagcactttgggaggtcgaggcaggtggatcacttgaggtcaggagttggagaccagcctggccaacatggtgaaactccatctctactaaaagtacaaaataagctgggtgtggtggcaggagcctgtaatcccagctacttgggaggctgaggcaggagaatcatcggttgaacccgaggggtgcaagttgcagtgagccaagatcacacctctgcactctagcatgggcaacagagcgagactgagactccgtctcaaaaaaaaaaaaaaaaaaaaagataaaggctacaaataaacagtcagatgaagagatacatagggtaaagactggaagactcctaagtacagaagtttctgtcctggtagagctggacacatggatgagttggttttttttgttgttgcccaggctggagtacagtggcactatctcagctcactgcagcctctgcctcccgtgctcaagtgatcctcccccctcagcctcccaagtagctgggaccacaggcatgtgccactatgcccagctaacttttttatttttgtagagatggggtctctctattttgcccaggctggtcgtgaactcctgggctcaagccatccacccacctcgccctcccaaagcgctgggattataggcatgagccactgcacctggccatggatgagttcttgttccccttcctgtcagcctccacatgaaactccccaaaccctgtcctcttgggccttttttaaaaaaattaattaagaaattaaagacagggtctctctatgtttcccaggctgctcttgaactcctagtctcaagtgatccacccacctcgtcctcccatagtgctgggattacaagattagagatgccagctgtcaggtggctaggtggattcagtgtaaagtcctagaagatgcattttagtaaaaacagctagccacctgacagctggcatccatccattcagtgaagattgttgggcactgtggatactgtggaggaggcagcagtcgcagccggcctgcagagtgagatgcagtgccagagggcttcaggaggaggtggcattgtgattgatgtctgaagagtgtctccatgataatggagtcagtgcaaagtcccaaagactgggaaggagcaagaggaaaggatagctcatatccagctgccccactccaaaaaaaaaaaaaaaaagaggaaaggacgggcaccagcaaggtaggacaaggggggcctctggagtgttttcttctcagttggggaggggtgtgctcagatttgcatgccaagtgcctgggctgcagtagggaaacagcagaggggctgggacctgtgattgggagtctccaggtgagagggttggcctatggggactggaggtcaggtgaggctggtagtgggttatagaggtgggagcagctggacaggcccagtgaggatgcaggggtagctgcccagggctagactctggctgctctggtggcagttgcttagctcaggcttgggcacgtccacctggcgcatctgaaacattagccagcagggcgcagactcgtcagtgagagcattcctgagcccagcatccaagaagcgagggaggtcgggaaggtgctgctatgaggcagggggaggtccccaaaagtccaggtgagagcatggcatgcgtggaaagtgctgcgcagttttggcatcagtgaagtcacagggggctgtgggtgaacaggtgtgcttgggcatgtcaccagggaggccttgagacaggagcgggttggctttcctggagatcaggctgtggcatggtgtcgggactggggcatggacagtcttcctccacccccatcccctccttggagctttcagacactgcagataattaccaggtgatgtgataaatactacctgtggagggtgccttgggcagggaggacagggcggccaggaggggggccctttgggcccctgctctgagctgctcatcaggaaaggggagaagctcctacaggcctggtgttggagcctagccagaccctgtgaggccttgaaagtaggaggtgcattgtctgtgcattgtcatctcaaggaatccacccagcaactgttctagttatccctgctctctaggtaggagactgaggctaggaagggaaaggctgctgtgatacccacactatcagtggctggggttgagtttaaacccagggactctagggcccatgcctctgccatcctgcctctgagttttggagctggacttgttccatcaagtgccaggccagccctgctgctgggtgctcccaggcattcacaagctgacaattctgaagggcccacgcacttggccatgcttcagtctgtgtcctgacatcacaggtgggtgctggaataacaaatgctacaaatggcactgggggtgttggccaggctctgggggcacaggagttctgcccatgcccacagctggcctgtgctgacctccctccatcacagctgagtagcaccagcacttccattgagctgaagtcttcctcccattccttcagtgtggtctttgtggctcagagaggctgtggccaggtacaggatctggagtggcccctgcttctctgctctgtgaccttagacagtgggcaggatctgaggccaggcccacctgcagcaggtgttacaaagaggcaaattggcgcttaatgttggtaagaacttgccagccaaccagagtcccactatctttggaggtagtgagctccccattggggaaggtatgtaagccaacctttctgggatgctggaagatcagagagcaaacacttgagattctgtgatcctaatattgaatccaatgctatgatgtttggatttgaagtcagttctatttagccagtttaccaagtgtctccttggtgcaggacaccaggagacacaaaatgtcctggataatattgggtttctggctcccaggggtccctgagatgttgttccagcggttctggagtatgggccaggcaccgcttgcatctggaccgatccgcattgttcgatcattgtgagcctcatgatggcagttcgggatgtcatgcccccatgcgccccccaaccccaccccgccatggccctcaccatggcccactcagggcatgaggctttctgggtgattgctggtattcagtgttgtcagcttcttggacctgtcagtgggggtggggctgcaatgagatgccagttgcaggaagtggtttgcacagccttcctggtgtcatgggtcactctcttgccgagtggctttgggcaggtcccttcccctctcaggctgcaggttcctatgccaggagctcccttcttgccccaccagggccttgttttcccagatacagaggtggggcagatcccagcccgttgaaacagactgggctttggaggccacagtgggcccatttctcagagggactgtgtggctggatgctgagccaggcactggactggccctttgagcctcctgtctggccaaggcccctgaggcactgtgggctgctggtgccagcacacaagggtgataaggagatgaaagtcactaggatggtggggcggcacccgccccgggctgtgttggcagctgcccctggctggaggccagcttggccctggaaccctcctcaaggaacaaggacacaaaagagccagctcagccagcctctacctagcaccccaatcagcactcccttcttcccatgacccctaccctctgcccagctcctgtaactggccaaggagctaatggacacccaccagggtcttaatgagtgagccagggttaatgggttactgggcccggtgacacattcaccagcctcccagggctctcaaagtccacactggcctggccttgaacgtcttagctcggccacctccttttccagctttgacacctcggggctcaggacgggcctagggtggtcaagaggtcccctgcagccctcacttcctggaaaaggctccatttcctggccttcaggctcaggtggttccttccgcctggcaggtcctccccaaatccaatcccagctcgggctggattcccaaggcccctattctggtgtctgccccttccctagggctcttccccctggggtgaccatactctcatgcccagccaggtcagggctccttgagagaagaatctggaggggccaggatttgatgggagaatgaatgatggaatgaaagaaggaacgtaagcgtgagccttgctaagagtgacaatactggcaggctgcagaccatgtgtggacctcgatctgagggcttagaggcttcggcctgccagcgctgtgggggcacccaccccatctcattgaatggggcagagcaggtgagggcatgagatggacagatgggcctcatccccctgcttccgttgcctggggtcctcggtcagcctgtttgctcagacccctgaaattgggggtcaaggaaggaccctcctggattatgtgactcccttcagtccaggtgaccagggtccttggagtgacagctcctagagccccacctgtagtcctgcaagctggggagagggcctgttaggagaggcatcccctgccctggggttgtagaggtgaactaggctcctcagaccttgtggggcctcagatgcttacatctccagcccctcctggcgtgggcatctggctgcagcccagctctgtggccccatctcccagggaacctttggtctaatctgcctcccgctgaaacccagcctcattcagccccaccgaggctttcagagttcaggtctctcattcagggtttgagaccccaccgggctcagagacacctgcagcctgcagcggtcccagatcacagcctcagggatgggaccaggagccagcccacatcccacctgcagcagttcctgtgcctttaaagcctcccctccccccgccccgcccccaggccactaggggagggaaggaggagctgggtcacagcagggaatcttagcttggttttggtgtgctgctggatgaccagaccgggcgtcgggtgagcccagaagtgagagcagttggctgtgccccagtgctgtgtgacccagaggcgccgctcaccctctctgagctggtggacatcataggtggggaagctcaggtcagggcactcccatgagtgtctggaggcctgagtcccattctcagctctgccatatgcttgctgcgctctagaggagttcctcttcctctccaagcctcggtttatgtacccgtgcagtgggagtgagttgcacttcggggtgaagggggcaagacttgtgtgggcgcatcctgcagaaggatcccacaggtgggcagagccctgggttctttatccgactgggtctgggctgggggcctctgtttcttggctgatgagtttatgtgagtttgagtgaggtatgcgagtgggtgaaggagggctggggggagtcacctgacttgtgcgaagaagctcttgagagagccgtggcttcttggaattaagaggaaagagtgcagcatgaacagacaggccctggaggatctggcagccctgagtgggggcggggggtcagctctggagtagagccagagctgtgatggggttgggggaccctgtgtccttgggccatgcttgcctcgctcctgggttctgtttgtggctgtggattggggtggggcagggccggttgtgcgaggggtcattgcccaactccagggggcgcctgccacctctcagctatatatatagggatatatatagttctttcgacaggtttccagcaggtagtggttattaaatcttactgaaggggtgttttttctgattctcggctctgtgccgcaagggtggaaactgtgagagacagattccaactccacgtctgggtagtaagcatccagtccagggctgtaggcagtcctggggaagacgccagagatctgtgcattctcatatcgagggatagcgactccaggctgggggctggcagggtaaggggtgggtgggtcctgggcttacccgcaggtctgcagacttcctggggccagctgacctcgtaaaatcccttttgtctaagcttcagtttcctgcctgtgaatggggttggggctgtgctctggtttcacccttgtggctctggggttgtggtgacaaagccatcaagctgggttgaaggattaaccaggaaacttcagactggctgccgtgtctacctcttcctcatactcctctctctgctgcatcctgggaagctgctctgctcagcctaaatgaggctcagttgtgtgtgtgcgcacgtgcttgcacgtgtgttggaagtgggtgatactgacaccagagtctgtgtctctgggtgagtgaggcttgcacatttctcgggacagggaactcactaccttatgtgcccaggacaagagctgtggggtctggagaagacttctaggccagcccctgcagtccttcctcaggtgacatggcttccccagacccacttccccctaggtgccctctctgcattcagggggtagagggctgactgggacagaatgtgacacactcagcatgtgaggaaaagcctccttcattctgtaggccctacctctattaacatgtcctttgataaagtgcctcccctcctgtctcccctctctggaatcctcagctgctgccaggcttcagctgtgccccattgaaggcagctctgtctccctactttccccagcccagggttttccttttggggtcagctgcagggatctgggccatcctttgcccactcagactttctttctgcccacctgctgctgtgaatcctgtatgtcatatatatatataaaatatgtaatatattatatattatatgtaatatataatatataaagtatattatataatatgtattatattatatattatataatatgtaatatattatataatatataatatgtattatattatatattatataatatgtaatatattatataatatataatatgtattatattatatattatataatatgtattatattatatattatataatatgtattatatattatataatatgtattatatattatataatatgtattatatattatataatatgtattatatattatataatatgtattatatattatataatatgtattatatattatataatattataatatgtattatatattatataatattatataatatgtattatatattatataacaatatataatgtgtattatatataatataatattatataatgtgtattatatattatataatattatataatgtgtattatatattatataatattatataatgtgtattatatattatataatattatataatgtgtattatatatataatattatataatgtgtattatatatataatattatataatgtgtattatatatataatattatataatgtgtattatatatttaatattatataatgtgtattatatatttaatattatataatgtgtattatatattatataatattatataatgtgtattatatattatataatattatataatgtgtattatatattatataatatatgatgtgtattatatattatatattatatgatgtgtattatatattatataatatatgatgtgtattatatattatataatatatgatgtgtattatatattatataatattatatgatgtgtattatatattatatataatatataatattatatataatatattacatataatatatcatatattatatttatataatttatataatatatcatatattatatttatataatttatataatatatcatatattatatttatataatttatataatatatcatatattatatttatataatttatataatatatcatataaatatattatatatagtattatatatataaaattatactttaagttctagggtacatgtgcacaacgtacaggtttgttacatatgtatacatgtgccatgttggtgtgctgcacccattaacttgtcatttacattaggtatatctcctaatgctatccctccccgttcccctcaccccacaacaggccccagtgtgtgatgttccccttcctgtgtccaagtgttctcattgtttaattccaacctatgagtgagaacatgcatgtcttatatgctctcaggcagagaggaaactgctgagcaggccggggcaggggacagagccctgtggctctccactttagacccctcctggctgactgccatggaatgcagccacttagcagggccaaatcccctgatgttcctgttggctgtctagccttcagggacaggtcatgggaccttggttcctgccctgtcatcttcccagtcaccctgatcttcacggggaggaatagcctgggaaaggacttggtcacagcacctccaccctagggctattgaggatctcacagttgtgtgtctggtgggttctgtccagagcccatttgagagcagtggatgacaggacaggcctatgtgacccaggcaggcagcaatattgggtcagccttcatgtccccttctgtcagctggggcagcctggaagcatgattgtggggtaggtgttatgggcacggaatagacctcaggtggaggctgcaggggctctccggcaccgtagacacagcaggcccaggagcaggggagggagccatgactcagggagactctggcccatatccttggcagatgagggccacaggggaatgggcagcactgtccaaagtcccctgggctgggtccgcagctgttcctggctcagacttcttggtgggctggtcagaaacatgcagtaacttggggcagttaccaggtggccaagcctgcactgctgggctctgtgagcttgggccagctcaggccctctctgggccctgcctttctgggctgttcgggtggttccttgggcctggggtgctaatgtttctggatgggcagcagaaccagtctgcactcagggccccaggccatgttcccggaacacacctttagcattgacagcagcgtgtggtgaggccccttaggctgggttctggtctagtgccaggggcaccactactccaccgcctccagagccatctctgggacactggctgtgagttcagatgttctgaacagggacagggagagccagagggaaccagcctggggctcactggaggggctcgtgggcagacagcgccctttggagggaactgagtctgaaaggaaggaaaccctttccccggctcatagcacctgccatccagggccctcccagggctgcgtgaactttagtcacgtggtgacaggccgagtcaccatgccaagtcactgtgcgcctccttgctgctgtgacgtcagcttccccatcctcccagccaggctggacctccgtgagaggcctgcctgtcctgcaccctgtgcagatgcctcccactgtccgccggggctgctgggcacgccctggctggtctcttggactaggtaagctcatgagtcctctggccgctcctgctccttccctgcctctgctcctcctcggaggtggccacccccagatcccagtcccaattcggaggccccctgaggagtgctgcagggggccacaggcgtggctctgagccactctggagagtggcggggggcccagccagttctgtggctgggactttcccaggcagacaagtctgtctcttcctccccagcgggtgcagcccagaactgtcttctgaggaagaggtgctctcctgggcccccactgtccccaggcctcaggtaagcccatcagggtcccaaggaagggggtctgggtttgaggccaaccatggcagctgacctactttctagcctcagtttcccctagtgtgtgcagctctcacgctgtttgggtgagaaccaggcctctgggcttggacattctttcagtgagtttttagggtggagggatgggaaatggaagcccaggacctcagcagggtgtcttcctccgatccggggacatctgcctgtgggaggctgggcccaccctcccttgctgacctgccctgggaggaagggacagggcccagcactgcctactcccctccctgttcttcccagcagtctgagcctggctgggtgtcccctgctcctccagcagcctacttgggcctttgggtagacagattaacagacaggcgaggctgggtcatggttggaccaccccaggaccctgaccgggggctcagctcatgaccctgagcctgggagagatgaggccatgccctccagggcactcagcatgacccggcccagtggacgggactgggtagcttccttggtgcagggggctgtcatgctaggacggggtcactgaccaggccaggcccctgccccatgacttgtggtggaaatgtccttttgtttttgtttttttgcattttttttgagacggagtttcactcttgttgcccaggctggagtgcagtggtgcaatcttgcctcactgcaacctccacctcctgggttcaagcaattctcctgcctcagctcctgagtagctgggattacaggcacctgccaccatgcctggctaattttttgtatttttagtggagatgggggtttcaccatgttggccaggctgttctcaaactcttcacctcaggtgatccacctgcctctgcctcccaaagtgctgggattataggtgtgagccactgcacccggccatgtgatgggaatgttctgtgtccataatagatgctgcatattgctggcccagctcctgaggctctttggacctccaggaatcggtgtctctatcaggaacccttaaccctgacccggactcccagctgggacccggggtgtcggagtggcaagagcgctgtcaggcctggtgaagggtgtgagctgtccaacggggcagggaggaggcagggcctgttctgcagttggacagacagagccctctagctgctttctggaagactgaagggcaggtgatgttggagggagggagtgcaggcaggggctgtgagggagttcaggtcagaaacaggtggcgcctggattcaggctgtggtggtcacggtggggatgaggggctgctttggattgtgctggggatgtggggtggtgcgctgctgcatgactactgccaggtctctctgctcttagtgtctgcatccagggctgggagggggtcaaatgaatcacactatcggccccaggcccaccaagcctggggaggtggccacccttccatgatggcatttggatgttccctgtgtgtggggagggcacagggactccattcgtagaccacctctgggacagtgtgtctgcctctgaggtcagacgctctgcactgggacagggtggagtggagggaaatccagcttggggctcattggaggggcttgctggcagacaccgccctttgtgggaaactgactgtgggagaggggaaccccaacctctgtcaccacatccctcttccctgttgtcacacctgtcacctgctgccatagccatgagacttcccaagggtcactgctgccactcactgcacagcctggaagggagtccacaggggacatacagtgagcaagagacctgtgccactcaggcctcctgggggtgtccccagtgcagccatgatgataatcacagctaccattcaccaagccctgcccacagtctaacctactctattcacaacactcccagcagcaaggcaagtgaggtgctgccgtcatccaggctggacagttcagtgatttgcctgaggccccacagcaggtgagtggcaagtccagcatcagagcagggcaggctggcggtgccccctgagccccctttgccatgctgaccacatgcacatcctgggcttctgcaggaatgccctgtcccctacctgccctgctccgtgcaaaaccctctttgagctgtgcctgggagacatgctgagagaattcatggaaacaaatgtgttactgacagcctctttgcctccagagttcaactggagacagagaaaccagctagaggcagagggaggtaacacggagtcccccagaaaggtctgggctgcgcgtgcttcaggtaacctcccttgaccttcaggagaacgagaaggctgcctgatcagagagtccctgaagaagattctgtggctacaggcttcagcagagtgtgagggagaccccggttatttcctcagctatttccaccaaatcctcctgtctttcgtggccaacaccccaggcaaggcttggggcccccgtctgctgctggacggtaagtcctggccccgtggcagtgaatctgtggggcgctctgattgtgggcactatggaagctaaaccccatgctccaggtggggtggagggtcttcagaggactcctggacagtgccaggctctaggctggggtgggggacacaggagaaaccaggccaggcccatccctactggagcttctccctaagcagtggaggctcagccactgtaaggaggtaggcaaggccctgcagaaagaggggtgtggaaatctgggggctcccaggaagggccgctgctggagatggggttcttaccaggatgggctctgaagataagcagggaggatttgggagggcagagatgaggcccagagcttctggcagagggcatggcctgcgcaaaggtctgggggccggacagcctgcacgtattctgggaagcgggaaggagacacaggccttgtgtttctgaggcccgactttagactgtgccctgttggggaggggccagggaatgtctgaggctaggcctgaccctgcttcttaccccgtgggtgcagcagagccatgaagaagaagttagtggtgctgggcctgctggccgtggtcctggtgctggtcattgtcggcctctgtctctggctgccctcagcctccaaggaacctgacaaccatgtgtacaccagggctgccgtggccgcggatgccaagcagtgctcgaagattgggaggtgagcagggcagggcatgggacatgggccctgaaaactgggcaagtggacctgagcaataccttcacccccctgagactcagtttccccatgtgtaagcttcgcttggactctctcagtagcctttgggaaggggacagtgactccgagagcagggtgtgggtctctagagccaaacagggccccttttctcagttctaagagtctctgtctctttggaataaactgcactgttttgttgtttggttgttatttttacttatttcttcctatctatctatctatctatctatctatcatctatctatctatctatctatctatctatctatctatctatctatctatctatctactatctatctatctatttatttagagatggagttttgctctgttgccaggctggagtgcagtggtgcaatctcagttaactgcaacctccgcctcccaagttcaagtgattctcatgcctaagtctcccaagtagctgggattacaggcgtgcgccaccacgcccaacaaatttgtgtgtgtgtgtgtgtgtgtgtgtgtgtgtgtgtgtgtgtgtgtgtttccaagacagagtatcgctctgttacccaggctggagggcagtggtgcaatcttggcttactgcaacctccacctcccaggttcaagtgattctcctgcctcagcctccacagtagctgagactacaggcatgtgccaccatgcccagctaatttttgtatttttagtagagacagggttttgctatgttggccaggctggtcttgaactcctgaccttgtgatcctcccacctctgcctctcaaagtgctgggattaaggtgtgagccactgctcctggcctaattatggtgtttttagtagagatggggtttcaccatgttggtcaggctggtcttgaactcctgacctcaggtaatccacccacctgggcctcccaaagtgttgggattacaggtgtgagccaccacgcccggcttattctttttttttttttttttttttggttaggagacaatttctttctttctttttttttattttattttattattattatactttaagttttagggtacatgtgcacaatgtgcaggtttgttacatatgtacatatgtacacatgtgccatgttggtgtgctgcacccaccaactcatcatttagcattaggtatatctcccaatgccatccctcccccctccccccaaggaacactgttgcccaaacagggacatgaagggcttattcttttttgttgttgttttgttttgttttgttttttgagacggagtctcacgctgtctcccaggctggagtgcagtggcgcaatctcggctcgctgcaacctccgtctcctggattcaggtgattctcctgcctcagcctcctgagtagctgatattacaggcatccgccaccacgcccggctaatttttgtatttttagtagagacagggtttcaccataatggtctggctggtctcaaactcctgacctcaggtgatccgcctgccttggcctcccaaagtgctgggattacaggcatgagccaccatgcccggccgggcttattctttttttaaggtggagtcttactctgttacccaggctggagtataggggagcgatcatagcccactgcagcctcaaactcttgggtttaagtgatcttcccgcctcagcttcctaaagtgctgggattacaggtgtgagccatggtgcctggcttctactgttttattctattttagactcttatctcatgttatatacaaagatcagttccctcctaaagacttaaacagaaaaaatattatgtttttcatattttgagacagggtcttgttctgtcacccaggctggagtgcagtggcatgatcatagctcactgcagccttgaactcttgggcttaagcgatcctcccacctcagccccctgagtagctaggactacaggcgtgcatcacacctgactaattaaaaaagactgttttctagagatggtctcactctattgcccaggctggtcttgaactcctggcctcaagtgatcctccaccttggcctcccaaagtgctgagattacaggtgtaagccaccatctctagccgggaaaaaaaatgttattaataaagtatagcaatttccctttttgtcccagttataaaagtcatgtacatttgtttgcttgataaagaggaaactgtctgggcaaggtggtccacacctgtaatcccagcactttgggaggttgaggcgggcagaccacccgaggtcaggagttcgagaccagcctggccaacatggtgcactctgtccctactaaaaatataaaaagttagccgggcatggtggtgtgcgcctgtaatcccagctactcaggaggctgaggcaggggaatcacttgaacccaggaggcagaggttgcagtgagctaagatcatgccactgcactccagcctgggcaactgagtgaaactccctctcagaaaaaaaaaaagaaagaaaagaaaagaaaaagaggaaactgtaatcccagcactttgggaggttgaggcgataggattgctttagaccatgagttcgagaccagcttgggcaacatagaaagaccctatctctacaaaaaagacaaaaaattgccaggtgtggtggttcttacctgtagtcccagctactcagcagactgaagtgggaggattgcttgagcccaggaggtcaaagctgcattgagccaagactgtgccactgcacttcatcctgggtgacaaagtgagaccctgtctcataaaacaaaggctgggcacagtggctcatgcctgtaataccagcactttgggaggccaaggtgggtggatcacttgagcacaggagttcttgaccagcctgggcaacatgatgaaaccccatctctacaaaatacacaaacaaacaaaattggctgggcatggtggcatgtgcccatagtcccagctacttgggaggctgagatgggagggtcaattgagcccaggagactgaggctgcagtgatctgagatcacaccactgcactccagcctgagcaacaaagagagactttgtctcaaaaaaaaaaaaaaaaaaaaaaaaaaaaagaggccaaggcaggcggatcatgaggtcaagagatagagaccagcctggccaacatggtgaaaccccgtctctactaaaaatacaaaaattagctgggcgtggtggcatgcacctgtagtcccagctactcaggaggctgaggcaggagaatggcttgaacccgggaggcagaggttgcagtgagctgagatcgtgccactgcactccagcctggcaatagagcaagactccatctcaaaaaaaaaaaaaaaaagaaagaaagaaactaaaaacaaaaaccccaaaactcgaatggacttctcttccatcctcctttgggcaggtgggcagcagggtgtgtatgcggggccagggtggaagcctgcaggttctcatgcctttatgtgccacatggcagggatgcactgcgggacggtggctctgcggtggatgcagccattgcagccctgttgtgtgtggggctcatgaatgcccacagcatgggcatcgggggtggcctcttcctcaccatctacaacagcaccacacgtgagtgcctcgggagaggagagggagaggggcagggggtgtgggttgggccgaggcacagctgggcggtccccaggctcacgtggcataaagggtttgggtgggcgggcctgcctacctgcttctccttctaggaaaagctgaggtcatcaacgcccgcgaggtggcccccaggctggcctttgccaccatgttcaacagctcggagcagtcccagaagggtaagccatgcggcagacttggggcgtgggtgcagagctggctgagccaccgggaaggggccttgcccacaggagcctgctcccgtcagggttcaggggcagttctgtcaccccccatcccttcctgtccccatagcaccctcccacaatgagtggtcaggaccatcatcaccatggtaaagggccgggagcttctgttatttctgctaaggcctccggggccactctgtgcagcacatggagagaataattattatgctagcagacctcatggaccagggctcactggggcccacactctgctctgtgcttttcacccatgagcctctcacaaccctccctgctcctttgggctaggggatgctgtgtggattcccattttacagggtggggatgctgaggctcagacaggtcacgcaaatcagttgaggtcacacagctgggaggtggtgaagctaaaattgaacccaggctgtctataccgtgccttttcaacaggcatcccattcactcatttgttcatttgtggggatggtgctctagaatgtgaggtggagtctctcttttctaatctggtcttaagtggagaggaggcccccaaattccccaggtacctgaagggaagccactgtccatccaggaagccactgtctgtcctcaaaggtggtacagtagattgtgagataaaagttggaggatgggagggtctcaacaactcacgcctctaatcctagcactttaggaggccaagtcaggaggagcgcatgagcccaggagtttgagacctgcctgggcaacatagcaagactccatctctacaaaaaacggaaaaaaaaattagctaggtgtggcggtgtgtgcttatgttcccagctacttgggaggctaaggtgggaggatcacttgagcccaggaggttgaggctgcagtgagccatgattgtaccactacactctagcttgggcaacaaagtgagaccctgccaaaaaaaaaaaaaaggctgggcctttttttcacaggctcacgcctgtaatcccagcactttgggaggctgaggcagatggatcacctaggtcaggagttcaagaccagcctggccaacatagtgaaaccctttctctactaaaagtacaataattagtcaggcgtggtggcacaggcctgtaatcccagctactcaggaggctaaggcaggagaatcgcttgaacccaggaggaggagattgcagtgagccgagatcatgccactgcactccagtctgggcaacaagaatgaagctccgtctcaaaaaaaaaaaaagttggaggatggaggggcaggacacactcaccatagcaggtcttagacttcaggtgggggtcctgggtggtgccctttggagtcttctgcaacatactcaatctttgacttttttcttttttttttcttttttttttttttgtcacccagactgtcgcccaggctggagtgcagtggcacgatctcggctcactgcaagctctgcctcctgagttcacgccattctcctgcctcagcctcccgaatagctgggactacaggcgcctgccaccacgcccagctaattttttgtattttttagtagagacgggttttcactatgttgcccaggctggtctcgatctcctgacctcgtgatcccccggcctcggcctcccaaagtgctggaattacaggcgtgagccactgtgcccgatcaatctttcatttttttttaatactcattgagaaactcagcatttgtagacatgaagttgctcagggtaagagaatgcgggaatcataggcttggcaccttgtggactcttagaatcatttatttaacttgaatgtattgagtattctcttaaagaatcagctgttgttcctgaagctggggtgaaaaacaaagatggcagatgaaatctgtgacactccaggtgggaggagaaactaggcaggtgcaggtgtgttacgggctgtagaaaaacaggtctggagggcctcaaaatctgggactgtatagagggtgacctagtcagggaaggggacatctgagcaaagacccagaggcagagatggggtcaggggagttatctcctggtctgctatccaggtgtgatggcagggacagagccctgtggggagctggggaggctgcagcaagtgatccaagggaaatggcccaggttgtgtgggatctcttaggttatggtgaagcctctgcttcctgtctgagggaagtgggggctcgtggagtatgtgagtggaaggggatggatctggcctatggaccccgtgggttgctgtgtaaggggcagggagcatgtggggacctgtctggaggtcactgcagtaattcgtggagagggtgctgggaagtggctgacgctggacagacacacttggaagtggagtctgtggatttgaggatgggttgggtgtgacgcttgtgtagggagtccccggggacccctgatcttttgtctgtacctggaaggatggggtgaccctaatggagacaggcagggttctcaggaagcaggttgagcagacactcaggagctcggttttgggcacgttgaagtttgagatgctttcttcgagcaggcaggtagatcctcaggtctggtgatcggaggagcagcccaggccagcaggtcaatttgagagttgtcagtgcataaatggaggctgaagctcagatgtcaagcagaccaccaggagagagagcaaagacagaggggagagtaggagctaggatggcaggcgggggagactcgggtggagccaggtgctgggatgcaggggcagctctcagggaaagtgatgagcccagtaaagctgagagggggcactgggtctggcagtgtgggggtcaccagagaacttggcaagtgtgctggcatgagagtctgattggcctgaggtcaggagaagattttttttctgatattgatacatgatattttctatatttatgggtacatgtgagtgcttgttacatgcatagagtgtataatgatcaaggcagggtatttggagtctccgtcaccttgaatatttttcatttctgggtgttagcaccatagtcctctcttcgttactttgaaatatacaaaatactgttgctaagcatcgtcaccctggtctgctatcaaagattagaacttctcctgtcttggctgggcacggtggctcacacctgtcatcccagcaccttggaaggctgaggtgggtggatgacctgaggtcaggagtttgaaaccagcctggccaacatggcaaaaccccatctgtactaaaaatacaaaaattagcctggcgtgctggcctgtgcctgtaataccagctactcgggaggctgaggcaggagaatcgcttgaacctgggaggcggaggttgtagtgagctgagatcatgccactgcactgtagtctgggagacagagcaagactccatctcaaaaacaaacaaagaagaaaaacaaaacaaaacaaaaaataacttctgtctaactacaaggtggaaggaatcatgtgctgggtgtcagaccttccgggatgtatgtgcagcttctaggaattgaaaccaccagctcttggaaacttgtgccaggcttcagggtgggagaggcagttctagagccacagctgccaagccaagccaaatggccccatcatctctcgcaagagcaggagagtccctgggggcagaggccatagttgtacctttctgggcaaagggtcagtgtctgtagtgtccttatgggcagcggggctcaggggggaagcaggcccaggggtgtgtttccaatgacctcctcaaaagtcagaactggaaggcaaaaccccttataggctgagtgcacctgtaatcccagcatgttgggatgctgaggtgggaggattgcttgaggccagagtttgagaccagtcttggcaacgtagcaagacccctgtctctacaaaaaataaaaataaaaaattaggctgggaatggtggctcacgcctgtaatcccagaactctgagaggctgaggaggatggatcacctgatgttaggagttcaagaccagcctgaccaacctggtgaaaccccgtctctactaaaaatacaaaaattagcaaggcatggtggtgcatgcctgtaatcccagctacttgggaggctgaggcaggagaattgcttgaactcgggaggtggaggttggagtgagccaagattgtgccattgcactccagcctgggcaacaagagtgaaactccatctcagaaaaaaaaaaaaaaaaaaaaaagccctgtgtagtggggtatgtctgtagtcttaggtacttcagaggctgaggtaggaggatcgcttgagcctgggaagccaaggctgcagtgagccatgattgcaccactgcactccagctgggacaacagaatgagaccctgtctcaaaacagacaaacaaacaaaaacccttatagttggatggagaaactgaggctgggagaggggacaggacggaggttaaggctcagtcttgcctctctggggccgtagaaaagaggcagggagccctttcttggggctggctgtgtcttgaaggtggcctgtgcttgacctcggtcaaggtgggatctgctcttgttttggcacattctcgtggagcccatgagtcttacaggataaggccttgtggtcagtgagatgggagggggtctggcctggcacaggattttagacatgcaggcacctgcacagacagacacctcatcctgggacagcaaaacccagccgcatgctactgcttcccctgctgtgccctcctcagacatccctggtccatgtacactcctacctgctgagcccctcctaaaaaaaaaaattaaacatcccctcctaaaaaaaaacaattaaaattaaaaaataaatttaaaaattaaaaatccccttctgctaggtgtgctgttcacgcctgtaatctcagcgactcaggaggctgaggtgggaggatcgcttgaatccaggagttcgagatcgggctgggcaagatggcaagaccccaactcaaaaaagaaaaaaaaaaaatctttcctcctaagcctcattgccccatctgtaaaatgagtcagggactgtgcctgggatgctgcctgcgagagatcccgatgtcccccactcagggtcactaactatggctctctctccccaggggggctgtcggtggcggtgcctggggagatccgaggctatgagctggcacaccagcggcatgggcggctgccctgggctcgcctcttccagcccagcatccagctggcccgccagggcttccccgtgggcaagggcttggcggcagccctggaaaacaagcggaccgtcatcgagcagcagcctgtcttgtggtatgtctgtgggtgcggccccctgacacaggcagggcaggcacagcccaaggaccttgcaggccgtagcagcagtggagcagccctctgccttcaggaccctgtgctgataatgggatgaggagatacagacccttcccaccacgtgtggggacacattctgagcgtggggtcccagtggccactgtggctggccatgtgtcctgagtggcaagggacactaggaagctcccggaagggacactaggaagacgagcgctgagtgacagggccacccacctgtgacaggcgctgcccctgttctgctccgttctcctgtgtggacgggtgtgaggggtggtctagctgagtccaccccacctgctgcctcacatgagccccctctgccccagtgaggtgttctgccgggatagaaaggtgcttcgggagggggagagactgaccctgccgcagctggctgacacctacgagacgctggccatcgagggtgcccaggccttctacaacggcagcctcacggcccagattgtgaaggacatccaggcggccggtgagtgggtaacctcaggggcctgggtgaggaactctgcagtggaaaccctgagctgtagcccagagctatggggtcctcctgtcttgcctgagcctgcaggaagttcctggtggaggagggtcagtgactggccatgtgggtccacagctcctgcttatatcaaaaccaagagaggccacacagtccaggagagcaagtccctgttggggtaaatgcaggtgtaggcaagagccagggctagggaagcactagaatacagcctgaagatccaggaggacttcttggaggaggtggcggctgggctgcagataactttgttaggcagagagaggaagggattcctagcagaggaacagctgggctaaggcccagtagagggcgctttgattcaccaagagggttacaagggatgagggtctccttgagagaggcatggggaaggggatttgtggggcaggggcctggagcttggctgtggctttcttcaggtaatttttgtcacgtttcatggaggagggtgattagcgtgtcgacctttaccactgaggctggaaattggcatgccaataccctgtctgtctggagctgactccaggagaattaagagcctccctcctctattcattcatcatgaggagaagaggccaagcggcagggagactggcaggaattctccagttagaaaaggccctctgagccaggcgcggtggctcacgtctgtaatcccagcactttgggaggccgaggcgggtggatcacctgaggtcaggagttcaagaccagcctggccaacatggcgaaaccctgtctctactaaaaatgcaaaattagtcaggcatggtaggttgtgcctgtaatcccagctacttgggaggctgtgccaggagaatcgctagaacctggggggctgaggttgcagtgagccgagattgcaccactgcactccacagagtgagattccatctcaaaaaaaaaaaaagaaagaaagaaaaggccctctgaggccaagcttggtgtctcatgcctgtaatcccaacactttgggaggctgaggtagaagttgaggccaggaggtccaagacaagcctgggcaacatagtgagtctacaaaaaaaatattgagaaactacataaatatagtgggggtgggggtggggaacaagaaaacaaaaaattcaaagcatagtgaaaagaaatatagcaaaacccggccgggcatggtggctcacgcctgtaatcccagcactttgagaggccgaggcgtgtggatcacggggtcaggagatcgagaccatcctggctaacacagtgaaacctgtctctactaaaaatacaaaaaaattagccacgtgtggtggcgggcgcctgcagtcccagctacttgggaggctgaggcaggagaatggcgtgaacctgggaggtggagcttgcagtgagccgatatcgcgccactgcactccagcctgggcgatagagcgagactccgtctcaaaaaacaaaaaaaaagtagcaaaacacaacaaaaaaattaaaatttgctgggtgtagttgtgcctttagtctcagctactggggagggtctgctggaggatcacttgagcccaggagttcaaggctgtgattaagccactgcactccagcctgggtgacagagcaagatcctatctctaaaaaaaaaaaagaaaagaaaacactctgtggccacagatgagagaaggcagacaggaagccagtaagccaagcaggcaaagggcaggtggccccagcccggctgttgggtggtgagcagtgtcagggagacaggagtgccggagctgatgaggttcccaaggaggtgaggttgcctgtggccccctcccagggcacagtcccacccctccagtagtgcactctgtcctccctggtaggtacaggcttttccccaccaccatggtgcagccatgcctgcccccaacaccactgctgcagctccatcctccacgcagtggtgcagccccatcccagcacccatttgagctgctgtcccattgcagggggcattgtgacagctgaggacctgaacaactaccgtgctgagctgatcgagcacccgctgaacatcagcctgggagacgtggtgctgtacatgcccagtgcgccgctcagcgggcccgtgctggccctcatcctcaacatcctcaaaggtgagtggtcgcaccacagccgtgtggtaggacccatgacactgcctctctctccccacgccccacccctcctgcatctctgctcgccccccatgccacgtctttccatcactgagctcccgaggtgtgtccctgcgtcacagttcaccatgtcctgaaggaggcagtgcagagcgacagggctgaagcgggcaatgctcaagggttggaggaggaacaggagtcatcaggagggagagaggtgcaggagctcagggctgcagggccggtccagagggtaccccggtccagtgggtgaccctgccacttggtcattgaatggccagagctgatgcgtgacgtgaggtccaggctcgggagccctcaccttacttcactctcaccacagccttctgaagcagctgctgctattggttattaaacgctccttgaggtgggcaaagtggctcaggcaggtgttaaccctctgagcccctcagagcctctggggctcagcaacatgcacctggctctgatcaaccagggtacaacttctcccgggagagcgtggagagccccgagcagaagggcctgacgtaccaccgcatcgtagaggctttccggtttgcctacgccaagaggaccctgcttggggaccccaagtttgtggatgtgactgaggtaaggggcaggggctggcccactgtgggtgtggggcctgccatagaggcatcaggtgggctccccagggtggctacagcctcacatatgctttatgaatccattcctgccacagacttcgattgcgggcctactgtgtgctcggatggactcgtgggtgacccccagtcttggcttctgccgcacagaactgacagtgtggggaattagtggccaccctcctacctcaggtcctttgcacatgctgtggttctcgagtgctcagtgctgagatgaggaatgcatgggggcattgcagccctcgggcatggtgagatggatgggtgaaagggagagggccaggtgaacagagaccttggccacccactccctgtcactccaaactaacgcttcccagatgccaccctcagccctgcaccacctgacccactcactcagtagttgccccagctccacactgggtccctataagaccctgtcatatcccttcccgctgaggatcctcacatccctccttacctacttgggtccttggcattcctgggcggatctgcagacccccccacactgaccagtgacctcccaggaggggcgtcagctgcccaggtggtgtcttctctttccccgtgagcattctgcacctctgactcccgctgcagccagtgacctggtgtcttgtctctctgaggggacagagccactgcagtgtgtccctctgccctcctttttggctaaggccagctccttcatctactcgctggctcggggtgctgttcctacaatgctcctttctgcctctgatgatttacttctttatcacggcttattcccgaaagaaaggcagctgttgttgctctagaaacttctatctgctgcctccttctgtcctttgctcctcttagagcaaacatggctgggctatgtcctctctcccttcagggtatcccctcccctgctctatccccatgccaccagatcgccatgtccagcctcagtttccccatcaggccccactcagcagcatctcacacagctcaccacactctcctcgagttttcattttgcaaattttcgcacctacaaaaatgtaaaaaaaccccaaaactgcccaagcatcaatgctcccttttcctggagtctgcagtgtggatgtttctgtcggatttcctaactctctccgtctccacccacatctattgggattcgtgtttttctgagggattccacagtaggttactgatgtcgcacctcagggtgtgtctcaaaagtgagacttgaacatagcacagcaggatgtcggggtgacacaacctgttgtcccttctctttacctacagtaggctcccttggctgttttgtttttgttgtgtttttgtttgtacacagagtctctgtcatccaggttggagtgcagtggtgtgatcttggctcactgcagcctcaacctccagggctcaagcaatcctcccacttcagccccctgaacagctgggaccagaggcacgtgccaccaaacctggataatttttgtattttttttagagacagggtcttgcccagactggtctcaaactcccgggatcaaactatcttcccacctcagcctcccaaagcgctgggattacaggtgtgtttttttttttgagacagagtctcgctctgttgcccaggctggagtgcagtggcgctatctcggctcactgtaagctccgcctcctgggttcacgccattctcctgcctcagcctcccgagtagctgggattacaggcgcccgccacaccgcccagctaattttttgtatttttagtagagagggggtttcaccgtgatcgcgatctcctgacctcgtgatccgcctgcctcggcctcccaaagtgctgggattacaggcatgagccaccgtgcctggcctgttttgttgatttttaaagcccagggcagtagtcttggaaaatgtcccacatcgtggatttgcctttctgtttccttgagggcagattcagacagaacacctttccctgggattggtcaactaatccgtggggtgttgctgaaactttattttattttattttatttttgagacggagtctcgctctgtcccccaggctgtcccccaggctggagtgcagtggcgggatctccgctcactgcaagctccgcctcccaggttcacgccattctcctgcctcagccccccaagtagctgggactacatgtgcccaccaccgcgcccagctaattttttgtatttttagtagagacggggtttcactgtgttagccaggatggtctcgatctcctgacgtcgtgatccgccctcccaaagtgctgggattacaggcctcggcctcccaaagtgctgggattacaggcgtgagccaccgcgcccggtgttgaaactcccttgaggcattttcttcggccttcgggtccatcctctgtctcctccttgacctcctcatctcctcgccactgccttggggaccttggccaggctcatggcatccagcagccactcaatgtcaatacctccatgttcatctctcagcccgcccttgcccgtgaacccatgcttatttatttattttttttaatacgtgcacccatgctcttcaggtctgatgaagtatccaaaatcaagctcctgaccatccccaaacctgccccttctgcagggtttacctcgctagtcggcgccatccttgattcttctctttctcccacccaggccatcatctcttgcctggttgatacccacagcctcccctttgggctttatccttatccccatcatagctgccagagggatcctgtgaaaacactccccagcctgctcattcctctgccctaagcctgcatggcacagagcaaaagccagttgttatgggacctaggaagtcctgtgggatgggccccagcctgcatcttcatcctcttctccccaccccactccattcactctctgcctatcactcaccagcctataccacctgcctcagggcctttgcactgaccatttaggccacattccaggctcttttcacacgttgcctcctctgagaagccctccctgaccactctgcccatacctcatgcctcttgattccccttacctggcttgtggtttcagcactttccctgtgtgtgtttgtttttcttggcatgagagcaggacctaagtgtctgttccctgttgattccccagtgccaggcatgcagtgcaaactctagaaatattttttgcatgaaggaatgagtgattgaatgcagcaagggtctggaggctgaggaccaggcagacagacattcagagttgctggaacgcgacagagacagggagtcagactggtcatgcaaggtcctgggcctgcccttgggtcctggggagccacggaaggttgtgggtgccagagggttgcggtcagagtcacagtcaagggccttctgagacctgtgccccctccccaccctccctccccacctcctcaggccagctctggggtctcggcaggtggtccgcaacatgacctccgagttcttcgctgcccagctccgggcccagatctctgacgacaccactcacccgatctcctactacaagcccgagttctacacgccggatgacgggggcactgctcacctgtctgtcgtcgcagaggacggcagtgctgtgtccgccaccagcaccatcaacctctagtaggggctgctgggccgcctgggtgggaaagggccaggggcgggtggcccagggactgcccacttatccagtaaggtggctccgtcacctcttttcctggtgggaaactgaggcccaaccttggtagcttatcctgggcctctcagtgagtatgtttgagcctcagtgggtggatagggaccaggctgggccaggcaaggtcgggcactgtctgacctggctgggcggtagctttggctccaaggtccgctccccggtcagcgggatcctgttcaataatgaaatggacgacttcagctctcccagcatcaccaacgagtttggggtacccccctcacctgccaatttcatccagccaggtatggggtggaggtccgggggtgggggactggggtggagaggggcgggtgtcctgggcaggcagctgacgggcatccctgtcttctcccatcggccgcagggaagcagccgctctcgtccatgtgcccgacgatcatggtgggccaggacggccaggtccggatggtggtgggagctgctgggggcacacagatcaccacggccactgcactggtatgtgtcacaccttttctccctggccgtgcccaccctgcacagcccccaagccatgctgatcacactcccatgccccaggccatcatctacaacctctggttcggctatgacgtgaagcgggccgtggaggagccccggctgcacaaccagcttctgcccaacgtcacgacagtggagagaaacattgaccaggtgggccgggggttggagaaactgagtcaaggtgtggggccccagggcatcctgggctggaggcctggatcatcacagagtggacaatggttggtgtcctctctctagtgcctgggccatctggagcccctgtgccatgagggccaagccccctgctccagtgagacccagcaggccccaacctgctcttcctgatgacctggcccgaaatggcaccacctgggctgaggcctgtgaccacacagatgtggttcaggtggcatctggagccctgctcaggcttcccctctcctcccacccccaggcagtgactgcagccctggagacccggcaccatcacacccagatcgcgtccaccttcatcgctgtggtgcaagccatcgtccgcacggctggtggctgggcagctgcctcggactccaggaaaggcggggagcctgccggctactgagtgctccaggaggacaaggctgacaagcaatccagggacaagatactcaccaggaccaggaaggggactctgggggaccggcttcccctgtgagcagcagagcagcacaataaatgaggccactgtgccaggctccaggtggcctccctggcctgtctccccactc

SEQ ID NO: 15587 - DNA, 53972 bp, Homo sapiens
ctcacgccttcgccgtagcatctttcgcagcggaccgaagagaagaaaagtaggccagagccggtgaggctggggacgggcgaggggaggtcgaggcgcctgtgaggggccaggggctggagaaagacttgctgcatggaactctgcggggctcggggagggaagaaagcgggaagcttgggccacccaaacatcagcgtcgcctcactagctcctggaagtaagttcattagctttcccctcaacgtgcatgcttctcacattctgtatctctccaggtgagtgtttttcaaagcttccaggcagtaatctcgaagtcatttctgattgactatctccttcccccaaatcctatgagtttttttttgtttttttttttttaagtagagacggggtttcaccatgttgccctggctggtctcgaactcctgggctcaagggatccaccggcctcggccttccaaagtgctgggattacaggcgtgagccaccgcgcccagccggtcattttttaaaaagttctttgtatctctgccccagtcccctttcaggcaatggtcccctcatgctttccacactgttgcagcagttttaactgttgcagaagttttaacaagtttctctgcttctaaaccttacgttctatccattttgtaaataaatgctgctatcttttcattgcgtcattctttacatataattctgcagtggttctccactaccttcagcataaaatctagactcctaaggctgaaagccagggatcctcaccaaaggagcctgtcctttcaacctcatgttctcctgtcttaggtacgcttaagttgaaacttagagttgttgctcatctcaataaaaagttcactgcttgatgcttttgattaggtcaagtcaggtgctttccctgattttcctccatgacaagcatttcctgcatatagcacgttgtcactttgatattttctcaatatccttgatagtaaaataagtgaagggttaaagggctgaattaaaagtacagcctgctctcctagatgtgcatggtcctttggtctgtatctgcaccttccatagggtagccactagctacatgtggccgttgaggacttggaatatggccactgggattgagggactgggtttttttattttaattctattgtgttttagttaagtttaatttaaatagctacgtgtgtacatgagctgctgtattggacagctcgggcctgtattattctcaaaacgtaatcatctacaattaagggttaacaaataacagtgcaacaaattaacattccagtccccctcccctgacacacacagtattggctaatggtcctttagctgaagattaagggacatagggtagcggggacacatgacccatgggagatgctctcttttcattcctagttttacttctgtccatcccatcattcctcctcaccccacatcttgcacatatttgccagatagtttcctccaaaccaggagctgagcttttttttttttccttggtagaaaatgcagctttggtgtttttgctaagttttatggagtgccaggccttaaaggaagcatgatgtgtgccacatgccttttcagactctgaaagatgaactgactgttgtctctctcattgtagaactctcttcctgccaagatgtctattggtgtgccgattaaagtactgcatgaggccgagggccacattgtgacatgtgagacgaacaccggtgaggtatatcgggggaagctcattgaagcagaggacaacatgaactgccaggtattctgctttgcatgtgaggctgtgtgggaggaatggccctgtgtcttgaaggacagaaaagtgtgtgttgagggtctctggaaattgttctcattcagcagtgatttcctaagtgcctaatgcataccagtcaggtgctgttataggctctgggggtgtgggcatgaacgagacacataatcttgaggcagaaaagccatttggaggtttggaatattttactttgtcctttttgttttttccatccccaaatatgggggtctatttgggagaagtgctacttccttcagtagaatccttcagattcagggccattatccatttgcctccacttgctttgcgattagcagaatcttctcacctactgtatttgtttcccttttctcttggaggaggagtctcatttgattattgcaactaccttgtgaggtaagcaggtttggtgatagtcttgtcatccataaaatagggagaatgagattaaagggctcatcactctgatgataaataatggagtagtttcctgatatggtgtccttctcatggcacaactttgccttttgcatagtcatctgaatttttatagcattgtttttcagttgtatcttcacactttctttgttctttaaaccactggttaagaacttggacttgggagtcagagagagatgtgggtttgaatcctaattatatgactttagatgtattaaccactcagttttctcatctgtaaaatgggggtggtattatgttgggttctttgatgtagatgccaagacagaattttgcaaggtatttattgggggaaatgacaataaaggataaaagagcaaggaagcagtagtaggcagggaaattttcagtctatggtgctggtctgactggtgaaatgagaggggaaaggaaggaggattgagcaggaagagccttagactacagcgtagttttgaggaaatctcagcaaggcagcgattgctcgttagaagagtctagcatggggcagaaatgggcggactggcacccccggtgtgttcaggctggcaacatggggagagagtagcctcaagttgaatgccatggtggactgcaaagatggagattgtcggctgcctgcactcctcatagcctgttctcttttgaagggagatgtgagcagcacacccttaagactgccacaggggtaatatccacacccccaggacttttacaaagatcagatgagctgtatgtgtgccatagctgctcagtgcctcacatactgtgagtgttcaacatatgatacctattgcttttttccagatgagaaggtcagagaggtaaagcaccttacaccgcggtcaggcatcctgaccatccattggtttgcagggttcatttatttgtgatttttctgtagctttgagcgtctgtcatcttcctgcgaggttgacaagcttggtcagttccctgaatgcagagaagtagacctctggtgactcaggtttattgcattactgtcaatagatcagtttatctattgagggtagataagtttatcatctctcatatatccagtcctctggcttaaggcatgctcatccactttaaggttctttaatttggtgaggagaatgcaagacttgggttagtgaagcttaatgggtttgttcaattagctgtatgtatttggacaacttgctgggtttccagggcctttgtcatcccatccgtaacgtgaaggtgtctaaccagataaccttggtagccattcagagatgcagtcaacatgacacaaagtgcacagaccttggtgtccgacagacctggaatcagcttgtagcctgccccctagggtgacttggggcgagcttagctttggacctccttcatcctctggtccctcctctaaatcagggataaaaatagcaccttggcctcagaaggaaccatgcctgaccaatggtgggggacagccacctgcctccctgcttgtatttgtatgctagtgctaccataacaaagtttcacagactgggcagcttagacaacacaaatttattttctcatagttctgaaggctggaagtctgagatcaaggtgttggcaaggctggtttcttctgaggaatgtgaaggaaggatctgtttcaggcctctctccttgcttatatatggctctcttcctgtgtcttcacttggtcttccctctgtagtgtttctgtccagattcttcttataaggataccatgcatgtaggattagggcccactctaatgacttcatcttaacataattatgtttataaagaatttttttttttttttttttgagatggagccttgctctgtcacccaggctgcagtcttgctctgtcacccaggctggagtgcagtggcgcgatcttggctcactgcaacctctgccttccaggttcaagcgattctcctgcctcagcctcctgagtagctgggactacaggcatctgccaccatgcccagctaatttttgtatttttatatttttagtagagacaggtttcaccatattggccaggctggtctcgaactcctgaccttgtgatctgctcgcctcgacctcccaaagtgctgggattacagatgtgagccaccatgcccagcttgcttgcttttttttttttttttttttttttttttttttttttttgagagtctcactctgtcgcccaggctggagtgcagtggcatgatctcagctcactgcaacctctgcctcctgggttcaagcacttctcatgcctcagcctcctgagtagctgggactatgcccagctagtttttcgtatttttagtagagatagggtttccccatgttgcccaggctggtctcaaactcctgagtttgcctcagcctcccaagtgctaggattacaggcgtgagccactgcacctggccttttttttttttttttttttttttttttttgagacagaatcttgctctgttgtccaggctggagtacagtggcacaatctcagctcactgcaaacctccgtcttcccgggtttaagcaactctcttgcctcagcctcctgagtagctggggttataggcatgggccaccgtaccccactaatgttaatattttttgtatttttaatagagatggaggctcatcatgttgcccaggctggtctctaactcctgagctgaggcaatctgcccaccttggcctcccaaagtgctaggattacaggcatgagccactgcacccagccttttttttcttttcctttttcttttctttttttttttttttttttttttttgagattaagctttggtctgttgaccaggctggggtgcagtggtttgatcatagctcatgggcagccttggacttctgggctcaagagatcttttcacctcagtcttctaagtatccaggactaccagtgtgccccaccatacctggctaatttttaaatttttttgtagagacggagtcttgatatgtttttcaggccagtttcaaactcctggccacaagtgatcctgctgcctcagtctctcaaactcctggaattacaggcatgagccaccacatctggcctgtaaagattttttgtctctaaatatgatcacattctgaggtgctgggtattaggacttcaacaatgaatttttttgagggatacaatttagcctgtaacaggatgtagaggcctcactgggtctatcaaaacctaggcacattgaataagagccagcagactgtggcgtagctaaagctggtggtgggtgaactctgagcacagtttagtttgttcagcacatctcaggctgtgaggcttgcctgtccttcccagatccagtcattctgccttttgggaatgagaacatcctcttagcacttttccttgcttgttcaataacattttctgttataaaagtggggtgggacaaaatgtggtggctactcctataatcccaacactttgagaggctgaggcaggaggatcacttgagcccaggggttcaagaccaacctgggcaacatgacaagactttgtctgtaaaaaaaataaaatagacggatgtggtggcacatgcctgtagtcccagccattcaggtggaggctgagttgggacgattacttgagcccaggaagtcaaggctgcagtgagctatggagtgccactgcactccagcctgggcgacggagtgagacctagtctcacacacacacaaaagcacaccacaacgattcggaaaagataaatagaggatctcactctgttgcccaggctagtcttgcactcctggacttaagcgatcctcccaccttggcctcccaaagtattggaattacaggcctaagccacacctgccctgttttggggttttagtatttactttttattctatcctctttcagaaatagttagaccctgtctcttctgaaaagcaaaaaagtttaaaaattatctggatgtggggctgggcactgtggctcacgcctgtaatcccagcactttgggaggctgaggcgggcagatcacgaggtcaggagattgagaccagcctggctaacacggtgaaaccctgtctctactaaaaaaaatacaaaaaattagccaggtgtggtggcgggcgcctgtagtcccagctactcgggaggctgaggcaggagaatggcgtgaacccaggaggcagagcttgcaatgagccaagatcgcgccactgcactccagcctgggcgacagagcaagactccatctccaaaaataaaaaatatattatctggatgtgatggcttatgcctgtagtcccagctactccataggctgaggcaaaaaggatcacttgagcccacccagcagttcaggctgcattaagctctggtcgcaccactgcactccagcctgggtgacagagcaagaccctatctctaaaattaaaaaaattctatggcaggataaaagtagatgcatagatcatggtgcaggtaagctggggtagaatgtaaaatgaagccaagcagtcagtatccagaaatgtaaacctgaatctctctgtacattgaataaaggtatattccagtgtaagattaagcagggaagatcatcagttccaaaatgcatagtgttcttaagttaaaatagcaattgtgtggatttccctggcactcagatacaggagacactattagatgatatcctcgacaacatccccatacaaaatacccttttatggtccctcaagtagttttaaagtatcctgttatcttagcactgtttttgacatttgaaaatgcaaaatatggccaggcacattggctcatgcctgtaatcccagcactttgggaggctgggccagggggatcacttgatcccaagagtttgggaccaccctgggcaacacagtgagaccctgtctcatatatgtgtgtgtgtgtgtgtgtgtgtgtgtgtgtgtgtgtatgtgtgtatgtatgtatatatgtatgtatatatatgtgtgtgtgtgtgtatatatatatatatttttttttttaaaggaagaagaggaaatatgtgtatgtgaaactcaggatgaggtccctgaaatggtgcttatcgggtcagagggtgtgcatctgaggttaagctgggaaggcagggagcttttgttctccttctcattccgacagctgcaagccaagcactggtggccagtgctgcaggatagggcatcagctgcaggatatggcatgttggtcaaaatgctgttggcataagtgagaaaaataacaatactccaaaatatgtccccagttttataaaaatggacccaaattataaatgatacaagcaaatacagagagtaatggtcaaacccatttcactacattcaaaatgacttaattcttagaagttttggtgggagaatgtggtgtagagctctgcacaagcagacattgtgcttttggggcttcaacatgaccacccaatcactgatgggactgtttgaaatctgttttgttggctttggcatataatagccatctttggaaaactggtctctgtatggaatatggtcttgtgtcactgtataaaaatgagaacccaaaagaagctctcacatgattgggtcagaaaattgcccataactattgctaggaaagtttttgaaatctctgaattcaatgtaattgaatttctttagacacctagccctctaggttgaaggaaaaccagttttttaaacttatcgtatactttttttttcctgtactgtttgtgtgtggattgcattcatcatgctcctctaccccataatacttttgtatttcctaagaacaaagataggtagatggccttagttggtattcgtattatagcagtggcatccaagcacctctgcctttgtgtatgtgtgaaattgtcctaaagaatgcatttctggtgtattgacaggcctgagacaccccaacacaccttcacagtcctggagctagctttctccatcttggccccaggtatctaagaaagtcccaccactttgtgctacaaagattctctctctccccctcaggatgtcatttcagttgggtacctggcttataccatatgtgtttcattgtggctgttgaggaaagttgattaaactgggtgttcctgcctggagttgattaggatctggttcactcaaaagttgctgccttgggcttgtgatacaaacacaggtcaggcttattagcaagctctagcaggcatgtgtgcagtgagactgtggggttttgtccacagcaagctgttcttagccagtgctacagggaaagcgagagcagtagtgagcctggttgttagggttaaaataggagtcagaggacactggactctcctgcttcagccaggacatagttcatttatggaaatgcctagattaagtcttgtcggacttatgcaacagcttctgtcaggaaaggagtgagatgtgcccctgtgctggagggagtgtggcttagcagtggcacagctcccaaaacacattttagctgtcaatcagatttagcatgtactgagtctctattatgtattaggcaatagagacagcatttagacatactttgccttgttcatttttttttttttttttttgacagggtcttactctgttgcccaggctggaatgcagtgtcataatcatagctcactgcagccttgaactcctgggctccagccatcctcccacctcagcctcccaagtagctgggaccacaggcatgcaccaccacacctggctaattgttaaaaatttttgtagagataggatcttgttacatttcccaggctggtctcaaactcctgacctcaagcagtcctcccaccttggcctcccaaagtgctgggattacagacatgaaccactgtacctggcctgatttgctttttaacaatttcaggaaatgtgcagtggttaagagtgtgagttagaaagaactgggttcaaactccagccaggccatgtaagcgtggtgtgacctcaagcaggagaatagagggaaagggcatgggtttctggggacagatctgcctctgaatggctatgtcacttcatctctttaccttgtaggattttgtggggtaacatgagctgccgtggggaaatcacctgggccagcacttgatgtctaataagtgctcagtaactgttggctttgttgtcttgtattttcaaaactcagctttgtagttgagggaacggaggctcagggaagcctggagatatacctagggttacacttctgacaaatggcagagctggatctcacctataggtctttaggcctattttgtgtcttctacagagtcatgagtgtggcacagtccccaaaacacgttttttgtttgtttggtttgttttttgttttttgagacggcgtcttgctctgttgcccaggctggaatacagtggcgtgattttggctcactgcaacctctacctcccgggttcaagtgattctcctgcctcagcctcccgagtaggtgggactacaggcacctgccaccacacccggctaatttttgtatttttagtagagccagggtttcaccgtgtttgccagactggtctcaggtgatccacccacctcggcctcccaaagtgctgggattacaggcatgagccaccgcgcccagccccaaaacacattttaattgtcagtcagattcaggtgagcctgagttgtatccagtttctgtcttgggtagtctgaccataaacctggcgttcatttgtggcactagaggttatggtattcttcaggggaagaaaaggattggtaaggacttgggaactggatgaaaatttaataacaggctgggagtgaggagcctggagcagaaggtttatgagaaactggagccctgttgcccctgaaggtagaacagggatagtgggtagaagctctagaaaccattcctctagaaactgctcatatacaacaggggcggccccagagcatagttttgtttgttttatttttgagaggatcttgctctgtggcccaggctagggtgcagtggctccatcacagctccctgcagcctcgacctcccagaaccaagtgatcctttcacctcagcttcccgagtagctggactacaggcacatgccaccacacccagctaatttttgtagagatgaggtctcactgtgttgcccaggctggtctcaaactcctgggctcaagtgatcctcccaccttgacctcccaaagtgttgatattacagacatgagccaccacacctggcccatagttgttcttttctgagtgttcaagcagaggctgggtggccagttagcacttgaggaaaagaatgaatgagtataagatggcagctagccagacagaaatctgcagagacagcacatctttctacaataagggctgacccattctaaataaattatagttctctctcttcagaaggttcatacaataagctgctttttctgtaaatgtggtgcttgttgaggttgatgctggcagattggtatcaccctcccatgccaagctggtctcaccttcaggctccccatttgtccatcctgcagtctatccttgttgccacatttatctttcctgagtgctgccttaaccctattgatctttcctctatcgacaaacttgactgactcctttatctgaagtaacgaccccgtccagtgtcattattcgactgctctggtcctcacatcctgtaggctcctgcccaagtgcctgctcttttccttgtgcaagctcttgcctcataaccctccagtaatttcaggccctttttacaggccttgtggtaccacctccatttctcagtccctagtcactcaacctagagggttctgtctcaccttctagagtatgcactctggagggtcagaaccacatctggtatatacttgtgaccttcatggtgcctttgaaatctgagtgccaggcagtgcaggggaagacagtttggaccagcagtttgaagctgttttcgttagggtttagcaccttcaagagctcttcacatctttgctcagcaggcagtgcagcacagccagggctctgaagctaggccagctggttcgaatctggagttccctgcattccagctgtttgacctgggataactgctttggtttttttaacatgtaaagatgggagcactcggctgggcgcagtggctcacacctgtaatcccaacactttgggaggctgaagcgggcagatcacctgaggtcaggagttcgagaccagcctgtccaacctggtgaaaccccacctctactaaaaatacaaaattagccgggcatggtggcgcatgcctgtaatcccagctactcaggaggctgaggcaggagaatcgcttgaacccgggaggcagaggtcacggttagccgagattgcaccattgcacttcagcctgggcaacaagagtgaaactccatctcaaaaaaaaaagggggggagcactcatacccacgctgaaggtgttgtgaggactgtttaggtaaagtgctcagtgcagtccctggtgtacacagttagtaccgatgattgctgggtaattcaccagctttgtcacaatgtcagtctgcttttctggacttccccctcccaccagtcaaggccctccccaccgctggtgctgttgaccgttaacttattagctggtgatttccttccagatgtccaacatcacagtcacatacagagatggccgagtggcacagctggagcaggtatacatccgtggcagcaaaatccgctttctgattttgcctgacatgctgaagaacgcacccatgttaaagagcatgaaaaataaaaaccaaggctcaggggctggccgaggaaaagctgctattctcaaggcccaaggtaggtgcttttcatgcacaggttttaaaatataggtttgtcttgtgtcttgtagaaaggggccctattactgcctggagacagagagggtttgacctctgctctctccacacccaccacccactgccaccccttccccttgcagcgtggagtgatcctgtgaggccattattttatttttttgagacagagtctcgctttgtcacccaggctggagtgcgatggtgtgatctcagctcactgcaacctctgcctcccaggttcaagcaattctcctgcctcagcctttcaagtagctgagattacagtgcgcactgccctgcctagctaatttttttatttttaatttatttttatttttattttatttttaattttttttaatttttttatttttttgagatggagtctcgctctgtcgcccaggctggagtgcagtggcgtgatctcggctcactgcaacctccgcctcccgggttcaagcagttctctgcctcagactcctaagtagctgggattacaggcacccgccactgcgccgggctactttttgtatttttagtagaaacggggtttcaccaccttggctaggctggtcttgaactcatgaccttgtgatccacctgcctcagcctcccaaagtgctgggattacaggcgtgagccactgcgcccggcttatttttattttatttatttatttttgtatttttagtagagatgggatttcaccatgttggtcaggctggtcttgaagtcctgacctcacatgatccacctgcctcggccccctgaaatgctgggattaccagtgtgagccaccgcacctggagaggcccatcttttctagaagttctgtgtgagaggtgtgggatcgcttgcccttgtctagtttgccgagcagacacagcccggagcagatgagctgactcgagtgtgagggcagcatttcctagcgagactgggtcttatggatggacaccagcatgtacttagggaggtctgatagtggagctccgttttcagaaataaagccaccttttagtacattccaaaagtgggactgtccttttcgcagtcccctagtctggtcttgcttcttggttagcctaatttggttttatatttaggttcatgaaagttctgtcatgttgattagacaacaaagtaattgtggcccttggaaactgtcttagtgttggtaaaaaaggtttgcagccaaggaaggcactggattcttcattggtatctttagctgctgtacatgttttatatgtgtgtgaggaaaaaagtcaaactgtgtttttcctctgctctcacaacacaacaatcaacaaagacttctgtgaccaagcaagcagtcagttctgcagtagacaccagctgggtgtccttcagttctgacactatctacctggagatagcctgaaaaaccacaggttgagggctcggtcccacaagacagcccctgcaccccccactattattcataagcacaggcctccagaacatctgaatggcttcaagccagggttctcacgtctcactccttgggttcgattaatttgctggagtagctcacacaactcgggaatcacatacttaaatttactggtttataacaggatattttataggctacaaataaacagccacatgaagagatgcatagggtgagatctggaagggtcgcaagcacaagagcttctagccccatggagtttcctcccggcacatggatgagttcttgttcaccttcctgtcaggctgcgcatgatcagctgtcccgaagctcccctaaccctgccctcttgggccttttatggagactttattggatagtcatgattaaaggatggacaaccatgtggaaatgccattagacaaaatgggtgtgatctaacactaatagacggggttgggaaaccccgcgaggcctgtccagattctttttggcctctctctgcagcatttgttcctccagggtatagggcaggacctttctctggagtgaggtcttatgacccacaatcagattagggtcctgccttgggcaggtgaaaggagggcaggagaagtttcaagagagagattctgtctcctgagtcctgcttctgaggcctaaagtgccccaatgttataacaaaagactataacaaggactataggagttacgagctgggaaccatagatgaaagctcaagtttaaagatgtaatagtgtgaggggccgggcgcagtggcccatgcctgtaatcctagcactttgggaggccgaggtgggcagatcacgaggtcaggagttcgagaccagcctggccaacacagtgaaaccccgtctctactaaaaatacaaaaattagctgggcatggtggcaggtccctgtagtcccagctactcgggaggctgaggcaggagaatcgcttgaacccaggaggtggaggttgcagtgagccgaaatcgtgccactgcactccagcctaggtgacagagctagactccatctcaaaaaaaaagaatattttatttgttcttcaaagcctgtcttctcctagaacccctgggttacagaggagaacagcagtcttatcatgctatttatatggagtgtgttttctttttgctactatgaaataattctttttttttttttttttttttggagactgagtctccatcacccaggctgcagtgcggtggcttgatctcagctcactgccacctcctccaactcccaggttcaagtgattctcttgcctcagcctcccaagtaactgggattacaggcgcataccaccacgtgcagctaatttttgtgtgttcagtagagaaggggttttgccatgttggccagtctggtctcaaacttatgacctcaagtgatctgcctgccttggactcgcaaagccctggggttacagacatgagccactgcacccagcctgaaataattattttctcagaaaaaaatacaaaagataatataacccttctcccagatctaacacatgttaacacttaactatatttgtttcagaattgaaaaaattaattcagtgcatctataatgtttttcagctcacccaaggccagccccaaggatttgtcttttctgtagctctcagaccaccttctttgccctcagcatgctgcctcccagcctcttgtagagagcagtgtgggactggaaggcaagagtgtgctgctagctcctgctttgatgccagtccccagcccctgcccctccgtctccatcccccctgttaaatgcagtggctgtcagctggacgtgttggcttatgcttgtaatcctgacactttgggaggccgaggtgggtggatcacctgaggtcaggagtttaagaccagcctggccaacatggtgaaaccctgtctctactaaaaatacaggaaattagccgggcgttgtggttcacggctgtagtcccagctactcaagtaggaggctgagacatgagaatcgcctaatcccaggaggtggagattgcagtgagccgagatcatgccactgcactccagcctgggtgacagagtgggactccgtctcaaaaaataaaaaaaaaaaaaggcgggaggtggaaatgcaatggccagggtggtgttggaccaggtaacccttcagaacccttctaactggtgtcctagggccctggctactctgtgctatgagcattcaccgaccacactgacctggcctcatattttctcttccctttcagtggccgcaagaggaagaggacgtggaatgggacgtggaaacatctttcaaaagcgaagataattttctaagttgaacagaactttgtccttttttctttcaggttatctgagttcattggagtgggtgcttgtgcatatatgctaggtatcttttgccatctttctctttagatcaggggaaatgtttaagctaaataaatctggggggttttttgttctgttttgttttgttttctttgagaaaataaggactttgtgttcatttgaagtttgctttggctaaattttgacaccctgggggatgtcctgggagaatgccagtactttgaaatagcacagctattgatgagattttaagctgctgttcctggccagttgcaggttaagccccagaaaagttcaccttggagaagctccgagaacacacagattgtgtctcattcatcttcagacacaggcacatagtgtggcactttgttcagttaacatttgtggagctgtcatcagctcagctttaacaacacaggtgactctttcccttgataaagtcataggtaattcaggggctgggtgcggcggctcacgcatgtaatcccagcactttgggaggccaaggcgggcggatcacgaggtcaggagttcgagaccagcctggccaatatggtgaaacctcgtgtgtactaaaaataaaaaaattagccgggtgcggtggcatgtacctgtagtcccagctactcgggaggctgaggcagaagattcgcttgaacccaggaggtggacattgcagtgagcagagatcatgccactgtactccagcttgggtgacagagcgagactgcacctcaaaaaaaaaaaagtaattcaggggatcctagtggccagcttccttggctcgtatactggctacaacaagtagttttgtggtgatttgtggaaacagattcttgggagcatatcagagcatctcagcattgattggcacatccatagttgttaatgtaggaagggtgaccagcagctcagcacagtggcttgcttccagcactctgggaggctgaggtagaggattgtttgagaggagttcaaaaccagcccgcgagacatagtgagaccctgtctctacaaaaaattctaaaaattaacttggcatggtggtgcacacctgtagtcctcgctactagggaggctgaggtgggaggatcacttgagcctgggagtatgaggctgcagtgagctatgaccttgccactgtactccagcctgggcaaaagagcaagactttgtctttaaagaaaaataagtagtagtaaagagtataagatacacagggtgaataattgtgacaaaaacacagaaactggaaaagcagcctgaaaaaatcaaatcaccaaaaagaggtcttgccaggtattcattatggtatgagctacagcataagccatcaagaggaaaactgatcaattattggcttttagaatattgctcattgaacagattattcaagtaatgaaagaggaggggaaaaaaatccagcacattagttaacctggcatcaattaatgaggttctaataagctttgtcttatgatactacctggaggttacagagctggtattctgaggaataagcatcagtgagttggtcagatacaatagacgtttaaaatagggcttcaggccaaacatggtgccccacgcctataatgccagcactttgggaggtcgaggcgggaggatcacttgaacctaggagtttgagactagcctgggctgttaagctttgttaaccaagaccgcatctctacaaaaaattgaaaagtagctgggcacagctgatgcctgcagtcccagctatcctggaggttgaggcaggacgaccacatgagcccaggagattaaggctgcagtgagctataattgcaccactgcactccagcctggatgacagtgagaccctgtctcttaaataaaaaacaaatgaaagcagtggttttcaacatcaactaaggatcttattagaaatgaagactgcaagccgcacacctggagtggggcccaggaatctgcattttaaacaattccctggtccccagataagtaattcttaagtattctatcttaagtagacctaaagccgtattttgaccctgtactagtatgttattttagtataatcattactgaattcatcatacttttacagtaaacagtacttactttgaataataacacattacacttaatagtagtgaactgcatcctcgatatcaaaagcgacttttgatgtagttcactctggacccgtacaggaacaccagccttgcagattctccacgcaatggaaactggctataaccctacctagatctgaaaagtgaagggggatcaacctaaaatatgtagctttgtaaacagttttatatcctgcatcttaggggggaaaatcagttgacgcagattgaaaacaagttgttccataaggtttattatgaaaaacagtagccctcctaccctgcctttaccccactttccttgcctcacagtagtctgtccaactcttggctgatttgtttgtatttacctccatgtctcaatatgaacatgttttcatgactattccttgatggttttttgtttgcttgttttaagacggtctcactcttccccaggcgggagtgcaatggcacaatcatggctcactgcagcctcaaccttctcgggctcaggtgattctcccacctcagcctcctgagtagctagaaatactggtgcacaccaccatgcctagctaatttttgtattttttgtagagacagggttttgccatgttgcccaagctggtcttgaactccggggctcaagtgatctgcccgcctcggcctgctgggattataggtgtgagccactgcacccggccaccattatcttttgaatcctctcttcctcctgcccaccatgaatttacttcctctcacccatctccctgatattgtaattctggttagatcatattcagtgtcaaattattaagatgtgattaaactttttaaaaatatgacagtgtcatagtgatcacagctgagtcatacaatagactagattactgtggaacttttccctgaaagtaatcctcttgcatttttatttgcttggttttctatttgtcactaattcaaccccaatcatatctgaagatcatgacatcatttatcagttattattcttgacccaccccaatctggactggtttctccccgtgcttggtgtgtcactgtcaccctgggcactccccacactgctcctctgttggatctctgttttctgtgtaacctcttcttttatcaccttattttgggggagtatctgcatgtctaaaaatgtgctcacacttgatttgattgggtatgaaattctatgttggaattagtgccgggcgcagtggctcattcctgtaatcccagcactttgggaggccgaggtgggtggatcacacagtcaggagatcgagaccatcctggctaacacgctgaaaccccgtctctactaaaaatacaaaaaaattagctgggcgtggtggcgggcacctgtggtcccagctactcgggaggctgaggcaggagaatggcatgaacccgggaggtggagcctgcagtgagccgagattgcaccactgcactccagcctgggtgacagagtgagactccgtctcaaaaaaaaaaaaaaaaaaaaaaaaaaggaattagtatccttcagaattttgaagttatggctactttgtcatctagcattgctgtagagaagtctgaagtgattttgagtccagatctttttttttttttttgagacggagtctcgctctgtctcccaggctggagtgcagtggtgcgatctcggcttactgcaagctccgcctcacaggttcatgccattctcctgcctcagcctcccgagtagctgggaccacaggcgcccgccaccacgcccagctaatttttttgtatttttagtagagacggggtttcagcgtgttagccaggatggtctcgatctcctgactgtgtgatccacccacctcggcctcccaaagtgctgggattacaggcgtgagccaccgcacccggccagagtccagatcctttttatatgacttttttttttttcccttctgttatcagtgttccaaaatttcagaatgacgtattaatacctgccttggcgaaggtctgtttccatgccaggcccctttccgagtgaactcttgtccttaatttctgggaaactttcttgaattcattctcagtgattttcttccttaggttgtctgtggtttttctttttctttttttttttaaagactgagtttcacgcttgttgcccaggctggagtgaaatggtgccatctcggctcactgcaacctttgcctccggtgttcaagcaattctcctgcctcagcctcccaagtaactgggattacaggcacctgccccaacacccggctaattttttgtatttttagtagaggcagattttcaccatgttggtcaggctggtctcaaactcgtgacctcgggtgatccacctgccttggcctcccaaagtgctgggattacaggcgtgagccaccaggcccggctgtctgtggtttttctttctggaatttctgttactcagatggtggacccagaattacctctcctccctgtgtgccccaaccccaattttcttttcttttgatcataatttatggaggattactccaagttgattctctgattgttcctttatatacgtagatatatagggacagtaccttgttccttgttgcaacatctttgaggatattaatatgctctgtagaagctttcatctccctgcatatgtctttctgctttctgttcttcaatttaatctttcatgttacagactttctttagctgcctggcaatcgttggtaatcttgcttatatttaagagtggagtattaaaaagaatatgtgattgtaaggtgatctcattgagcttctttggggaaatccccagtgtccatacttctagaactttgctccaggctggacaggttctcttggagaaacttttggtttcacatcaggagggtttactctgagctgctggattgagagctctgttggggaagagggtgagaatttcagcattctagtatgtccacattcagttccttcatccaggtctctgggagggctcctagtccagaaaccttctaaccccctctggagaataagcttccaacttttttgccaagattggggaagtcaggtcatgtggaaatatgaatgtttcagcatgcttttgctttttttctttgaaaatatattactttaaaatgaagaataagactgggggtggtggcttatgcctgtaatcccagcactttgggaggctgaggtgggcagatcacctgaagtcaggcattcaagaccagcctggccaacatgacaaaaccgtgtctctactaaaaatacaaaaattagctgggtgtggtggcacatgcctgtaatctcagttactggggaggctgaggcaggagaatcgcttgaacccaggaggtggaggttgcattgagctgagatcgcaccactgcacaccagcctgggcaacagagcgggactctgtctcaaaaagaaaaaaaaaagaataactcagatttaaagaagatatagactaaaggatgatgtcataaaggtaattagaccagtatttaacatgaattctgagcaggacacggtggctcacgcctgtaatcccagcactttgggaggccgaggcaggtggatcacgaggtcaggagttcgagaccagcctggccaagatggtgaaaccccatctctactaaaaatacaaaaattagccaggtgttggggcgggtgcctgtaatcccagctactcaggaggctgaggcagagaattgctttaacccaggaggcggagcttacagtgagccgagattgtgccactgcactccagcctgggtgacagagcaagactccatctcaaaaagaaaaagaaaaaccaaaaacatgaattctggttctgagtgccaccgtgaccacctctcccagcctctggttggttatctgtacaagggtggatgtggactcacttgattcactgatactatcccagcttctacactggtagaaccataaccttaaaaaacaatcaaagcatacaggagtttttctgccactagccaagatgaaagtaattgatttatcattgtgtctgaaaaaacacacacaaaataatatgaaacaatggttttcaagacatcagacattgaaggagactaatccctgagaaacgagaaataaataaggggagttgtacaattgccccagctcactgcttacaagagtctccaagctgtggcacagggaaggggactgaagctgacctaccagcctgcctgcattgagaaacgagagctaagagttcagagaagccaccaaggcagctaggactataggacagaatgtcaagagaagaaagccacacagagaacccaagagatctgcagcgggttgcttttgaacattcagcagaatactgatgagcacaccgatgtgaggaagttaacaggctggggaagacccataaagaattggaacagtgcttggcgtcatgctaggctgagactaaacattttcctatcagtcagacaagaaattcacaggatatggagtacagtgttgttttaagatgtaccatatctgattttgttttaatcaggtatggtaagacccagagacagctgccttgaaagaatgtattacagttctcaaagaagggggcaaaccacgttacgtgggccatatggggagacaccagcctgagtcaggaggcagaaggagcaatggcagagcaagacccagagccttcattgtagttttctcatgaaggaatgagtgaggcagagtaggcaagtttgagcaagtttaggattggatagtctgaataattttcaactgggttataagtggtctctgtaaagtaccttgccctgaggtgattgagggtaaaggaaatactggcttagtgtatgagagttagataaaggaggcagttttgggtgtggactttggattgtttggtttgtacatgaaagacacgctgccagcaagttgtttactatctctaggaattagctaaccctgggaggagcatccttcaggattagcaaggcccaagataccaaagcatcataaaacagaaaacaaaaggcatgattaatacaaatatccaggaaggccttgcctggtaaatgaggaataattagcccaagactgagcgctggacctgaataacaagtcataaaaacaacacattaaaacatgaaactgtttttccggaccaattaaatatatccaagaataagactcaaaaagatttataggaatataaaaatgtccagtaccccacacagtaaaattcactgtctggctccagtcagagattgctaggcatgcaaagatgcaggaaagcacagcacataatgagattaagagatccaaaactacacagatgttagaattagcaaagaaggacattaaaagttataactgtgtatttcaaaagctgagcagattttaaaagaagactccctgatttcaagaattactatagagctgtactcatcaaaacagcatggtatttcatcaagttaagcaaatagatcaaaggaacagagtctgaaaacaaatccacacatgtatacaaaatgagttttttcaaagccacaaaggtaatgcactggagaaaggatagcattttcaacaaatggtgccagaacaattggatatctgtatggaaaaatccctcaaaacttgggtctatacctcatgccatacaaaaaaattaattccaaatggatcatccacttaaaactataaaacttctagaagaaatgtaaccctaaaccttgggttaagcaaaaattcagatataataccaaaagtactatccatgaaagaccaaactaatatattagaccaccaaaataaaaaactgctttccaatgacactgttaaaagactaaccacgaaattttggcaaagctaagtctaataaaaaatgtgtatccagaatatataaagaatttgtggccaggcaccgtggctcacgcctgtaatcccagcactttgggaggccgaggccagatcacctgaggtcaggagctcgagaccagcaacatggagaaaccccgtttctagtaaaaatacaaaattagcccagtgtggtggcacatacctgtaaccccagctactcaggaaggctgaggcaggagaatcgcttgaacccaggaggcggaggttgcggtgagccgagatcgtgccattgcactccagcctgggcaacaagagcaaaactctgtctcaaaaaataaagaatttgcaaagctcaataataagacatggggaaaaaatttgaacagacttgagaagatacagatggcaaacatgcacattaaaacatgttcaacatcattagtcattagggaaatgcccaagttaaagccagagagatattgctacacacccagaagaatggctaatgtttaaaaaactcaccatgctatgtgctgttgaatatgtaaagcaacaagaactcccaaacactgctgatggggatgtaaaactgcaccaccactttggaaaacagtttgacagtttcttaagacattaaaaatacatctaccttatgatccccacattccattcctaggtatttacccaagagaaaaggaaatatatgtccatgcaaaaacttatacatgaattttcatagcagctttatttgtaatagccaaaaactggaaacaactcaaacatccatcaacagatgaatggataaattgtggcacaccgtccagtgcaatactcggcaataaaaaggaactactggtacacgtgagtgagtctctaaataattgtgctaagtgaaaagccatatagaagagagtacatccggctgggtgtggtggctcatgcctgtaatcccagcactttgggaggctgaggcaggcagatcacttgagatcaggagttcaagaccaacctggccaacatggtgaaaccccatctctactaaaaatacaaaaattagctgggcatggtggcatgctcctgtagtcccagatacctgggaggctgaggcaggataactgcttgaatctgggagggggaggttgcagtgagctgagactgcactccagtatgggtgacaaagtgagacttcacctaaaaaaaaaaaaaaaaaagtatatcctatatgattccatatatccccaaatctcacaaatgcaaactgtaaaaaacaaagcaaatcaatggttgcttttggatgtcagtgggcatggagaggcgggagggagggattaccaagaggcatgacaaaactttcggggtgacaggtacatttactatcttgattgtgatagtggcttcatagatgtatacatgtgcaaaatgtatcatattgcacattttaatcttgtgtagtgctcggaatgtctactttttgtgtttcaattatacctcaatgaagggttattttaaaaaataaaatatttttaaaaaacaagccgagcgcaatggctcatgcctgtaatcccagcactttgggaagccaaggcgggcagatcacaaggtcaggagttcaagaccggcctggctaatatggtgaaaccctgtctctactaaaaatacaaaaattagccaggcatgatagcagtctcctgtagtcccagctactcgggatcctgaggcaggagaatgccttgaacctggtggggcagaggttgcagtgagccaagatcatgccactgcactccagcctgggtgacagagtgagactctgtctcaaaaaaaaaaaaaaaaaaaaaaaaagttgtgcatagttggaaaagaaaatactagatttcatgggtgattggcaactagctctaagtggaacaagtgcattttcctttccttccaggtcccagagaaaaacctccatgctgggttgatagcagcagctaggatcagttgcccaagactctggattctcgagatgaagaccgtcagcagaggctgatctctcctgtgggctcatgtcctaaagcaccttatttgggctcaaatatcctcccttttaggacagaaaagaagttcccgagtcttggtcatgttgggcctgtggagcacatcatcttttctacgtgtttccttttgatgttctcagcatccctgcaagatgttctcagcatccctgcaaggcaggctaaggcatgaggagctataggcccagggagctgaaggcagattctaagagctgggtgtggatgctgcacccctgagcctgggccgcctgggttttgctcagtctgggaagtacttccaaacccactctttgctagtcttttacaatcctgcgggagggcaaagcccagatcatcatggctgcttccaccatgtagctgcagatcaggaaactgaggtccagggaggtccttactggctttgctccagggacaacgaggcttgaggtctgttccccacaggaggaccatgatggttctcctgcttcaaatggcccctttggaaggggcttgctcatttaggtgaatcctggggccgagcagccccagtgatagtccctgggatggctgtaggagagggagcagcatgcaggcgttaacgtcacagactggcaccaggccacccgggcttacactctggctcctccagttcctggctctttgaacttggacaagtaatcccctttctttattttttgtttttttgagacagtctcgctccgtcacccaggctggagtgcaatggcacaatctcggctcactgcaacctctgcccaccaggttcaagcaattctcctgcctcagcctcccaagtagctgggattacaggcacccaccaccacgcctgactaattttttttttttttttttagtagagatggggttttgccatgttggccagcctggtcttgaacttctgacctccacccgcctcggcctcccaaagtgctgggactacaggcatgagccacgccgcctggccaacaagtccccttaacctctttctgcctcagtcgactcacctggaaaacagagcacctacctccttcaaatgagaagagaagtaaaggagtataaggccatcagaacagtacctggcccaagggaggctatggaagtgcttgttgaataaaaaaatggcttcatctctggcctagccccaaaggtttgagttcctgccattgccacccagacagccctgggtggaggccctgctgacattgaagagtgcctgccctcctcccctcaatgcggtagacactttccaaaacttacgtcatcctcactctcactccagtgggataatgggaggcttggtgtacctcattcccaagatgagggaacaggctctgagaggaccacatcgccagcaagtgacaggctgggaccaaggccaggcctgtctgcctcctagactaggcctgagtgaggaccggcctgagtacggcccacctgcttcctcctccgtttagagcttgggctggagctgtcctggccagtgctctctgcctcaccaggctgcatgagccacaagctgccacttgtggagctcggtggccctgccctcgacagccttgctggtggtcgtgaaggctctaaacacctgcatggcaatgaggccaaccttctccgcttgatccgtttcaggctctggctccgctactgcatcgtgtgcttctgtccaagaggcagagagactgaaactatctgctgccgcctggattctcccagagattgcctggaacaccagctcgggtcctcgcacaccatcctggtaggaatctctcagtgacaattgagagtttgtgggctggcttagggccagtggtgggcagggagtcagcagggcgcaagggactggagagcttggcatttctccaacaggagtttcagggagagctcagaggcctgcttatgtgacaggtttatcagcttgcctggcccagggccggctctcataccgttttgatttaaataatagattgctcacagaataaatgtatgttggtttaagctttcactttctcataatcctctctgctggcccctcccaccatctaccccattttgcctcactctggggagcctgaacaccctgttccagagtaggggcatagggaaacacttctatggcttctgagctgctgggcagggccagtccctaaaacaaggagagctgggagggagctggaccccaggatggagtgctgagagctgaaagtcctatttaacagaggggagggagcagagatcccaaaaagggaaaggcctggccaggtcccacagcaagtcaggagcagagcgggcctgaactgtgagatctccaatctctccaaagcctttgggtaagaagtccgcctaaagcagtgagatcagtggggtctgaggaaaatccttttcctcactgcctccatcccagtcctgggacccaacaccatcctgtcctcaccctccttggccatctccttttgccctgagaagctgttatgcatccagccagactgggaatgtgctggaatccatgcaccacaggggatggatgcgccgcttacagtccctgtgggccatggctgtgagggaaagtcagagctggtggctggggtgtgtaggcccaggaggacccctgcctcctccttagccttggagcccccctctgctgctgagtctttcctcatctagcagggccccactgcccccagaccttacctcctggcttagcacatgacttccccactctgggcctcagtatccccccggacatctctaaattcctttcccgcctgccctgcctgtcttctggttgggctgaactgtaactccccacacagggctgagggtgactgtggcattaggcttctggctgggagcccaccctgatggtgcttggggaggaagggagacacttccccctgccaagggcagccctaggactactctgcccccaaggccccctgctgctggtgatgcgcacctccacccgctgcatgctctcccacacggggactcccacacggggacccccagggcctggagggaacacacaagcactttgtctctggcttgctgtctcctaaccccacagagctgcccctcgccaagtacaagaggcctggggctgggtcctgagggtggcaagcagcactgtaccctgtgggaggcaggcaccaagtcctctcacttagtcggctgtggcccctgcctctggtctgtgcagccttgtcccctgcccagagggctgtggtggtgaggctggcagcctgggctcagacgtgagcttgctgtggggctccatgtagagctttgctcctcctggggctcccgacccgctccttcgcagctccccttctcaaggagcccaagccctgcccagatgtgagggcccgctccctggaggcctcctctaactctccagcccacagggatggacccaggacccccacatcttagactccatgggggacttgcccaaagagcacctgggggaaggtcagtgtgacctttgtcccacccttttggatagacacagccaccctttctccccaccccagcagcagggctgttgctcagtgaccctgaggttggtgatgcagaaaagcagaggcgggtgtcactctttattgcggggtccacactgtgggtgctggggcccctcccactgagggaaggctgagcctctagccagggctggccacctggccacctatgagtccattcttctgtccccttaatctcaggctgagcatttacactggatttctgggggcctgtgagtcctccttgaccttcatcgcccactatcatgtgcttgagagcatcacaagtcagtagcaatgagccaggtgggtggtgggtcacctggcacagcaggcctggggctcgggtcccagcccagcagctgtggagtcccaggtggaggcaggggtggtggccccggccgcactgccctcaggctcaaggtccaggccctcgtagatggtggggagtgaggtgcgctggctcagccgccggcgcaggccgaccagcaggggctggggcagggaagccacatccacgttgttgcccaggtccacccaagccaaagcagggaacttggtggtgtccttgatggcatcagtgagcttgcgggcagtggcccgcgtcagtcggttgccgttgagcaggagctgggtgaggcggggcagcgcccacaggctgggcagcaggaggtgcagcagctcatcactcagccccgtgaagctcaggtccagcaccgccagcacagcaccatggctgctcaggtagcgtgtgatgtgttgcacgtcctgtgtcgacagcgggatgcctgagaggtccacagtctcccctgccagcagagtcttctggaggctgctcttgaggctatgggagagtggcaggtggggatggactaggcaaccaggcagtccccccactgaccacagacagtgacctgtcgggaacagcccaggcctacagtctggcaaagccagattcaaactgtgtctttcgtattttttgagacaaagtttcgctctttttgtccaggctggagtgcagtggcacaatctcggcttacggcaacctctgcctcccggattcaagcgattctcctgcttcagcctcccaagtagctgggattaaaggcatgtgccaccacgcctggctaattttgtatttttagtagaggcggggtttctccatctttgtcaggctggtctcgaactcctgacctcaggtgatctgaccgcctcagcctcccaaagtgctgggattacaggcgtgagccactgcgcccgggcccaaactgtcactttctaagtgggtggccatgggcaatgctcagaggctcagtttcccctttggtgaaaatgggacgtggttgttgtgaggattaaatgcacacacagtaaggctctttcttcatgaactattatttgaaatctcactgtgtgcccagcatcccacacctgttttattgacatctcacttatttttcagataggtgaagtaactcttccatggccacacaccactaagcggggaaccaggtcctcaaactgagatgctctgactcttgagcccacatgtttttttccctgtgccccttctgatgtcgattcttttagggtagggagaaattctcctacaaagggacggctattaggctgtacagggcaccggggatagagagggacaggcccacagtagtgaaaggggaggtcctgggtgtgcaggctgggggccggccatgagggagggctccccgtgttttctcagttagaagggaagttcagagactgagaaggacccccgcccccaccaaccctctaggtctctccccagttatctgaacagagcccactaggcagacaggccttttgggggactgacagcagtgagcacaccctcaggacccccaccagccatggcagggaacaaccttgtggggtccaagctcagcgtggcctattaggcccaaggtgggacaggggtggagggcagacaggggaggcctgctagggtaagctcccggcagcagttcaggcctctgggcctgggtgcctgtggccagctctggactgagcctgtgtgtgaggctccatggatggagtcactccaggatggagtgtctgagagggacccatggcagagggagctattgggcagccacggaagcctcagttttaggcagcctggcagtggcaaagaattcccaacaaggtacaggaaaatcagggtagagtgtggccttaggcaagccacttctccgaacctgtttccttccctctaaaatgagaatcgcgatccagaatctgcctcccccgcaacctgttgggaagtctcagctgaagatgcctactgaggtcaccttggctgttgggtggaggggtggggtgtccaggccgtgtaacagaccagggattgagggatgtatgaatggcaggaggcaggaccgtcctgtgggaaatgccaaacgggtcactcagagggtgcagcttggcttggggagcatctgctaccacgggccaggctgacttccagggtagggccctcatgcggaccaggtgagggcctcaccaggtgggatttcagcaccagcctcttggtgagagtgcaggtgtcaacctgagaagggaccttggagcagcagtgaggaggggcagtggctgggctacccttaccagctctgggtcttcctctggcgcaggctggacccttgctgctgcttcgagtgaggggtgaggtggtagatgagctgtcggcagatcttgtccgaggacttccagagctcatagtcctgtgggagggcagtgtcaccatggtgaatctgagcccctcctgcccacctcagggccttggggagagggacccaggcagccaagtgtgtgtgtgagcacagtcatgcaccatgcatcaccgagttgcccaccagggcctccccctcctaccccccaacccggctgtggcctggcacagagccaggggaggctgccctctgggagctggacaggctggtccagtcccgcagtgcccggcgggaggaagcccagacaatgagcccttgttccctgtcctcgggcccagggccagcgtctcgggctatcagccggctgcctgcccaccctcagcacccttcggggacttgccacagggggaggaggccagaccaggcccctcgagggagccgtgctccactgacgccaatcccagggagtaggaacaagccaggtcagcgtgttcttcttcctctcactctccaagcgagactgcgcctgcggggtctgggtctgggctgacagggctgggggatgtaatgttttacagcaccaccacctggctctctctcagtcctaactgggctccggcagaggcccagctcagggtggaatccgaggtgcgcggcccacaaagctggcactgagcatgctccactgcatcctttatccagtccctctgtgagcagccccaggagcaggcagcacacacagcagctgcaagccctggctgttcctgtgatggccgtgggctaggcgcagagtcctaggggccgactgtgcagagacctgggcattcagagctggcagggcccagagcggataccctggttttggttggggactcactgtgactaggagtctgggtccggtggctggtcacagccacacatcctggggctgtgtcgatgctcatggcaggacatctgcaggtgctgtcagcatggggttctgggcagctgtggggtggaggctgcaggtggcaaactccaccccagcaaggaggagggccttgcttatgaccccagctgttgtaggggaaagcagtgagcacccgtccgcaagggtgtctgtacaggatggagacctgcggacagacgggggctctagccgagagcggctctcttctggcccaggaattcagaggctaggagtttgtttccgttggtggatttctcagaacagtctgtgacccgcagggtccccatatgacttctgcccagctatagtcttcctggtctgggcccccaggcctggtgcacagtgctgccacacagaaaatgggtctgcccaggactctgagggtcctgcaaagcacagctcacacttgctctagctggtggccagcctaatatactgatgctggcagcaggtctcagacagggacagtgacttgcctaaggccacacagcaagccgcagaaggacctagcctcccagtccccagccctgggctctgttggcccccctgtccaccacagtgcccagcccagggcccgtgcctgccagcctcaccttcttggggcactgcaggtcccgggccaggttcacaagcaggtcatgggagatggggtcgaccgggttgaggaaggccacatctctgtagaggatatcaggaaggagggtcctctcaaggcccaggtcctgtgagtggtgaagagagagttgagtgagcccgttgggtctcccatctcgaggcaccaccccagccagccagatgctgcttatgcccgttcctgtctctccatctcctccctaaggctggctggattctccccacaggcggccatgggccaacagtccagtggcgggtggcccccttctttttttgcttatttattttttgagacagggtctcaccctgtcacccaggctggagtgcagtggcgtgatctcagttcagtgtaacatctgcctcctcaaggaatcctcccacttcagcctcctgaggagctggggctatagacaggcaccactatgctcagctaattaaaaaaaaaatgttttgtagaaatggggtctcactatgttgcccagactggtctcaaactcctgggctcaagcgatcctcccaaagtgctgggattacaggtgtgagccactcagccttggaggaccctttggataagtagaggggagggacatgggagccctcagggaagtggtaagtgaatcccagaacccttagaccagttcccttgaggtagtgttgtgctgtgacactgccttctctggggttaggacttgtcagtgggattctttggggtctttcgtcttatggtgggggggtttgctcttcttatgacccctcaaattcccctgtcccccagtgttcccttcagatcctctgccttcccacctatcccttggttttcctaagctgcggccagcatctgtttgcggacaggtatggatccttcccttgggggcggacctctctctcagatgtctcaaaggcatgccaccctgaagccagcctcaccacccatgccccagctcagtatagggcacctccatgaccatcttcccaggcactggggccagaagctctggaaccccccagcactcttccgtcctcctctctcccccagctcacctagtcatcccttctctctccccaccactcctgccaagattcaggcctccagcctcctctcctacccatccctcaccccaccgcctgcatagacctgccctggccttcctgcctcactcctccactttctcctcctgtctactcccacaggactggtgtggggctgaatactctttcagagggtctctttgttttgagacggagttttgctcttgttgcccgggctggggcgcagtggtgcgaggtcagctcaccgcaacctccgcctcccgggttcaagcaattctcctgcctcagcctcctgagtagctgggattgcaggcatgtgccaccacgcccagctaattttgtatttttagcagggaaggggtttctccatgttggtcaggctggtctcgaattcccgacttcaggtgatctgcctgcctcagcctcccaaagtgctgggattataggcgtgagccactgcatctggcccagagggtctctttagaggacattttgagagctgatggggcagccacagccaggaggggcctctagaccccatgtgggccttctccaatccataggtgatatgctctgtgcgtgggtcccaagcacaggaagttgggccaggcaggggaggccgtgggtcacagctgcagggtccctgcaggttatggagcaggataggccccggctggacctcaaatcccaacctctgagacacaaagaggtggtctctgaggatccttctttccctctagtttcccagctaaaatgcccaactggtgtcttggactccaggcagcatcccagactgagatctgtgcctctggttgtctggctgattcagtgctgctctgctgtttgccacagatgccagctagggaagatccaggaggaaggctggctgatgagcctggcagacccagacagggccccagaccgcaacctgccagcctgccttccatgggtctagacagctcctcttaaacggacagctccatttttccagcctgctgaatccagagttggaggaggtggagaagggaagggaggaagaagggctctggccctggcttgccccacattttctctgtgggccctggggtgaccacttcgctccatgcctcagtttccccatttctaatctaccttctgcaggccgaacacctgcatggctgacttcctgctcacaggatggggcaggtagtggtggtagctgctgtagggggtggggacggggtggtgagggaagtggcatgcccaggtgattggggggaccagcatcctgggacaacccaggggttgggatctgggtttagtgtacctggtgtgtgtaggagcagagccaccaccggaccgagtgttgtgatgcacagatgctggggatgtgtactctaagggcatgagccgcctgttggagaactggtgatgcatggatggctctctgtgggctgccatggtgtcttggggtgaggctgcatccctagaccagccctgggtcctctctccagggtccactgtctcccggatcctggaggagggggaagttaccctcttccattgtctctcaatacaagatgatttgacctcacttgccactcctcccgggcccctcccatcttgccagggcctgaatttgggctcttaggtccaggctaccgggccaccctcaacacacacaacccctctcaaaccccaaagacccggacacactcagcagccccctcctccacacggtccgccgacctcacccagccctcactccaggcggtcgccctctcgcccacgcaagaccccgcgtgctgcagcctgtcgcgccctcggaacccgcctgcgcgcgccagagaccagctccgcctcgcctcccggcggatacaggcccacaacccatagccccgcgcctcccagacccccagacccccagaccctccctggccgccagcccaggggcggacggctccttctctcgcctggcgcaggaggcgcagcagctgccgggcgcgctccggccgccgctcgcggagcgtggactggatctcgcggagccaccgcacccggcgctcgtagggcgcgggcccgcagccggccgccgccccggcctcagagccagcctcgggcccggcccgccggcccagccgcgcccccatggccgccgcgcgatggtcgccgaacccacaggaggccgggctgtctgcgccccgctcccggggccgcccctagtcgccccgcctccaatcaccgcggccctgccccgtccgggtccgaaggctgagcgcccgccccaccccgcgccggagcgaggccagtgggttcctcggtttggcctgatcacactggaggaggccctgcttgcgtcagtcttggcgctagaacccgagggcctggagccgccaggggagacgcggagctcggccgagacgaggtggcttttggcacctctttaccctctggccccagtgctgactggggaatagtcgctttgaccgtgcaaagagcattctaggcggggtgggggggttctgctgtgtgtgccagtgttaggtattgcccccattgcttttagaaatatgccctgcatggtgaatctccgtctctactaaaatacaaaaattaggccgggcatggtggctcacgcctgtaatcccagcactttggggggccgaggcaggcggaatctaaggtcaggagttcaagactagcctggctaacatggtgaaaccacatttttattgaaaatacaaaaaattagccgggcgtggtggcgggcgcctgtaatcccagctattcgggaggttgaggtaggagaatcaattgaacctgggaggcggaggttacagtgagccgagatggcgccaccgcactctaccctgggtgacagagcaaaactctgtctcaaaaaaaaaaaaaagaaaagaaaagaaatctctgcagctggcagttgtggtgtaggacctgctcacgctacatggacactcctgcactggcaaatatttactgcctcctgcttcttggtttggggcaggcccccacctctgaccccagcctgggaaataaaccggacgaagagtcaggttaaccgttaagcccagctctgggcaagctggcagcaggcgggctgtatctgccgctggcttcagtctgcctccctgacaaggggtgggggtggcggcaggcagagtgagatgggggccctggctcctctgaggaccagggtgaggtacggacccacccagctcaaggtgtatcccacttcccagggctccctcagcagaagcctaggtctctgctgcaggcctgctgggcccctgcagccccaatcccggctctgggacgctcacatctcctgcgtggggaacgtttgaggcactgatctgcagttcccacttctctaagcaaggagcacgtgtttagcctgtgaggactggtacctgttgtgcaggaagggctgagcactgtccgagggcatatatgagggacgacagccaagcacccgtgtgtatgtgtgtgtgtgtgtgtgtgtgtgtgtgtgtgtgtctgctaattaccctatgaagattcaaggttccttcctttgggttaagcactgcctgcccagagatggcagtggggagagggcagggtgctaggctctgtcatcctgtggggctgggcccctgagacaaggcagaggacagcaggatgtcttagccccttgaccatccacggacccccaacccctgctggagcagtgcttgcacccccttctcccctggcacctgccagctggacccaacagcctctcctcccactccagtgcagccagcattgtcctggggccaccttggcaccacaggtttcctccctggcaaacctgcatgacggccttgcgtgccctcccccagggccaaggcgctgttgctgaactgaagtggcaacctacccggtcagagctttaagctgcagctctgatgccccagggacctctcagacccccctgcccagagcaggcagcccggtaagccctcctcctcttcccctgcagcctcagggctggagccacagctgggagggctcccagatcctgaccatatcctcccagaggctgagccaggcctgggcactgtcccctcaaatgtgagaatactgggcagggggaggggagaaaggagggaatggagggctgagcctggaggcatgaaaggggcaacctaggcagcggtatgggggagtgctcagagcttagagtcctgtggaaggcagagaactgccccagcccctgcctctcatcccccaccctctgtgtccctggccgagaggttcctggaggacatttttccagcaaaagagggagggtggtgtctgggcctagatccttggatgggcttttctctgcctgcttgtggggtgcctagggcgagtgggcttttggagacaatttctggcctaacctgacttggacagcagcccccagaggcacagctctcccctcaggcatgggggcatgattccacctcgctagcccacatgtgttcttcacggagggctgctggcccgtctccctggggttaccctgagcagcagagctgtgtttgttgagactccatggggtggagggattgcgatgttgtcctctcagttcccggggctgatgtggaagctcaagggcttgccctggattcttcagggtagccctgccatccctagtgagtcagtgagttgggaggttgggggctggagaatcaggtagggaggacacagctagacctcaggccctgatgggaacgtactaggctccaagtgggacctgccaggagacaagaattgatgacagccacacctttggagtctcaagccctctgccacccatgcggtggcctagttcaaatgacaggaacacaaggtccagctggcccaatgggcaggtagagggctgcagccagggctggaactggccttgcactgcctctgggcccttctctacccacccagtagtattgttcaagcccaggagggaaaaaggccagctcagggttaatgttacctcagcaagtagctgagtggcactgagcctcctggtagccactgtaaagaaggacacagaatggtttgggggcattcgctaggaggaaggaagcagatggatactctatggagacagaatgtcctctgtgtttgctctacaggaacgggttgtcaaccttctgcagggccaggaattgtcatgaggctgtagtaggcagcagagcttggcggggtgaggcgagatcacaggtataggctcagggcctggattcaaatcccctgggctgccacttgttggatgtgtaaccataggcagagtaaggacctgccatagcaaattaccacaaactcagtggcttaaagcaacagaatagttctggaggctaaaagtctgaaatccaagtataggccaagccacactccctttgaggactccaggggaagatccttccttgtctcttcagcttctggtggctcctggcaatccttggccttccttggctgctgctgcatcactccagtctctgaaaccatctaccctatgtgtctgtgtggccttcacatggcattccttatttttgcagtggggtctcactatgttgcccaggctggtcttgaactcctgggtccaagcagtcctcctgcttcagcctcccaagtagctgggattatgagtgagtgccaccatgcccggctcacatggcctccttgtaataacgctagtgcctgggtgcggtggctcacgcctgtaatcccagcacttttggaggctgcggtggacggaccatgaggtcaggaaattgaggccatcctgtccaacatggtgaaaccctgtctctactaaaatacaaaaaaaaaaaaaaaaaaaaattagcctggtgtggtgacacatgcctgtagtcccagctacttgggaggctgagacaggggaatcgcttgaacccgggacgcagaagttgcagtgagctgagattgcgtggtgacttcactccagcctggtgacagagcgagactctgtctcaaaaaaaaaaaaaaaaaaaaaagaactgaagctactggatttagggctcattcattctttttttaattttaatttttttttttttttgagacagtctcactctgttagcccaggctggagtgcaatggcatgatcttggctcactgcaacctccacctcccaggttcaagcgattctcctgcctcagccttccaagtagctgggattacaggtgcccgccaccacgcccagctaatttttgtatttttagtagagacagcgtttcaccatattggtcaggctggtcttgaactcctgacctcaggtgatccacccctgtcagcctcccagtgttgggattacaggcgtgagccactgtgcccaacagggctcattcattctaatcccgtatgatctcatcttaactaattacttatgtagagactctatttccaaataaggtcgtgtgaggaaaaaccaactcaaactgtgttttttggcctggcgtggtggctcacacctataattccagcactttggggaggctaaggtgggcggatcacttgaggctaggagtttgagaccagcctggccaacatagcaaaaccccatcttcactaaaaaatacaaaacaaaaattagctgggtatggtggcatgtgccagtagtcccagctactcaggaggctgaggcaggagaatcgcttgaacctaggaggcggaggtttcagtgagccgagatagcaccacggcattccagcctgggtgacagagtgagactccatctcaaaaacacacacacacacacacacacaaaacaactgtgtttcgcctctgttctcacaagacaataatcatcacagaagacttcttgtaaccaaatttgtggattctcccacacacccagcaagaatcaattctgcagcagactccagctggtgtcttccaattcaactcaattctggtgctgtctacctggagatggcctcagaaaccacaggttgagggcttggtcccacaagaccaacccccatcccaccagtcacaagtctgggcattgggaacatctgactaactggcttctagttggggttccaaggccccctctttgggttcaattaatttgctagagtagctcacacaactcagggagacctgtttatcggtttatttcaaaggatgttttattttattttctcctcagacatactttatcatcccttaaagtcagtagctcaaaggaaactttaaaagctataaataggccgggcacggtggctcacgcctgtaatcccagcactttgggaggtcgaggcaggtggatcacttgaggtcaggagttggagaccagcctggccaacatggtgaaactccatctctactaaaagtacaaaataagctgggtgtggtggcaggagcctgtaatcccagctacttgggaggctgaggcaggagaatcatcggttgaacccgaggggtgcaagttgcagtgagccaagatcacacctctgcactctagcatgggcaacagagcgagactgagactccgtctcaaaaaaaaaaaaaaaaaaaaagataaaggctacaaataaacagtcagatgaagagatacatagggtaaagactggaagactcctaagtacagaagtttctgtcctggtagagctggacacatggatgagttggttttttttgttgttgcccaggctggagtacagtggcactatctcagctcactgcagcctctgcctcccgtgctcaagtgatcctcccccctcagcctcccaagtagctgggaccacaggcatgtgccactatgcccagctaacttttttatttttgtagagatggggtctctctattttgcccaggctggtcgtgaactcctgggctcaagccatccacccacctcgccctcccaaagcgctgggattataggcatgagccactgcacctggccatggatgagttcttgttccccttcctgtcagcctccacatgaaactccccaaaccctgtcctcttgggccttttttaaaaaaattaattaagaaattaaagacagggtctctctatgtttcccaggctgctcttgaactcctagtctcaagtgatccacccacctcgtcctcccatagtgctgggattacaagattagagatgccagctgtcaggtggctaggtggattcagtgtaaagtcctagaagatgcattttagtaaaaacagctagccacctgacagctggcatccatccattcagtgaagattgttgggcactgtggatactgtggaggaggcagcagtcgcagccggcctgcagagtgagatgcagtgccagagggcttcaggaggaggtggcattgtgattgatgtctgaagagtgtctccatgataatggagtcagtgcaaagtcccaaagactgggaaggagcaagaggaaaggatagctcatatccagctgccccactccaaaaaaaaaaaaaaaaagaggaaaggacgggcaccagcaaggtaggacaaggggggcctctggagtgttttcttctcagttggggaggggtgtgctcagatttgcatgccaagtgcctgggctgcagtagggaaacagcagaggggctgggacctgtgattgggagtctccaggtgagagggttggcctatggggactggaggtcaggtgaggctggtagtgggttatagaggtgggagcagctggacaggcccagtgaggatgcaggggtagctgcccagggctagactctggctgctctggtggcagttgcttagctcaggcttgggcacgtccacctggcgcatctgaaacattagccagcagggcgcagactcgtcagtgagagcattcctgagcccagcatccaagaagcgagggaggtcgggaaggtgctgctatgaggcagggggaggtccccaaaagtccaggtgagagcatggcatgcgtggaaagtgctgcgcagttttggcatcagtgaagtcacagggggctgtgggtgaacaggtgtgcttgggcatgtcaccagggaggccttgagacaggagcgggttggctttcctggagatcaggctgtggcatggtgtcgggactggggcatggacagtcttcctccacccccatcccctccttggagctttcagacactgcagataattaccaggtgatgtgataaatactacctgtggagggtgccttgggcagggaggacagggcggccaggaggggggccctttgggcccctgctctgagctgctcatcaggaaaggggagaagctcctacaggcctggtgttggagcctagccagaccctgtgaggccttgaaagtaggaggtgcattgtctgtgcattgtcatctcaaggaatccacccagcaactgttctagttatccctgctctctaggtaggagactgaggctaggaagggaaaggctgctgtgatacccacactatcagtggctggggttgagtttaaacccagggactctagggcccatgcctctgccatcctgcctctgagttttggagctggacttgttccatcaagtgccaggccagccctgctgctgggtgctcccaggcattcacaagctgacaattctgaagggcccacgcacttggccatgcttcagtctgtgtcctgacatcacaggtgggtgctggaataacaaatgctacaaatggcactgggggtgttggccaggctctgggggcacaggagttctgcccatgcccacagctggcctgtgctgacctccctccatcacagctgagtagcaccagcacttccattgagctgaagtcttcctcccattccttcagtgtggtctttgtggctcagagaggctgtggccaggtacaggatctggagtggcccctgcttctctgctctgtgaccttagacagtgggcaggatctgaggccaggcccacctgcagcaggtgttacaaagaggcaaattggcgcttaatgttggtaagaacttgccagccaaccagagtcccactatctttggaggtagtgagctccccattggggaaggtatgtaagccaacctttctgggatgctggaagatcagagagcaaacacttgagattctgtgatcctaatattgaatccaatgctatgatgtttggatttgaagtcagttctatttagccagtttaccaagtgtctccttggtgcaggacaccaggagacacaaaatgtcctggataatattgggtttctggctcccaggggtccctgagatgttgttccagcggttctggagtatgggccaggcaccgcttgcatctggaccgatccgcattgttcgatcattgtgagcctcatgatggcagttcgggatgtcatgcccccatgcgccccccaaccccaccccgccatggccctcaccatggcccactcagggcatgaggctttctgggtgattgctggtattcagtgttgtcagcttcttggacctgtcagtgggggtggggctgcaatgagatgccagttgcaggaagtggtttgcacagccttcctggtgtcatgggtcactctcttgccgagtggctttgggcaggtcccttcccctctcaggctgcaggttcctatgccaggagctcccttcttgccccaccagggccttgttttcccagatacagaggtggggcagatcccagcccgttgaaacagactgggctttggaggccacagtgggcccatttctcagagggactgtgtggctggatgctgagccaggcactggactggccctttgagcctcctgtctggccaaggcccctgaggcactgtgggctgctggtgccagcacacaagggtgataaggagatgaaagtcactaggatggtggggcggcacccgccccgggctgtgttggcagctgcccctggctggaggccagcttggccctggaaccctcctcaaggaacaaggacacaaaagagccagctcagccagcctctacctagcaccccaatcagcactcccttcttcccatgacccctaccctctgcccagctcctgtaactggccaaggagctaatggacacccaccagggtcttaatgagtgagccagggttaatgggttactgggcccggtgacacattcaccagcctcccagggctctcaaagtccacactggcctggccttgaacgtcttagctcggccacctccttttccagctttgacacctcggggctcaggacgggcctagggtggtcaagaggtcccctgcagccctcacttcctggaaaaggctccatttcctggccttcaggctcaggtggttccttccgcctggcaggtcctccccaaatccaatcccagctcgggctggattcccaaggcccctattctggtgtctgccccttccctagggctcttccccctggggtgaccatactctcatgcccagccaggtcagggctccttgagagaagaatctggaggggccaggatttgatgggagaatgaatgatggaatgaaagaaggaacgtaagcgtgagccttgctaagagtgacaatactggcaggctgcagaccatgtgtggacctcgatctgagggcttagaggcttcggcctgccagcgctgtgggggcacccaccccatctcattgaatggggcagagcaggtgagggcatgagatggacagatgggcctcatccccctgcttccgttgcctggggtcctcggtcagcctgtttgctcagacccctgaaattgggggtcaaggaaggaccctcctggattatgtgactcccttcagtccaggtgaccagggtccttggagtgacagctcctagagccccacctgtagtcctgcaagctggggagagggcctgttaggagaggcatcccctgccctggggttgtagaggtgaactaggctcctcagaccttgtggggcctcagatgcttacatctccagcccctcctggcgtgggcatctggctgcagcccagctctgtggccccatctcccagggaacctttggtctaatctgcctcccgctgaaacccagcctcattcagccccaccgaggctttcagagttcaggtctctcattcagggtttgagaccccaccgggctcagagacacctgcagcctgcagcggtcccagatcacagcctcagggatgggaccaggagccagcccacatcccacctgcagcagttcctgtgcctttaaagcctcccctccccccgccccgcccccaggccactaggggagggaaggaggagctgggtcacagcagggaatcttagcttggttttggtgtgctgctggatgaccagaccgggcgtcgggtgagcccagaagtgagagcagttggctgtgccccagtgctgtgtgacccagaggcgccgctcaccctctctgagctggtggacatcataggtggggaagctcaggtcagggcactcccatgagtgtctggaggcctgagtcccattctcagctctgccatatgcttgctgcgctctagaggagttcctcttcctctccaagcctcggtttatgtacccgtgcagtgggagtgagttgcacttcggggtgaagggggcaagacttgtgtgggcgcatcctgcagaaggatcccacaggtgggcagagccctgggttctttatccgactgggtctgggctgggggcctctgtttcttggctgatgagtttatgtgagtttgagtgaggtatgcgagtgggtgaaggagggctggggggagtcacctgacttgtgcgaagaagctcttgagagagccgtggcttcttggaattaagaggaaagagtgcagcatgaacagacaggccctggaggatctggcagccctgagtgggggcggggggtcagctctggagtagagccagagctgtgatggggttgggggaccctgtgtccttgggccatgcttgcctcgctcctgggttctgtttgtggctgtggattggggtggggcagggccggttgtgcgaggggtcattgcccaactccagggggcgcctgccacctctcagctatatatatagggatatatatagttctttcgacaggtttccagcaggtagtggttattaaatcttactgaaggggtgttttttctgattctcggctctgtgccgcaagggtggaaactgtgagagacagattccaactccacgtctgggtagtaagcatccagtccagggctgtaggcagtcctggggaagacgccagagatctgtgcattctcatatcgagggatagcgactccaggctgggggctggcagggtaaggggtgggtgggtcctgggcttacccgcaggtctgcagacttcctggggccagctgacctcgtaaaatcccttttgtctaagcttcagtttcctgcctgtgaatggggttggggctgtgctctggtttcacccttgtggctctggggttgtggtgacaaagccatcaagctgggttgaaggattaaccaggaaacttcagactggctgccgtgtctacctcttcctcatactcctctctctgctgcatcctgggaagctgctctgctcagcctaaatgaggctcagttgtgtgtgtgcgcacgtgcttgcacgtgtgttggaagtgggtgatactgacaccagagtctgtgtctctgggtgagtgaggcttgcacatttctcgggacagggaactcactaccttatgtgcccaggacaagagctgtggggtctggagaagacttctaggccagcccctgcagtccttcctcaggtgacatggcttccccagacccacttccccctaggtgccctctctgcattcagggggtagagggctgactgggacagaatgtgacacactcagcatgtgaggaaaagcctccttcattctgtaggccctacctctattaacatgtcctttgataaagtgcctcccctcctgtctcccctctctggaatcctcagctgctgccaggcttcagctgtgccccattgaaggcagctctgtctccctactttccccagcccagggttttccttttggggtcagctgcagggatctgggccatcctttgcccactcagactttctttctgcccacctgctgctgtgaatcctgtatgtcatatatatatataaaatatgtaatatattatatattatatgtaatatataatatataaagtatattatataatatgtattatattatatattatataatatgtaatatattatataatatataatatgtattatattatatattatataatatgtaatatattatataatatataatatgtattatattatatattatataatatgtattatattatatattatataatatgtattatatattatataatatgtattatatattatataatatgtattatatattatataatatgtattatatattatataatatgtattatatattatataatatgtattatatattatataatattataatatgtattatatattatataatattatataatatgtattatatattatataacaatatataatgtgtattatatataatataatattatataatgtgtattatatattatataatattatataatgtgtattatatattatataatattatataatgtgtattatatattatataatattatataatgtgtattatatatataatattatataatgtgtattatatatataatattatataatgtgtattatatatataatattatataatgtgtattatatatttaatattatataatgtgtattatatatttaatattatataatgtgtattatatattatataatattatataatgtgtattatatattatataatattatataatgtgtattatatattatataatatatgatgtgtattatatattatatattatatgatgtgtattatatattatataatatatgatgtgtattatatattatataatatatgatgtgtattatatattatataatattatatgatgtgtattatatattatatataatatataatattatatataatatattacatataatatatcatatattatatttatataatttatataatatatcatatattatatttatataatttatataatatatcatatattatatttatataatttatataatatatcatatattatatttatataatttatataatatatcatataaatatattatatatagtattatatatataaaattatactttaagttctagggtacatgtgcacaacgtacaggtttgttacatatgtatacatgtgccatgttggtgtgctgcacccattaacttgtcatttacattaggtatatctcctaatgctatccctccccgttcccctcaccccacaacaggccccagtgtgtgatgttccccttcctgtgtccaagtgttctcattgtttaattccaacctatgagtgagaacatgcatgtcttatatgctctcaggcagagaggaaactgctgagcaggccggggcaggggacagagccctgtggctctccactttagacccctcctggctgactgccatggaatgcagccacttagcagggccaaatcccctgatgttcctgttggctgtctagccttcagggacaggtcatgggaccttggttcctgccctgtcatcttcccagtcaccctgatcttcacggggaggaatagcctgggaaaggacttggtcacagcacctccaccctagggctattgaggatctcacagttgtgtgtctggtgggttctgtccagagcccatttgagagcagtggatgacaggacaggcctatgtgacccaggcaggcagcaatattgggtcagccttcatgtccccttctgtcagctggggcagcctggaagcatgattgtggggtaggtgttatgggcacggaatagacctcaggtggaggctgcaggggctctccggcaccgtagacacagcaggcccaggagcaggggagggagccatgactcagggagactctggcccatatccttggcagatgagggccacaggggaatgggcagcactgtccaaagtcccctgggctgggtccgcagctgttcctggctcagacttcttggtgggctggtcagaaacatgcagtaacttggggcagttaccaggtggccaagcctgcactgctgggctctgtgagcttgggccagctcaggccctctctgggccctgcctttctgggctgttcgggtggttccttgggcctggggtgctaatgtttctggatgggcagcagaaccagtctgcactcagggccccaggccatgttcccggaacacacctttagcattgacagcagcgtgtggtgaggccccttaggctgggttctggtctagtgccaggggcaccactactccaccgcctccagagccatctctgggacactggctgtgagttcagatgttctgaacagggacagggagagccagagggaaccagcctggggctcactggaggggctcgtgggcagacagcgccctttggagggaactgagtctgaaaggaaggaaaccctttccccggctcatagcacctgccatccagggccctcccagggctgcgtgaactttagtcacgtggtgacaggccgagtcaccatgccaagtcactgtgcgcctccttgctgctgtgacgtcagcttccccatcctcccagccaggctggacctccgtgagaggcctgcctgtcctgcaccctgtgcagatgcctcccactgtccgccggggctgctgggcacgccctggctggtctcttggactaggtaagctcatgagtcctctggccgctcctgctccttccctgcctctgctcctcctcggaggtggccacccccagatcccagtcccaattcggaggccccctgaggagtgctgcagggggccacaggcgtggctctgagccactctggagagtggcggggggcccagccagttctgtggctgggactttcccaggcagacaagtctgtctcttcctccccagcgggtgcagcccagaactgtcttctgaggaagaggtgctctcctgggcccccactgtccccaggcctcaggtaagcccatcagggtcccaaggaagggggtctgggtttgaggccaaccatggcagctgacctactttctagcctcagtttcccctagtgtgtgcagctctcacgctgtttgggtgagaaccaggcctctgggcttggacattctttcagtgagtttttagggtggagggatgggaaatggaagcccaggacctcagcagggtgtcttcctccgatccggggacatctgcctgtgggaggctgggcccaccctcccttgctgacctgccctgggaggaagggacagggcccagcactgcctactcccctccctgttcttcccagcagtctgagcctggctgggtgtcccctgctcctccagcagcctacttgggcctttgggtagacagattaacagacaggcgaggctgggtcatggttggaccaccccaggaccctgaccgggggctcagctcatgaccctgagcctgggagagatgaggccatgccctccagggcactcagcatgacccggcccagtggacgggactgggtagcttccttggtgcagggggctgtcatgctaggacggggtcactgaccaggccaggcccctgccccatgacttgtggtggaaatgtccttttgtttttgtttttttgcattttttttgagacggagtttcactcttgttgcccaggctggagtgcagtggtgcaatcttgcctcactgcaacctccacctcctgggttcaagcaattctcctgcctcagctcctgagtagctgggattacaggcacctgccaccatgcctggctaattttttgtatttttagtggagatgggggtttcaccatgttggccaggctgttctcaaactcttcacctcaggtgatccacctgcctctgcctcccaaagtgctgggattataggtgtgagccactgcacccggccatgtgatgggaatgttctgtgtccataatagatgctgcatattgctggcccagctcctgaggctctttggacctccaggaatcggtgtctctatcaggaacccttaaccctgacccggactcccagctgggacccggggtgtcggagtggcaagagcgctgtcaggcctggtgaagggtgtgagctgtccaacggggcagggaggaggcagggcctgttctgcagttggacagacagagccctctagctgctttctggaagactgaagggcaggtgatgttggagggagggagtgcaggcaggggctgtgagggagttcaggtcagaaacaggtggcgcctggattcaggctgtggtggtcacggtggggatgaggggctgctttggattgtgctggggatgtggggtggtgcgctgctgcatgactactgccaggtctctctgctcttagtgtctgcatccagggctgggagggggtcaaatgaatcacactatcggccccaggcccaccaagcctggggaggtggccacccttccatgatggcatttggatgttccctgtgtgtggggagggcacagggactccattcgtagaccacctctgggacagtgtgtctgcctctgaggtcagacgctctgcactgggacagggtggagtggagggaaatccagcttggggctcattggaggggcttgctggcagacaccgccctttgtgggaaactgactgtgggagaggggaaccccaacctctgtcaccacatccctcttccctgttgtcacacctgtcacctgctgccatagccatgagacttcccaagggtcactgctgccactcactgcacagcctggaagggagtccacaggggacatacagtgagcaagagacctgtgccactcaggcctcctgggggtgtccccagtgcagccatgatgataatcacagctaccattcaccaagccctgcccacagtctaacctactctattcacaacactcccagcagcaaggcaagtgaggtg

SEQ ID NO: 15588 - DNA, 53119 bp, Homo sapiens
ttcgcagcggaccgaagagaagaaaagtaggccagagccggtgaggctggggacgggcgaggggaggtcgaggcgcctgtgaggggccaggggctggagaaagacttgctgcatggaactctgcggggctcggggagggaagaaagcgggaagcttgggccacccaaacatcagcgtcgcctcactagctcctggaagtaagttcattagctttcccctcaacgtgcatgcttctcacattctgtatctctccaggtgagtgtttttcaaagcttccaggcagtaatctcgaagtcatttctgattgactatctccttcccccaaatcctatgagtttttttttgtttttttttttttaagtagagacggggtttcaccatgttgccctggctggtctcgaactcctgggctcaagggatccaccggcctcggccttccaaagtgctgggattacaggcgtgagccaccgcgcccagccggtcattttttaaaaagttctttgtatctctgccccagtcccctttcaggcaatggtcccctcatgctttccacactgttgcagcagttttaactgttgcagaagttttaacaagtttctctgcttctaaaccttacgttctatccattttgtaaataaatgctgctatcttttcattgcgtcattctttacatataattctgcagtggttctccactaccttcagcataaaatctagactcctaaggctgaaagccagggatcctcaccaaaggagcctgtcctttcaacctcatgttctcctgtcttaggtacgcttaagttgaaacttagagttgttgctcatctcaataaaaagttcactgcttgatgcttttgattaggtcaagtcaggtgctttccctgattttcctccatgacaagcatttcctgcatatagcacgttgtcactttgatattttctcaatatccttgatagtaaaataagtgaagggttaaagggctgaattaaaagtacagcctgctctcctagatgtgcatggtcctttggtctgtatctgcaccttccatagggtagccactagctacatgtggccgttgaggacttggaatatggccactgggattgagggactgggtttttttattttaattctattgtgttttagttaagtttaatttaaatagctacgtgtgtacatgagctgctgtattggacagctcgggcctgtattattctcaaaacgtaatcatctacaattaagggttaacaaataacagtgcaacaaattaacattccagtccccctcccctgacacacacagtattggctaatggtcctttagctgaagattaagggacatagggtagcggggacacatgacccatgggagatgctctcttttcattcctagttttacttctgtccatcccatcattcctcctcaccccacatcttgcacatatttgccagatagtttcctccaaaccaggagctgagcttttttttttttccttggtagaaaatgcagctttggtgtttttgctaagttttatggagtgccaggccttaaaggaagcatgatgtgtgccacatgccttttcagactctgaaagatgaactgactgttgtctctctcattgtagaactctcttcctgccaagatgtctattggtgtgccgattaaagtactgcatgaggccgagggccacattgtgacatgtgagacgaacaccggtgaggtatatcgggggaagctcattgaagcagaggacaacatgaactgccaggtattctgctttgcatgtgaggctgtgtgggaggaatggccctgtgtcttgaaggacagaaaagtgtgtgttgagggtctctggaaattgttctcattcagcagtgatttcctaagtgcctaatgcataccagtcaggtgctgttataggctctgggggtgtgggcatgaacgagacacataatcttgaggcagaaaagccatttggaggtttggaatattttactttgtcctttttgttttttccatccccaaatatgggggtctatttgggagaagtgctacttccttcagtagaatccttcagattcagggccattatccatttgcctccacttgctttgcgattagcagaatcttctcacctactgtatttgtttcccttttctcttggaggaggagtctcatttgattattgcaactaccttgtgaggtaagcaggtttggtgatagtcttgtcatccataaaatagggagaatgagattaaagggctcatcactctgatgataaataatggagtagtttcctgatatggtgtccttctcatggcacaactttgccttttgcatagtcatctgaatttttatagcattgtttttcagttgtatcttcacactttctttgttctttaaaccactggttaagaacttggacttgggagtcagagagagatgtgggtttgaatcctaattatatgactttagatgtattaaccactcagttttctcatctgtaaaatgggggtggtattatgttgggttctttgatgtagatgccaagacagaattttgcaaggtatttattgggggaaatgacaataaaggataaaagagcaaggaagcagtagtaggcagggaaattttcagtctatggtgctggtctgactggtgaaatgagaggggaaaggaaggaggattgagcaggaagagccttagactacagcgtagttttgaggaaatctcagcaaggcagcgattgctcgttagaagagtctagcatggggcagaaatgggcggactggcacccccggtgtgttcaggctggcaacatggggagagagtagcctcaagttgaatgccatggtggactgcaaagatggagattgtcggctgcctgcactcctcatagcctgttctcttttgaagggagatgtgagcagcacacccttaagactgccacaggggtaatatccacacccccaggacttttacaaagatcagatgagctgtatgtgtgccatagctgctcagtgcctcacatactgtgagtgttcaacatatgatacctattgcttttttccagatgagaaggtcagagaggtaaagcaccttacaccgcggtcaggcatcctgaccatccattggtttgcagggttcatttatttgtgatttttctgtagctttgagcgtctgtcatcttcctgcgaggttgacaagcttggtcagttccctgaatgcagagaagtagacctctggtgactcaggtttattgcattactgtcaatagatcagtttatctattgagggtagataagtttatcatctctcatatatccagtcctctggcttaaggcatgctcatccactttaaggttctttaatttggtgaggagaatgcaagacttgggttagtgaagcttaatgggtttgttcaattagctgtatgtatttggacaacttgctgggtttccagggcctttgtcatcccatccgtaacgtgaaggtgtctaaccagataaccttggtagccattcagagatgcagtcaacatgacacaaagtgcacagaccttggtgtccgacagacctggaatcagcttgtagcctgccccctagggtgacttggggcgagcttagctttggacctccttcatcctctggtccctcctctaaatcagggataaaaatagcaccttggcctcagaaggaaccatgcctgaccaatggtgggggacagccacctgcctccctgcttgtatttgtatgctagtgctaccataacaaagtttcacagactgggcagcttagacaacacaaatttattttctcatagttctgaaggctggaagtctgagatcaaggtgttggcaaggctggtttcttctgaggaatgtgaaggaaggatctgtttcaggcctctctccttgcttatatatggctctcttcctgtgtcttcacttggtcttccctctgtagtgtttctgtccagattcttcttataaggataccatgcatgtaggattagggcccactctaatgacttcatcttaacataattatgtttataaagaatttttttttttttttttttgagatggagccttgctctgtcacccaggctgcagtcttgctctgtcacccaggctggagtgcagtggcgcgatcttggctcactgcaacctctgccttccaggttcaagcgattctcctgcctcagcctcctgagtagctgggactacaggcatctgccaccatgcccagctaatttttgtatttttatatttttagtagagacaggtttcaccatattggccaggctggtctcgaactcctgaccttgtgatctgctcgcctcgacctcccaaagtgctgggattacagatgtgagccaccatgcccagcttgcttgcttttttttttttttttttttttttttttttttttttttgagagtctcactctgtcgcccaggctggagtgcagtggcatgatctcagctcactgcaacctctgcctcctgggttcaagcacttctcatgcctcagcctcctgagtagctgggactatgcccagctagtttttcgtatttttagtagagatagggtttccccatgttgcccaggctggtctcaaactcctgagtttgcctcagcctcccaagtgctaggattacaggcgtgagccactgcacctggccttttttttttttttttttttttttttttttgagacagaatcttgctctgttgtccaggctggagtacagtggcacaatctcagctcactgcaaacctccgtcttcccgggtttaagcaactctcttgcctcagcctcctgagtagctggggttataggcatgggccaccgtaccccactaatgttaatattttttgtatttttaatagagatggaggctcatcatgttgcccaggctggtctctaactcctgagctgaggcaatctgcccaccttggcctcccaaagtgctaggattacaggcatgagccactgcacccagccttttttttcttttcctttttcttttctttttttttttttttttttttttttgagattaagctttggtctgttgaccaggctggggtgcagtggtttgatcatagctcatgggcagccttggacttctgggctcaagagatcttttcacctcagtcttctaagtatccaggactaccagtgtgccccaccatacctggctaatttttaaatttttttgtagagacggagtcttgatatgtttttcaggccagtttcaaactcctggccacaagtgatcctgctgcctcagtctctcaaactcctggaattacaggcatgagccaccacatctggcctgtaaagattttttgtctctaaatatgatcacattctgaggtgctgggtattaggacttcaacaatgaatttttttgagggatacaatttagcctgtaacaggatgtagaggcctcactgggtctatcaaaacctaggcacattgaataagagccagcagactgtggcgtagctaaagctggtggtgggtgaactctgagcacagtttagtttgttcagcacatctcaggctgtgaggcttgcctgtccttcccagatccagtcattctgccttttgggaatgagaacatcctcttagcacttttccttgcttgttcaataacattttctgttataaaagtggggtgggacaaaatgtggtggctactcctataatcccaacactttgagaggctgaggcaggaggatcacttgagcccaggggttcaagaccaacctgggcaacatgacaagactttgtctgtaaaaaaaataaaatagacggatgtggtggcacatgcctgtagtcccagccattcaggtggaggctgagttgggacgattacttgagcccaggaagtcaaggctgcagtgagctatggagtgccactgcactccagcctgggcgacggagtgagacctagtctcacacacacacaaaagcacaccacaacgattcggaaaagataaatagaggatctcactctgttgcccaggctagtcttgcactcctggacttaagcgatcctcccaccttggcctcccaaagtattggaattacaggcctaagccacacctgccctgttttggggttttagtatttactttttattctatcctctttcagaaatagttagaccctgtctcttctgaaaagcaaaaaagtttaaaaattatctggatgtggggctgggcactgtggctcacgcctgtaatcccagcactttgggaggctgaggcgggcagatcacgaggtcaggagattgagaccagcctggctaacacggtgaaaccctgtctctactaaaaaaaatacaaaaaattagccaggtgtggtggcgggcgcctgtagtcccagctactcgggaggctgaggcaggagaatggcgtgaacccaggaggcagagcttgcaatgagccaagatcgcgccactgcactccagcctgggcgacagagcaagactccatctccaaaaataaaaaatatattatctggatgtgatggcttatgcctgtagtcccagctactccataggctgaggcaaaaaggatcacttgagcccacccagcagttcaggctgcattaagctctggtcgcaccactgcactccagcctgggtgacagagcaagaccctatctctaaaattaaaaaaattctatggcaggataaaagtagatgcatagatcatggtgcaggtaagctggggtagaatgtaaaatgaagccaagcagtcagtatccagaaatgtaaacctgaatctctctgtacattgaataaaggtatattccagtgtaagattaagcagggaagatcatcagttccaaaatgcatagtgttcttaagttaaaatagcaattgtgtggatttccctggcactcagatacaggagacactattagatgatatcctcgacaacatccccatacaaaatacccttttatggtccctcaagtagttttaaagtatcctgttatcttagcactgtttttgacatttgaaaatgcaaaatatggccaggcacattggctcatgcctgtaatcccagcactttgggaggctgggccagggggatcacttgatcccaagagtttgggaccaccctgggcaacacagtgagaccctgtctcatatatgtgtgtgtgtgtgtgtgtgtgtgtgtgtgtgtgtgtatgtgtgtatgtatgtatatatgtatgtatatatatgtgtgtgtgtgtgtatatatatatatatttttttttttaaaggaagaagaggaaatatgtgtatgtgaaactcaggatgaggtccctgaaatggtgcttatcgggtcagagggtgtgcatctgaggttaagctgggaaggcagggagcttttgttctccttctcattccgacagctgcaagccaagcactggtggccagtgctgcaggatagggcatcagctgcaggatatggcatgttggtcaaaatgctgttggcataagtgagaaaaataacaatactccaaaatatgtccccagttttataaaaatggacccaaattataaatgatacaagcaaatacagagagtaatggtcaaacccatttcactacattcaaaatgacttaattcttagaagttttggtgggagaatgtggtgtagagctctgcacaagcagacattgtgcttttggggcttcaacatgaccacccaatcactgatgggactgtttgaaatctgttttgttggctttggcatataatagccatctttggaaaactggtctctgtatggaatatggtcttgtgtcactgtataaaaatgagaacccaaaagaagctctcacatgattgggtcagaaaattgcccataactattgctaggaaagtttttgaaatctctgaattcaatgtaattgaatttctttagacacctagccctctaggttgaaggaaaaccagttttttaaacttatcgtatactttttttttcctgtactgtttgtgtgtggattgcattcatcatgctcctctaccccataatacttttgtatttcctaagaacaaagataggtagatggccttagttggtattcgtattatagcagtggcatccaagcacctctgcctttgtgtatgtgtgaaattgtcctaaagaatgcatttctggtgtattgacaggcctgagacaccccaacacaccttcacagtcctggagctagctttctccatcttggccccaggtatctaagaaagtcccaccactttgtgctacaaagattctctctctccccctcaggatgtcatttcagttgggtacctggcttataccatatgtgtttcattgtggctgttgaggaaagttgattaaactgggtgttcctgcctggagttgattaggatctggttcactcaaaagttgctgccttgggcttgtgatacaaacacaggtcaggcttattagcaagctctagcaggcatgtgtgcagtgagactgtggggttttgtccacagcaagctgttcttagccagtgctacagggaaagcgagagcagtagtgagcctggttgttagggttaaaataggagtcagaggacactggactctcctgcttcagccaggacatagttcatttatggaaatgcctagattaagtcttgtcggacttatgcaacagcttctgtcaggaaaggagtgagatgtgcccctgtgctggagggagtgtggcttagcagtggcacagctcccaaaacacattttagctgtcaatcagatttagcatgtactgagtctctattatgtattaggcaatagagacagcatttagacatactttgccttgttcatttttttttttttttttttgacagggtcttactctgttgcccaggctggaatgcagtgtcataatcatagctcactgcagccttgaactcctgggctccagccatcctcccacctcagcctcccaagtagctgggaccacaggcatgcaccaccacacctggctaattgttaaaaatttttgtagagataggatcttgttacatttcccaggctggtctcaaactcctgacctcaagcagtcctcccaccttggcctcccaaagtgctgggattacagacatgaaccactgtacctggcctgatttgctttttaacaatttcaggaaatgtgcagtggttaagagtgtgagttagaaagaactgggttcaaactccagccaggccatgtaagcgtggtgtgacctcaagcaggagaatagagggaaagggcatgggtttctggggacagatctgcctctgaatggctatgtcacttcatctctttaccttgtaggattttgtggggtaacatgagctgccgtggggaaatcacctgggccagcacttgatgtctaataagtgctcagtaactgttggctttgttgtcttgtattttcaaaactcagctttgtagttgagggaacggaggctcagggaagcctggagatatacctagggttacacttctgacaaatggcagagctggatctcacctataggtctttaggcctattttgtgtcttctacagagtcatgagtgtggcacagtccccaaaacacgttttttgtttgtttggtttgttttttgttttttgagacggcgtcttgctctgttgcccaggctggaatacagtggcgtgattttggctcactgcaacctctacctcccgggttcaagtgattctcctgcctcagcctcccgagtaggtgggactacaggcacctgccaccacacccggctaatttttgtatttttagtagagccagggtttcaccgtgtttgccagactggtctcaggtgatccacccacctcggcctcccaaagtgctgggattacaggcatgagccaccgcgcccagccccaaaacacattttaattgtcagtcagattcaggtgagcctgagttgtatccagtttctgtcttgggtagtctgaccataaacctggcgttcatttgtggcactagaggttatggtattcttcaggggaagaaaaggattggtaaggacttgggaactggatgaaaatttaataacaggctgggagtgaggagcctggagcagaaggtttatgagaaactggagccctgttgcccctgaaggtagaacagggatagtgggtagaagctctagaaaccattcctctagaaactgctcatatacaacaggggcggccccagagcatagttttgtttgttttatttttgagaggatcttgctctgtggcccaggctagggtgcagtggctccatcacagctccctgcagcctcgacctcccagaaccaagtgatcctttcacctcagcttcccgagtagctggactacaggcacatgccaccacacccagctaatttttgtagagatgaggtctcactgtgttgcccaggctggtctcaaactcctgggctcaagtgatcctcccaccttgacctcccaaagtgttgatattacagacatgagccaccacacctggcccatagttgttcttttctgagtgttcaagcagaggctgggtggccagttagcacttgaggaaaagaatgaatgagtataagatggcagctagccagacagaaatctgcagagacagcacatctttctacaataagggctgacccattctaaataaattatagttctctctcttcagaaggttcatacaataagctgctttttctgtaaatgtggtgcttgttgaggttgatgctggcagattggtatcaccctcccatgccaagctggtctcaccttcaggctccccatttgtccatcctgcagtctatccttgttgccacatttatctttcctgagtgctgccttaaccctattgatctttcctctatcgacaaacttgactgactcctttatctgaagtaacgaccccgtccagtgtcattattcgactgctctggtcctcacatcctgtaggctcctgcccaagtgcctgctcttttccttgtgcaagctcttgcctcataaccctccagtaatttcaggccctttttacaggccttgtggtaccacctccatttctcagtccctagtcactcaacctagagggttctgtctcaccttctagagtatgcactctggagggtcagaaccacatctggtatatacttgtgaccttcatggtgcctttgaaatctgagtgccaggcagtgcaggggaagacagtttggaccagcagtttgaagctgttttcgttagggtttagcaccttcaagagctcttcacatctttgctcagcaggcagtgcagcacagccagggctctgaagctaggccagctggttcgaatctggagttccctgcattccagctgtttgacctgggataactgctttggtttttttaacatgtaaagatgggagcactcggctgggcgcagtggctcacacctgtaatcccaacactttgggaggctgaagcgggcagatcacctgaggtcaggagttcgagaccagcctgtccaacctggtgaaaccccacctctactaaaaatacaaaattagccgggcatggtggcgcatgcctgtaatcccagctactcaggaggctgaggcaggagaatcgcttgaacccgggaggcagaggtcacggttagccgagattgcaccattgcacttcagcctgggcaacaagagtgaaactccatctcaaaaaaaaaagggggggagcactcatacccacgctgaaggtgttgtgaggactgtttaggtaaagtgctcagtgcagtccctggtgtacacagttagtaccgatgattgctgggtaattcaccagctttgtcacaatgtcagtctgcttttctggacttccccctcccaccagtcaaggccctccccaccgctggtgctgttgaccgttaacttattagctggtgatttccttccagatgtccaacatcacagtcacatacagagatggccgagtggcacagctggagcaggtatacatccgtggcagcaaaatccgctttctgattttgcctgacatgctgaagaacgcacccatgttaaagagcatgaaaaataaaaaccaaggctcaggggctggccgaggaaaagctgctattctcaaggcccaaggtaggtgcttttcatgcacaggttttaaaatataggtttgtcttgtgtcttgtagaaaggggccctattactgcctggagacagagagggtttgacctctgctctctccacacccaccacccactgccaccccttccccttgcagcgtggagtgatcctgtgaggccattattttatttttttgagacagagtctcgctttgtcacccaggctggagtgcgatggtgtgatctcagctcactgcaacctctgcctcccaggttcaagcaattctcctgcctcagcctttcaagtagctgagattacagtgcgcactgccctgcctagctaatttttttatttttaatttatttttatttttattttatttttaattttttttaatttttttatttttttgagatggagtctcgctctgtcgcccaggctggagtgcagtggcgtgatctcggctcactgcaacctccgcctcccgggttcaagcagttctctgcctcagactcctaagtagctgggattacaggcacccgccactgcgccgggctactttttgtatttttagtagaaacggggtttcaccaccttggctaggctggtcttgaactcatgaccttgtgatccacctgcctcagcctcccaaagtgctgggattacaggcgtgagccactgcgcccggcttatttttattttatttatttatttttgtatttttagtagagatgggatttcaccatgttggtcaggctggtcttgaagtcctgacctcacatgatccacctgcctcggccccctgaaatgctgggattaccagtgtgagccaccgcacctggagaggcccatcttttctagaagttctgtgtgagaggtgtgggatcgcttgcccttgtctagtttgccgagcagacacagcccggagcagatgagctgactcgagtgtgagggcagcatttcctagcgagactgggtcttatggatggacaccagcatgtacttagggaggtctgatagtggagctccgttttcagaaataaagccaccttttagtacattccaaaagtgggactgtccttttcgcagtcccctagtctggtcttgcttcttggttagcctaatttggttttatatttaggttcatgaaagttctgtcatgttgattagacaacaaagtaattgtggcccttggaaactgtcttagtgttggtaaaaaaggtttgcagccaaggaaggcactggattcttcattggtatctttagctgctgtacatgttttatatgtgtgtgaggaaaaaagtcaaactgtgtttttcctctgctctcacaacacaacaatcaacaaagacttctgtgaccaagcaagcagtcagttctgcagtagacaccagctgggtgtccttcagttctgacactatctacctggagatagcctgaaaaaccacaggttgagggctcggtcccacaagacagcccctgcaccccccactattattcataagcacaggcctccagaacatctgaatggcttcaagccagggttctcacgtctcactccttgggttcgattaatttgctggagtagctcacacaactcgggaatcacatacttaaatttactggtttataacaggatattttataggctacaaataaacagccacatgaagagatgcatagggtgagatctggaagggtcgcaagcacaagagcttctagccccatggagtttcctcccggcacatggatgagttcttgttcaccttcctgtcaggctgcgcatgatcagctgtcccgaagctcccctaaccctgccctcttgggccttttatggagactttattggatagtcatgattaaaggatggacaaccatgtggaaatgccattagacaaaatgggtgtgatctaacactaatagacggggttgggaaaccccgcgaggcctgtccagattctttttggcctctctctgcagcatttgttcctccagggtatagggcaggacctttctctggagtgaggtcttatgacccacaatcagattagggtcctgccttgggcaggtgaaaggagggcaggagaagtttcaagagagagattctgtctcctgagtcctgcttctgaggcctaaagtgccccaatgttataacaaaagactataacaaggactataggagttacgagctgggaaccatagatgaaagctcaagtttaaagatgtaatagtgtgaggggccgggcgcagtggcccatgcctgtaatcctagcactttgggaggccgaggtgggcagatcacgaggtcaggagttcgagaccagcctggccaacacagtgaaaccccgtctctactaaaaatacaaaaattagctgggcatggtggcaggtccctgtagtcccagctactcgggaggctgaggcaggagaatcgcttgaacccaggaggtggaggttgcagtgagccgaaatcgtgccactgcactccagcctaggtgacagagctagactccatctcaaaaaaaaagaatattttatttgttcttcaaagcctgtcttctcctagaacccctgggttacagaggagaacagcagtcttatcatgctatttatatggagtgtgttttctttttgctactatgaaataattctttttttttttttttttttttggagactgagtctccatcacccaggctgcagtgcggtggcttgatctcagctcactgccacctcctccaactcccaggttcaagtgattctcttgcctcagcctcccaagtaactgggattacaggcgcataccaccacgtgcagctaatttttgtgtgttcagtagagaaggggttttgccatgttggccagtctggtctcaaacttatgacctcaagtgatctgcctgccttggactcgcaaagccctggggttacagacatgagccactgcacccagcctgaaataattattttctcagaaaaaaatacaaaagataatataacccttctcccagatctaacacatgttaacacttaactatatttgtttcagaattgaaaaaattaattcagtgcatctataatgtttttcagctcacccaaggccagccccaaggatttgtcttttctgtagctctcagaccaccttctttgccctcagcatgctgcctcccagcctcttgtagagagcagtgtgggactggaaggcaagagtgtgctgctagctcctgctttgatgccagtccccagcccctgcccctccgtctccatcccccctgttaaatgcagtggctgtcagctggacgtgttggcttatgcttgtaatcctgacactttgggaggccgaggtgggtggatcacctgaggtcaggagtttaagaccagcctggccaacatggtgaaaccctgtctctactaaaaatacaggaaattagccgggcgttgtggttcacggctgtagtcccagctactcaagtaggaggctgagacatgagaatcgcctaatcccaggaggtggagattgcagtgagccgagatcatgccactgcactccagcctgggtgacagagtgggactccgtctcaaaaaataaaaaaaaaaaaaggcgggaggtggaaatgcaatggccagggtggtgttggaccaggtaacccttcagaacccttctaactggtgtcctagggccctggctactctgtgctatgagcattcaccgaccacactgacctggcctcatattttctcttccctttcagtggccgcaagaggaagaggacgtggaatgggacgtggaaacatctttcaaaagcgaagataattttctaagttgaacagaactttgtccttttttctttcaggttatctgagttcattggagtgggtgcttgtgcatatatgctaggtatcttttgccatctttctctttagatcaggggaaatgtttaagctaaataaatctggggggttttttgttctgttttgttttgttttctttgagaaaataaggactttgtgttcatttgaagtttgctttggctaaattttgacaccctgggggatgtcctgggagaatgccagtactttgaaatagcacagctattgatgagattttaagctgctgttcctggccagttgcaggttaagccccagaaaagttcaccttggagaagctccgagaacacacagattgtgtctcattcatcttcagacacaggcacatagtgtggcactttgttcagttaacatttgtggagctgtcatcagctcagctttaacaacacaggtgactctttcccttgataaagtcataggtaattcaggggctgggtgcggcggctcacgcatgtaatcccagcactttgggaggccaaggcgggcggatcacgaggtcaggagttcgagaccagcctggccaatatggtgaaacctcgtgtgtactaaaaataaaaaaattagccgggtgcggtggcatgtacctgtagtcccagctactcgggaggctgaggcagaagattcgcttgaacccaggaggtggacattgcagtgagcagagatcatgccactgtactccagcttgggtgacagagcgagactgcacctcaaaaaaaaaaaagtaattcaggggatcctagtggccagcttccttggctcgtatactggctacaacaagtagttttgtggtgatttgtggaaacagattcttgggagcatatcagagcatctcagcattgattggcacatccatagttgttaatgtaggaagggtgaccagcagctcagcacagtggcttgcttccagcactctgggaggctgaggtagaggattgtttgagaggagttcaaaaccagcccgcgagacatagtgagaccctgtctctacaaaaaattctaaaaattaacttggcatggtggtgcacacctgtagtcctcgctactagggaggctgaggtgggaggatcacttgagcctgggagtatgaggctgcagtgagctatgaccttgccactgtactccagcctgggcaaaagagcaagactttgtctttaaagaaaaataagtagtagtaaagagtataagatacacagggtgaataattgtgacaaaaacacagaaactggaaaagcagcctgaaaaaatcaaatcaccaaaaagaggtcttgccaggtattcattatggtatgagctacagcataagccatcaagaggaaaactgatcaattattggcttttagaatattgctcattgaacagattattcaagtaatgaaagaggaggggaaaaaaatccagcacattagttaacctggcatcaattaatgaggttctaataagctttgtcttatgatactacctggaggttacagagctggtattctgaggaataagcatcagtgagttggtcagatacaatagacgtttaaaatagggcttcaggccaaacatggtgccccacgcctataatgccagcactttgggaggtcgaggcgggaggatcacttgaacctaggagtttgagactagcctgggctgttaagctttgttaaccaagaccgcatctctacaaaaaattgaaaagtagctgggcacagctgatgcctgcagtcccagctatcctggaggttgaggcaggacgaccacatgagcccaggagattaaggctgcagtgagctataattgcaccactgcactccagcctggatgacagtgagaccctgtctcttaaataaaaaacaaatgaaagcagtggttttcaacatcaactaaggatcttattagaaatgaagactgcaagccgcacacctggagtggggcccaggaatctgcattttaaacaattccctggtccccagataagtaattcttaagtattctatcttaagtagacctaaagccgtattttgaccctgtactagtatgttattttagtataatcattactgaattcatcatacttttacagtaaacagtacttactttgaataataacacattacacttaatagtagtgaactgcatcctcgatatcaaaagcgacttttgatgtagttcactctggacccgtacaggaacaccagccttgcagattctccacgcaatggaaactggctataaccctacctagatctgaaaagtgaagggggatcaacctaaaatatgtagctttgtaaacagttttatatcctgcatcttaggggggaaaatcagttgacgcagattgaaaacaagttgttccataaggtttattatgaaaaacagtagccctcctaccctgcctttaccccactttccttgcctcacagtagtctgtccaactcttggctgatttgtttgtatttacctccatgtctcaatatgaacatgttttcatgactattccttgatggttttttgtttgcttgttttaagacggtctcactcttccccaggcgggagtgcaatggcacaatcatggctcactgcagcctcaaccttctcgggctcaggtgattctcccacctcagcctcctgagtagctagaaatactggtgcacaccaccatgcctagctaatttttgtattttttgtagagacagggttttgccatgttgcccaagctggtcttgaactccggggctcaagtgatctgcccgcctcggcctgctgggattataggtgtgagccactgcacccggccaccattatcttttgaatcctctcttcctcctgcccaccatgaatttacttcctctcacccatctccctgatattgtaattctggttagatcatattcagtgtcaaattattaagatgtgattaaactttttaaaaatatgacagtgtcatagtgatcacagctgagtcatacaatagactagattactgtggaacttttccctgaaagtaatcctcttgcatttttatttgcttggttttctatttgtcactaattcaaccccaatcatatctgaagatcatgacatcatttatcagttattattcttgacccaccccaatctggactggtttctccccgtgcttggtgtgtcactgtcaccctgggcactccccacactgctcctctgttggatctctgttttctgtgtaacctcttcttttatcaccttattttgggggagtatctgcatgtctaaaaatgtgctcacacttgatttgattgggtatgaaattctatgttggaattagtgccgggcgcagtggctcattcctgtaatcccagcactttgggaggccgaggtgggtggatcacacagtcaggagatcgagaccatcctggctaacacgctgaaaccccgtctctactaaaaatacaaaaaaattagctgggcgtggtggcgggcacctgtggtcccagctactcgggaggctgaggcaggagaatggcatgaacccgggaggtggagcctgcagtgagccgagattgcaccactgcactccagcctgggtgacagagtgagactccgtctcaaaaaaaaaaaaaaaaaaaaaaaaaaggaattagtatccttcagaattttgaagttatggctactttgtcatctagcattgctgtagagaagtctgaagtgattttgagtccagatctttttttttttttttgagacggagtctcgctctgtctcccaggctggagtgcagtggtgcgatctcggcttactgcaagctccgcctcacaggttcatgccattctcctgcctcagcctcccgagtagctgggaccacaggcgcccgccaccacgcccagctaatttttttgtatttttagtagagacggggtttcagcgtgttagccaggatggtctcgatctcctgactgtgtgatccacccacctcggcctcccaaagtgctgggattacaggcgtgagccaccgcacccggccagagtccagatcctttttatatgacttttttttttttcccttctgttatcagtgttccaaaatttcagaatgacgtattaatacctgccttggcgaaggtctgtttccatgccaggcccctttccgagtgaactcttgtccttaatttctgggaaactttcttgaattcattctcagtgattttcttccttaggttgtctgtggtttttctttttctttttttttttaaagactgagtttcacgcttgttgcccaggctggagtgaaatggtgccatctcggctcactgcaacctttgcctccggtgttcaagcaattctcctgcctcagcctcccaagtaactgggattacaggcacctgccccaacacccggctaattttttgtatttttagtagaggcagattttcaccatgttggtcaggctggtctcaaactcgtgacctcgggtgatccacctgccttggcctcccaaagtgctgggattacaggcgtgagccaccaggcccggctgtctgtggtttttctttctggaatttctgttactcagatggtggacccagaattacctctcctccctgtgtgccccaaccccaattttcttttcttttgatcataatttatggaggattactccaagttgattctctgattgttcctttatatacgtagatatatagggacagtaccttgttccttgttgcaacatctttgaggatattaatatgctctgtagaagctttcatctccctgcatatgtctttctgctttctgttcttcaatttaatctttcatgttacagactttctttagctgcctggcaatcgttggtaatcttgcttatatttaagagtggagtattaaaaagaatatgtgattgtaaggtgatctcattgagcttctttggggaaatccccagtgtccatacttctagaactttgctccaggctggacaggttctcttggagaaacttttggtttcacatcaggagggtttactctgagctgctggattgagagctctgttggggaagagggtgagaatttcagcattctagtatgtccacattcagttccttcatccaggtctctgggagggctcctagtccagaaaccttctaaccccctctggagaataagcttccaacttttttgccaagattggggaagtcaggtcatgtggaaatatgaatgtttcagcatgcttttgctttttttctttgaaaatatattactttaaaatgaagaataagactgggggtggtggcttatgcctgtaatcccagcactttgggaggctgaggtgggcagatcacctgaagtcaggcattcaagaccagcctggccaacatgacaaaaccgtgtctctactaaaaatacaaaaattagctgggtgtggtggcacatgcctgtaatctcagttactggggaggctgaggcaggagaatcgcttgaacccaggaggtggaggttgcattgagctgagatcgcaccactgcacaccagcctgggcaacagagcgggactctgtctcaaaaagaaaaaaaaaagaataactcagatttaaagaagatatagactaaaggatgatgtcataaaggtaattagaccagtatttaacatgaattctgagcaggacacggtggctcacgcctgtaatcccagcactttgggaggccgaggcaggtggatcacgaggtcaggagttcgagaccagcctggccaagatggtgaaaccccatctctactaaaaatacaaaaattagccaggtgttggggcgggtgcctgtaatcccagctactcaggaggctgaggcagagaattgctttaacccaggaggcggagcttacagtgagccgagattgtgccactgcactccagcctgggtgacagagcaagactccatctcaaaaagaaaaagaaaaaccaaaaacatgaattctggttctgagtgccaccgtgaccacctctcccagcctctggttggttatctgtacaagggtggatgtggactcacttgattcactgatactatcccagcttctacactggtagaaccataaccttaaaaaacaatcaaagcatacaggagtttttctgccactagccaagatgaaagtaattgatttatcattgtgtctgaaaaaacacacacaaaataatatgaaacaatggttttcaagacatcagacattgaaggagactaatccctgagaaacgagaaataaataaggggagttgtacaattgccccagctcactgcttacaagagtctccaagctgtggcacagggaaggggactgaagctgacctaccagcctgcctgcattgagaaacgagagctaagagttcagagaagccaccaaggcagctaggactataggacagaatgtcaagagaagaaagccacacagagaacccaagagatctgcagcgggttgcttttgaacattcagcagaatactgatgagcacaccgatgtgaggaagttaacaggctggggaagacccataaagaattggaacagtgcttggcgtcatgctaggctgagactaaacattttcctatcagtcagacaagaaattcacaggatatggagtacagtgttgttttaagatgtaccatatctgattttgttttaatcaggtatggtaagacccagagacagctgccttgaaagaatgtattacagttctcaaagaagggggcaaaccacgttacgtgggccatatggggagacaccagcctgagtcaggaggcagaaggagcaatggcagagcaagacccagagccttcattgtagttttctcatgaaggaatgagtgaggcagagtaggcaagtttgagcaagtttaggattggatagtctgaataattttcaactgggttataagtggtctctgtaaagtaccttgccctgaggtgattgagggtaaaggaaatactggcttagtgtatgagagttagataaaggaggcagttttgggtgtggactttggattgtttggtttgtacatgaaagacacgctgccagcaagttgtttactatctctaggaattagctaaccctgggaggagcatccttcaggattagcaaggcccaagataccaaagcatcataaaacagaaaacaaaaggcatgattaatacaaatatccaggaaggccttgcctggtaaatgaggaataattagcccaagactgagcgctggacctgaataacaagtcataaaaacaacacattaaaacatgaaactgtttttccggaccaattaaatatatccaagaataagactcaaaaagatttataggaatataaaaatgtccagtaccccacacagtaaaattcactgtctggctccagtcagagattgctaggcatgcaaagatgcaggaaagcacagcacataatgagattaagagatccaaaactacacagatgttagaattagcaaagaaggacattaaaagttataactgtgtatttcaaaagctgagcagattttaaaagaagactccctgatttcaagaattactatagagctgtactcatcaaaacagcatggtatttcatcaagttaagcaaatagatcaaaggaacagagtctgaaaacaaatccacacatgtatacaaaatgagttttttcaaagccacaaaggtaatgcactggagaaaggatagcattttcaacaaatggtgccagaacaattggatatctgtatggaaaaatccctcaaaacttgggtctatacctcatgccatacaaaaaaattaattccaaatggatcatccacttaaaactataaaacttctagaagaaatgtaaccctaaaccttgggttaagcaaaaattcagatataataccaaaagtactatccatgaaagaccaaactaatatattagaccaccaaaataaaaaactgctttccaatgacactgttaaaagactaaccacgaaattttggcaaagctaagtctaataaaaaatgtgtatccagaatatataaagaatttgtggccaggcaccgtggctcacgcctgtaatcccagcactttgggaggccgaggccagatcacctgaggtcaggagctcgagaccagcaacatggagaaaccccgtttctagtaaaaatacaaaattagcccagtgtggtggcacatacctgtaaccccagctactcaggaaggctgaggcaggagaatcgcttgaacccaggaggcggaggttgcggtgagccgagatcgtgccattgcactccagcctgggcaacaagagcaaaactctgtctcaaaaaataaagaatttgcaaagctcaataataagacatggggaaaaaatttgaacagacttgagaagatacagatggcaaacatgcacattaaaacatgttcaacatcattagtcattagggaaatgcccaagttaaagccagagagatattgctacacacccagaagaatggctaatgtttaaaaaactcaccatgctatgtgctgttgaatatgtaaagcaacaagaactcccaaacactgctgatggggatgtaaaactgcaccaccactttggaaaacagtttgacagtttcttaagacattaaaaatacatctaccttatgatccccacattccattcctaggtatttacccaagagaaaaggaaatatatgtccatgcaaaaacttatacatgaattttcatagcagctttatttgtaatagccaaaaactggaaacaactcaaacatccatcaacagatgaatggataaattgtggcacaccgtccagtgcaatactcggcaataaaaaggaactactggtacacgtgagtgagtctctaaataattgtgctaagtgaaaagccatatagaagagagtacatccggctgggtgtggtggctcatgcctgtaatcccagcactttgggaggctgaggcaggcagatcacttgagatcaggagttcaagaccaacctggccaacatggtgaaaccccatctctactaaaaatacaaaaattagctgggcatggtggcatgctcctgtagtcccagatacctgggaggctgaggcaggataactgcttgaatctgggagggggaggttgcagtgagctgagactgcactccagtatgggtgacaaagtgagacttcacctaaaaaaaaaaaaaaaaaagtatatcctatatgattccatatatccccaaatctcacaaatgcaaactgtaaaaaacaaagcaaatcaatggttgcttttggatgtcagtgggcatggagaggcgggagggagggattaccaagaggcatgacaaaactttcggggtgacaggtacatttactatcttgattgtgatagtggcttcatagatgtatacatgtgcaaaatgtatcatattgcacattttaatcttgtgtagtgctcggaatgtctactttttgtgtttcaattatacctcaatgaagggttattttaaaaaataaaatatttttaaaaaacaagccgagcgcaatggctcatgcctgtaatcccagcactttgggaagccaaggcgggcagatcacaaggtcaggagttcaagaccggcctggctaatatggtgaaaccctgtctctactaaaaatacaaaaattagccaggcatgatagcagtctcctgtagtcccagctactcgggatcctgaggcaggagaatgccttgaacctggtggggcagaggttgcagtgagccaagatcatgccactgcactccagcctgggtgacagagtgagactctgtctcaaaaaaaaaaaaaaaaaaaaaaaaagttgtgcatagttggaaaagaaaatactagatttcatgggtgattggcaactagctctaagtggaacaagtgcattttcctttccttccaggtcccagagaaaaacctccatgctgggttgatagcagcagctaggatcagttgcccaagactctggattctcgagatgaagaccgtcagcagaggctgatctctcctgtgggctcatgtcctaaagcaccttatttgggctcaaatatcctcccttttaggacagaaaagaagttcccgagtcttggtcatgttgggcctgtggagcacatcatcttttctacgtgtttccttttgatgttctcagcatccctgcaagatgttctcagcatccctgcaaggcaggctaaggcatgaggagctataggcccagggagctgaaggcagattctaagagctgggtgtggatgctgcacccctgagcctgggccgcctgggttttgctcagtctgggaagtacttccaaacccactctttgctagtcttttacaatcctgcgggagggcaaagcccagatcatcatggctgcttccaccatgtagctgcagatcaggaaactgaggtccagggaggtccttactggctttgctccagggacaacgaggcttgaggtctgttccccacaggaggaccatgatggttctcctgcttcaaatggcccctttggaaggggcttgctcatttaggtgaatcctggggccgagcagccccagtgatagtccctgggatggctgtaggagagggagcagcatgcaggcgttaacgtcacagactggcaccaggccacccgggcttacactctggctcctccagttcctggctctttgaacttggacaagtaatcccctttctttattttttgtttttttgagacagtctcgctccgtcacccaggctggagtgcaatggcacaatctcggctcactgcaacctctgcccaccaggttcaagcaattctcctgcctcagcctcccaagtagctgggattacaggcacccaccaccacgcctgactaattttttttttttttttttagtagagatggggttttgccatgttggccagcctggtcttgaacttctgacctccacccgcctcggcctcccaaagtgctgggactacaggcatgagccacgccgcctggccaacaagtccccttaacctctttctgcctcagtcgactcacctggaaaacagagcacctacctccttcaaatgagaagagaagtaaaggagtataaggccatcagaacagtacctggcccaagggaggctatggaagtgcttgttgaataaaaaaatggcttcatctctggcctagccccaaaggtttgagttcctgccattgccacccagacagccctgggtggaggccctgctgacattgaagagtgcctgccctcctcccctcaatgcggtagacactttccaaaacttacgtcatcctcactctcactccagtgggataatgggaggcttggtgtacctcattcccaagatgagggaacaggctctgagaggaccacatcgccagcaagtgacaggctgggaccaaggccaggcctgtctgcctcctagactaggcctgagtgaggaccggcctgagtacggcccacctgcttcctcctccgtttagagcttgggctggagctgtcctggccagtgctctctgcctcaccaggctgcatgagccacaagctgccacttgtggagctcggtggccctgccctcgacagccttgctggtggtcgtgaaggctctaaacacctgcatggcaatgaggccaaccttctccgcttgatccgtttcaggctctggctccgctactgcatcgtgtgcttctgtccaagaggcagagagactgaaactatctgctgccgcctggattctcccagagattgcctggaacaccagctcgggtcctcgcacaccatcctggtaggaatctctcagtgacaattgagagtttgtgggctggcttagggccagtggtgggcagggagtcagcagggcgcaagggactggagagcttggcatttctccaacaggagtttcagggagagctcagaggcctgcttatgtgacaggtttatcagcttgcctggcccagggccggctctcataccgttttgatttaaataatagattgctcacagaataaatgtatgttggtttaagctttcactttctcataatcctctctgctggcccctcccaccatctaccccattttgcctcactctggggagcctgaacaccctgttccagagtaggggcatagggaaacacttctatggcttctgagctgctgggcagggccagtccctaaaacaaggagagctgggagggagctggaccccaggatggagtgctgagagctgaaagtcctatttaacagaggggagggagcagagatcccaaaaagggaaaggcctggccaggtcccacagcaagtcaggagcagagcgggcctgaactgtgagatctccaatctctccaaagcctttgggtaagaagtccgcctaaagcagtgagatcagtggggtctgaggaaaatccttttcctcactgcctccatcccagtcctgggacccaacaccatcctgtcctcaccctccttggccatctccttttgccctgagaagctgttatgcatccagccagactgggaatgtgctggaatccatgcaccacaggggatggatgcgccgcttacagtccctgtgggccatggctgtgagggaaagtcagagctggtggctggggtgtgtaggcccaggaggacccctgcctcctccttagccttggagcccccctctgctgctgagtctttcctcatctagcagggccccactgcccccagaccttacctcctggcttagcacatgacttccccactctgggcctcagtatccccccggacatctctaaattcctttcccgcctgccctgcctgtcttctggttgggctgaactgtaactccccacacagggctgagggtgactgtggcattaggcttctggctgggagcccaccctgatggtgcttggggaggaagggagacacttccccctgccaagggcagccctaggactactctgcccccaaggccccctgctgctggtgatgcgcacctccacccgctgcatgctctcccacacggggactcccacacggggacccccagggcctggagggaacacacaagcactttgtctctggcttgctgtctcctaaccccacagagctgcccctcgccaagtacaagaggcctggggctgggtcctgagggtggcaagcagcactgtaccctgtgggaggcaggcaccaagtcctctcacttagtcggctgtggcccctgcctctggtctgtgcagccttgtcccctgcccagagggctgtggtggtgaggctggcagcctgggctcagacgtgagcttgctgtggggctccatgtagagctttgctcctcctggggctcccgacccgctccttcgcagctccccttctcaaggagcccaagccctgcccagatgtgagggcccgctccctggaggcctcctctaactctccagcccacagggatggacccaggacccccacatcttagactccatgggggacttgcccaaagagcacctgggggaaggtcagtgtgacctttgtcccacccttttggatagacacagccaccctttctccccaccccagcagcagggctgttgctcagtgaccctgaggttggtgatgcagaaaagcagaggcgggtgtcactctttattgcggggtccacactgtgggtgctggggcccctcccactgagggaaggctgagcctctagccagggctggccacctggccacctatgagtccattcttctgtccccttaatctcaggctgagcatttacactggatttctgggggcctgtgagtcctccttgaccttcatcgcccactatcatgtgcttgagagcatcacaagtcagtagcaatgagccaggtgggtggtgggtcacctggcacagcaggcctggggctcgggtcccagcccagcagctgtggagtcccaggtggaggcaggggtggtggccccggccgcactgccctcaggctcaaggtccaggccctcgtagatggtggggagtgaggtgcgctggctcagccgccggcgcaggccgaccagcaggggctggggcagggaagccacatccacgttgttgcccaggtccacccaagccaaagcagggaacttggtggtgtccttgatggcatcagtgagcttgcgggcagtggcccgcgtcagtcggttgccgttgagcaggagctgggtgaggcggggcagcgcccacaggctgggcagcaggaggtgcagcagctcatcactcagccccgtgaagctcaggtccagcaccgccagcacagcaccatggctgctcaggtagcgtgtgatgtgttgcacgtcctgtgtcgacagcgggatgcctgagaggtccacagtctcccctgccagcagagtcttctggaggctgctcttgaggctatgggagagtggcaggtggggatggactaggcaaccaggcagtccccccactgaccacagacagtgacctgtcgggaacagcccaggcctacagtctggcaaagccagattcaaactgtgtctttcgtattttttgagacaaagtttcgctctttttgtccaggctggagtgcagtggcacaatctcggcttacggcaacctctgcctcccggattcaagcgattctcctgcttcagcctcccaagtagctgggattaaaggcatgtgccaccacgcctggctaattttgtatttttagtagaggcggggtttctccatctttgtcaggctggtctcgaactcctgacctcaggtgatctgaccgcctcagcctcccaaagtgctgggattacaggcgtgagccactgcgcccgggcccaaactgtcactttctaagtgggtggccatgggcaatgctcagaggctcagtttcccctttggtgaaaatgggacgtggttgttgtgaggattaaatgcacacacagtaaggctctttcttcatgaactattatttgaaatctcactgtgtgcccagcatcccacacctgttttattgacatctcacttatttttcagataggtgaagtaactcttccatggccacacaccactaagcggggaaccaggtcctcaaactgagatgctctgactcttgagcccacatgtttttttccctgtgccccttctgatgtcgattcttttagggtagggagaaattctcctacaaagggacggctattaggctgtacagggcaccggggatagagagggacaggcccacagtagtgaaaggggaggtcctgggtgtgcaggctgggggccggccatgagggagggctccccgtgttttctcagttagaagggaagttcagagactgagaaggacccccgcccccaccaaccctctaggtctctccccagttatctgaacagagcccactaggcagacaggccttttgggggactgacagcagtgagcacaccctcaggacccccaccagccatggcagggaacaaccttgtggggtccaagctcagcgtggcctattaggcccaaggtgggacaggggtggagggcagacaggggaggcctgctagggtaagctcccggcagcagttcaggcctctgggcctgggtgcctgtggccagctctggactgagcctgtgtgtgaggctccatggatggagtcactccaggatggagtgtctgagagggacccatggcagagggagctattgggcagccacggaagcctcagttttaggcagcctggcagtggcaaagaattcccaacaaggtacaggaaaatcagggtagagtgtggccttaggcaagccacttctccgaacctgtttccttccctctaaaatgagaatcgcgatccagaatctgcctcccccgcaacctgttgggaagtctcagctgaagatgcctactgaggtcaccttggctgttgggtggaggggtggggtgtccaggccgtgtaacagaccagggattgagggatgtatgaatggcaggaggcaggaccgtcctgtgggaaatgccaaacgggtcactcagagggtgcagcttggcttggggagcatctgctaccacgggccaggctgacttccagggtagggccctcatgcggaccaggtgagggcctcaccaggtgggatttcagcaccagcctcttggtgagagtgcaggtgtcaacctgagaagggaccttggagcagcagtgaggaggggcagtggctgggctacccttaccagctctgggtcttcctctggcgcaggctggacccttgctgctgcttcgagtgaggggtgaggtggtagatgagctgtcggcagatcttgtccgaggacttccagagctcatagtcctgtgggagggcagtgtcaccatggtgaatctgagcccctcctgcccacctcagggccttggggagagggacccaggcagccaagtgtgtgtgtgagcacagtcatgcaccatgcatcaccgagttgcccaccagggcctccccctcctaccccccaacccggctgtggcctggcacagagccaggggaggctgccctctgggagctggacaggctggtccagtcccgcagtgcccggcgggaggaagcccagacaatgagcccttgttccctgtcctcgggcccagggccagcgtctcgggctatcagccggctgcctgcccaccctcagcacccttcggggacttgccacagggggaggaggccagaccaggcccctcgagggagccgtgctccactgacgccaatcccagggagtaggaacaagccaggtcagcgtgttcttcttcctctcactctccaagcgagactgcgcctgcggggtctgggtctgggctgacagggctgggggatgtaatgttttacagcaccaccacctggctctctctcagtcctaactgggctccggcagaggcccagctcagggtggaatccgaggtgcgcggcccacaaagctggcactgagcatgctccactgcatcctttatccagtccctctgtgagcagccccaggagcaggcagcacacacagcagctgcaagccctggctgttcctgtgatggccgtgggctaggcgcagagtcctaggggccgactgtgcagagacctgggcattcagagctggcagggcccagagcggataccctggttttggttggggactcactgtgactaggagtctgggtccggtggctggtcacagccacacatcctggggctgtgtcgatgctcatggcaggacatctgcaggtgctgtcagcatggggttctgggcagctgtggggtggaggctgcaggtggcaaactccaccccagcaaggaggagggccttgcttatgaccccagctgttgtaggggaaagcagtgagcacccgtccgcaagggtgtctgtacaggatggagacctgcggacagacgggggctctagccgagagcggctctcttctggcccaggaattcagaggctaggagtttgtttccgttggtggatttctcagaacagtctgtgacccgcagggtccccatatgacttctgcccagctatagtcttcctggtctgggcccccaggcctggtgcacagtgctgccacacagaaaatgggtctgcccaggactctgagggtcctgcaaagcacagctcacacttgctctagctggtggccagcctaatatactgatgctggcagcaggtctcagacagggacagtgacttgcctaaggccacacagcaagccgcagaaggacctagcctcccagtccccagccctgggctctgttggcccccctgtccaccacagtgcccagcccagggcccgtgcctgccagcctcaccttcttggggcactgcaggtcccgggccaggttcacaagcaggtcatgggagatggggtcgaccgggttgaggaaggccacatctctgtagaggatatcaggaaggagggtcctctcaaggcccaggtcctgtgagtggtgaagagagagttgagtgagcccgttgggtctcccatctcgaggcaccaccccagccagccagatgctgcttatgcccgttcctgtctctccatctcctccctaaggctggctggattctccccacaggcggccatgggccaacagtccagtggcgggtggcccccttctttttttgcttatttattttttgagacagggtctcaccctgtcacccaggctggagtgcagtggcgtgatctcagttcagtgtaacatctgcctcctcaaggaatcctcccacttcagcctcctgaggagctggggctatagacaggcaccactatgctcagctaattaaaaaaaaaatgttttgtagaaatggggtctcactatgttgcccagactggtctcaaactcctgggctcaagcgatcctcccaaagtgctgggattacaggtgtgagccactcagccttggaggaccctttggataagtagaggggagggacatgggagccctcagggaagtggtaagtgaatcccagaacccttagaccagttcccttgaggtagtgttgtgctgtgacactgccttctctggggttaggacttgtcagtgggattctttggggtctttcgtcttatggtgggggggtttgctcttcttatgacccctcaaattcccctgtcccccagtgttcccttcagatcctctgccttcccacctatcccttggttttcctaagctgcggccagcatctgtttgcggacaggtatggatccttcccttgggggcggacctctctctcagatgtctcaaaggcatgccaccctgaagccagcctcaccacccatgccccagctcagtatagggcacctccatgaccatcttcccaggcactggggccagaagctctggaaccccccagcactcttccgtcctcctctctcccccagctcacctagtcatcccttctctctccccaccactcctgccaagattcaggcctccagcctcctctcctacccatccctcaccccaccgcctgcatagacctgccctggccttcctgcctcactcctccactttctcctcctgtctactcccacaggactggtgtggggctgaatactctttcagagggtctctttgttttgagacggagttttgctcttgttgcccgggctggggcgcagtggtgcgaggtcagctcaccgcaacctccgcctcccgggttcaagcaattctcctgcctcagcctcctgagtagctgggattgcaggcatgtgccaccacgcccagctaattttgtatttttagcagggaaggggtttctccatgttggtcaggctggtctcgaattcccgacttcaggtgatctgcctgcctcagcctcccaaagtgctgggattataggcgtgagccactgcatctggcccagagggtctctttagaggacattttgagagctgatggggcagccacagccaggaggggcctctagaccccatgtgggccttctccaatccataggtgatatgctctgtgcgtgggtcccaagcacaggaagttgggccaggcaggggaggccgtgggtcacagctgcagggtccctgcaggttatggagcaggataggccccggctggacctcaaatcccaacctctgagacacaaagaggtggtctctgaggatccttctttccctctagtttcccagctaaaatgcccaactggtgtcttggactccaggcagcatcccagactgagatctgtgcctctggttgtctggctgattcagtgctgctctgctgtttgccacagatgccagctagggaagatccaggaggaaggctggctgatgagcctggcagacccagacagggccccagaccgcaacctgccagcctgccttccatgggtctagacagctcctcttaaacggacagctccatttttccagcctgctgaatccagagttggaggaggtggagaagggaagggaggaagaagggctctggccctggcttgccccacattttctctgtgggccctggggtgaccacttcgctccatgcctcagtttccccatttctaatctaccttctgcaggccgaacacctgcatggctgacttcctgctcacaggatggggcaggtagtggtggtagctgctgtagggggtggggacggggtggtgagggaagtggcatgcccaggtgattggggggaccagcatcctgggacaacccaggggttgggatctgggtttagtgtacctggtgtgtgtaggagcagagccaccaccggaccgagtgttgtgatgcacagatgctggggatgtgtactctaagggcatgagccgcctgttggagaactggtgatgcatggatggctctctgtgggctgccatggtgtcttggggtgaggctgcatccctagaccagccctgggtcctctctccagggtccactgtctcccggatcctggaggagggggaagttaccctcttccattgtctctcaatacaagatgatttgacctcacttgccactcctcccgggcccctcccatcttgccagggcctgaatttgggctcttaggtccaggctaccgggccaccctcaacacacacaacccctctcaaaccccaaagacccggacacactcagcagccccctcctccacacggtccgccgacctcacccagccctcactccaggcggtcgccctctcgcccacgcaagaccccgcgtgctgcagcctgtcgcgccctcggaacccgcctgcgcgcgccagagaccagctccgcctcgcctcccggcggatacaggcccacaacccatagccccgcgcctcccagacccccagacccccagaccctccctggccgccagcccaggggcggacggctccttctctcgcctggcgcaggaggcgcagcagctgccgggcgcgctccggccgccgctcgcggagcgtggactggatctcgcggagccaccgcacccggcgctcgtagggcgcgggcccgcagccggccgccgccccggcctcagagccagcctcgggcccggcccgccggcccagccgcgcccccatggccgccgcgcgatggtcgccgaacccacaggaggccgggctgtctgcgccccgctcccggggccgcccctagtcgccccgcctccaatcaccgcggccctgccccgtccgggtccgaaggctgagcgcccgccccaccccgcgccggagcgaggccagtgggttcctcggtttggcctgatcacactggaggaggccctgcttgcgtcagtcttggcgctagaacccgagggcctggagccgccaggggagacgcggagctcggccgagacgaggtggcttttggcacctctttaccctctggccccagtgctgactggggaatagtcgctttgaccgtgcaaagagcattctaggcggggtgggggggttctgctgtgtgtgccagtgttaggtattgcccccattgcttttagaaatatgccctgcatggtgaatctccgtctctactaaaatacaaaaattaggccgggcatggtggctcacgcctgtaatcccagcactttggggggccgaggcaggcggaatctaaggtcaggagttcaagactagcctggctaacatggtgaaaccacatttttattgaaaatacaaaaaattagccgggcgtggtggcgggcgcctgtaatcccagctattcgggaggttgaggtaggagaatcaattgaacctgggaggcggaggttacagtgagccgagatggcgccaccgcactctaccctgggtgacagagcaaaactctgtctcaaaaaaaaaaaaaagaaaagaaaagaaatctctgcagctggcagttgtggtgtaggacctgctcacgctacatggacactcctgcactggcaaatatttactgcctcctgcttcttggtttggggcaggcccccacctctgaccccagcctgggaaataaaccggacgaagagtcaggttaaccgttaagcccagctctgggcaagctggcagcaggcgggctgtatctgccgctggcttcagtctgcctccctgacaaggggtgggggtggcggcaggcagagtgagatgggggccctggctcctctgaggaccagggtgaggtacggacccacccagctcaaggtgtatcccacttcccagggctccctcagcagaagcctaggtctctgctgcaggcctgctgggcccctgcagccccaatcccggctctgggacgctcacatctcctgcgtggggaacgtttgaggcactgatctgcagttcccacttctctaagcaaggagcacgtgtttagcctgtgaggactggtacctgttgtgcaggaagggctgagcactgtccgagggcatatatgagggacgacagccaagcacccgtgtgtatgtgtgtgtgtgtgtgtgtgtgtgtgtgtgtgtgtctgctaattaccctatgaagattcaaggttccttcctttgggttaagcactgcctgcccagagatggcagtggggagagggcagggtgctaggctctgtcatcctgtggggctgggcccctgagacaaggcagaggacagcaggatgtcttagccccttgaccatccacggacccccaacccctgctggagcagtgcttgcacccccttctcccctggcacctgccagctggacccaacagcctctcctcccactccagtgcagccagcattgtcctggggccaccttggcaccacaggtttcctccctggcaaacctgcatgacggccttgcgtgccctcccccagggccaaggcgctgttgctgaactgaagtggcaacctacccggtcagagctttaagctgcagctctgatgccccagggacctctcagacccccctgcccagagcaggcagcccggtaagccctcctcctcttcccctgcagcctcagggctggagccacagctgggagggctcccagatcctgaccatatcctcccagaggctgagccaggcctgggcactgtcccctcaaatgtgagaatactgggcagggggaggggagaaaggagggaatggagggctgagcctggaggcatgaaaggggcaacctaggcagcggtatgggggagtgctcagagcttagagtcctgtggaaggcagagaactgccccagcccctgcctctcatcccccaccctctgtgtccctggccgagaggttcctggaggacatttttccagcaaaagagggagggtggtgtctgggcctagatccttggatgggcttttctctgcctgcttgtggggtgcctagggcgagtgggcttttggagacaatttctggcctaacctgacttggacagcagcccccagaggcacagctctcccctcaggcatgggggcatgattccacctcgctagcccacatgtgttcttcacggagggctgctggcccgtctccctggggttaccctgagcagcagagctgtgtttgttgagactccatggggtggagggattgcgatgttgtcctctcagttcccggggctgatgtggaagctcaagggcttgccctggattcttcagggtagccctgccatccctagtgagtcagtgagttgggaggttgggggctggagaatcaggtagggaggacacagctagacctcaggccctgatgggaacgtactaggctccaagtgggacctgccaggagacaagaattgatgacagccacacctttggagtctcaagccctctgccacccatgcggtggcctagttcaaatgacaggaacacaaggtccagctggcccaatgggcaggtagagggctgcagccagggctggaactggccttgcactgcctctgggcccttctctacccacccagtagtattgttcaagcccaggagggaaaaaggccagctcagggttaatgttacctcagcaagtagctgagtggcactgagcctcctggtagccactgtaaagaaggacacagaatggtttgggggcattcgctaggaggaaggaagcagatggatactctatggagacagaatgtcctctgtgtttgctctacaggaacgggttgtcaaccttctgcagggccaggaattgtcatgaggctgtagtaggcagcagagcttggcggggtgaggcgagatcacaggtataggctcagggcctggattcaaatcccctgggctgccacttgttggatgtgtaaccataggcagagtaaggacctgccatagcaaattaccacaaactcagtggcttaaagcaacagaatagttctggaggctaaaagtctgaaatccaagtataggccaagccacactccctttgaggactccaggggaagatccttccttgtctcttcagcttctggtggctcctggcaatccttggccttccttggctgctgctgcatcactccagtctctgaaaccatctaccctatgtgtctgtgtggccttcacatggcattccttatttttgcagtggggtctcactatgttgcccaggctggtcttgaactcctgggtccaagcagtcctcctgcttcagcctcccaagtagctgggattatgagtgagtgccaccatgcccggctcacatggcctccttgtaataacgctagtgcctgggtgcggtggctcacgcctgtaatcccagcacttttggaggctgcggtggacggaccatgaggtcaggaaattgaggccatcctgtccaacatggtgaaaccctgtctctactaaaatacaaaaaaaaaaaaaaaaaaaaattagcctggtgtggtgacacatgcctgtagtcccagctacttgggaggctgagacaggggaatcgcttgaacccgggacgcagaagttgcagtgagctgagattgcgtggtgacttcactccagcctggtgacagagcgagactctgtctcaaaaaaaaaaaaaaaaaaaaaagaactgaagctactggatttagggctcattcattctttttttaattttaatttttttttttttttgagacagtctcactctgttagcccaggctggagtgcaatggcatgatcttggctcactgcaacctccacctcccaggttcaagcgattctcctgcctcagccttccaagtagctgggattacaggtgcccgccaccacgcccagctaatttttgtatttttagtagagacagcgtttcaccatattggtcaggctggtcttgaactcctgacctcaggtgatccacccctgtcagcctcccagtgttgggattacaggcgtgagccactgtgcccaacagggctcattcattctaatcccgtatgatctcatcttaactaattacttatgtagagactctatttccaaataaggtcgtgtgaggaaaaaccaactcaaactgtgttttttggcctggcgtggtggctcacacctataattccagcactttggggaggctaaggtgggcggatcacttgaggctaggagtttgagaccagcctggccaacatagcaaaaccccatcttcactaaaaaatacaaaacaaaaattagctgggtatggtggcatgtgccagtagtcccagctactcaggaggctgaggcaggagaatcgcttgaacctaggaggcggaggtttcagtgagccgagatagcaccacggcattccagcctgggtgacagagtgagactccatctcaaaaacacacacacacacacacacacaaaacaactgtgtttcgcctctgttctcacaagacaataatcatcacagaagacttcttgtaaccaaatttgtggattctcccacacacccagcaagaatcaattctgcagcagactccagctggtgtcttccaattcaactcaattctggtgctgtctacctggagatggcctcagaaaccacaggttgagggcttggtcccacaagaccaacccccatcccaccagtcacaagtctgggcattgggaacatctgactaactggcttctagttggggttccaaggccccctctttgggttcaattaatttgctagagtagctcacacaactcagggagacctgtttatcggtttatttcaaaggatgttttattttattttctcctcagacatactttatcatcccttaaagtcagtagctcaaaggaaactttaaaagctataaataggccgggcacggtggctcacgcctgtaatcccagcactttgggaggtcgaggcaggtggatcacttgaggtcaggagttggagaccagcctggccaacatggtgaaactccatctctactaaaagtacaaaataagctgggtgtggtggcaggagcctgtaatcccagctacttgggaggctgaggcaggagaatcatcggttgaacccgaggggtgcaagttgcagtgagccaagatcacacctctgcactctagcatgggcaacagagcgagactgagactccgtctcaaaaaaaaaaaaaaaaaaaaagataaaggctacaaataaacagtcagatgaagagatacatagggtaaagactggaagactcctaagtacagaagtttctgtcctggtagagctggacacatggatgagttggttttttttgttgttgcccaggctggagtacagtggcactatctcagctcactgcagcctctgcctcccgtgctcaagtgatcctcccccctcagcctcccaagtagctgggaccacaggcatgtgccactatgcccagctaacttttttatttttgtagagatggggtctctctattttgcccaggctggtcgtgaactcctgggctcaagccatccacccacctcgccctcccaaagcgctgggattataggcatgagccactgcacctggccatggatgagttcttgttccccttcctgtcagcctccacatgaaactccccaaaccctgtcctcttgggccttttttaaaaaaattaattaagaaattaaagacagggtctctctatgtttcccaggctgctcttgaactcctagtctcaagtgatccacccacctcgtcctcccatagtgctgggattacaagattagagatgccagctgtcaggtggctaggtggattcagtgtaaagtcctagaagatgcattttagtaaaaacagctagccacctgacagctggcatccatccattcagtgaagattgttgggcactgtggatactgtggaggaggcagcagtcgcagccggcctgcagagtgagatgcagtgccagagggcttcaggaggaggtggcattgtgattgatgtctgaagagtgtctccatgataatggagtcagtgcaaagtcccaaagactgggaaggagcaagaggaaaggatagctcatatccagctgccccactccaaaaaaaaaaaaaaaaagaggaaaggacgggcaccagcaaggtaggacaaggggggcctctggagtgttttcttctcagttggggaggggtgtgctcagatttgcatgccaagtgcctgggctgcagtagggaaacagcagaggggctgggacctgtgattgggagtctccaggtgagagggttggcctatggggactggaggtcaggtgaggctggtagtgggttatagaggtgggagcagctggacaggcccagtgaggatgcaggggtagctgcccagggctagactctggctgctctggtggcagttgcttagctcaggcttgggcacgtccacctggcgcatctgaaacattagccagcagggcgcagactcgtcagtgagagcattcctgagcccagcatccaagaagcgagggaggtcgggaaggtgctgctatgaggcagggggaggtccccaaaagtccaggtgagagcatggcatgcgtggaaagtgctgcgcagttttggcatcagtgaagtcacagggggctgtgggtgaacaggtgtgcttgggcatgtcaccagggaggccttgagacaggagcgggttggctttcctggagatcaggctgtggcatggtgtcgggactggggcatggacagtcttcctccacccccatcccctccttggagctttcagacactgcagataattaccaggtgatgtgataaatactacctgtggagggtgccttgggcagggaggacagggcggccaggaggggggccctttgggcccctgctctgagctgctcatcaggaaaggggagaagctcctacaggcctggtgttggagcctagccagaccctgtgaggccttgaaagtaggaggtgcattgtctgtgcattgtcatctcaaggaatccacccagcaactgttctagttatccctgctctctaggtaggagactgaggctaggaagggaaaggctgctgtgatacccacactatcagtggctggggttgagtttaaacccagggactctagggcccatgcctctgccatcctgcctctgagttttggagctggacttgttccatcaagtgccaggccagccctgctgctgggtgctcccaggcattcacaagctgacaattctgaagggcccacgcacttggccatgcttcagtctgtgtcctgacatcacaggtgggtgctggaataacaaatgctacaaatggcactgggggtgttggccaggctctgggggcacaggagttctgcccatgcccacagctggcctgtgctgacctccctccatcacagctgagtagcaccagcacttccattgagctgaagtcttcctcccattccttcagtgtggtctttgtggctcagagaggctgtggccaggtacaggatctggagtggcccctgcttctctgctctgtgaccttagacagtgggcaggatctgaggccaggcccacctgcagcaggtgttacaaagaggcaaattggcgcttaatgttggtaagaacttgccagccaaccagagtcccactatctttggaggtagtgagctccccattggggaaggtatgtaagccaacctttctgggatgctggaagatcagagagcaaacacttgagattctgtgatcctaatattgaatccaatgctatgatgtttggatttgaagtcagttctatttagccagtttaccaagtgtctccttggtgcaggacaccaggagacacaaaatgtcctggataatattgggtttctggctcccaggggtccctgagatgttgttccagcggttctggagtatgggccaggcaccgcttgcatctggaccgatccgcattgttcgatcattgtgagcctcatgatggcagttcgggatgtcatgcccccatgcgccccccaaccccaccccgccatggccctcaccatggcccactcagggcatgaggctttctgggtgattgctggtattcagtgttgtcagcttcttggacctgtcagtgggggtggggctgcaatgagatgccagttgcaggaagtggtttgcacagccttcctggtgtcatgggtcactctcttgccgagtggctttgggcaggtcccttcccctctcaggctgcaggttcctatgccaggagctcccttcttgccccaccagggccttgttttcccagatacagaggtggggcagatcccagcccgttgaaacagactgggctttggaggccacagtgggcccatttctcagagggactgtgtggctggatgctgagccaggcactggactggccctttgagcctcctgtctggccaaggcccctgaggcactgtgggctgctggtgccagcacacaagggtgataaggagatgaaagtcactaggatggtggggcggcacccgccccgggctgtgttggcagctgcccctggctggaggccagcttggccctggaaccctcctcaaggaacaaggacacaaaagagccagctcagccagcctctacctagcaccccaatcagcactcccttcttcccatgacccctaccctctgcccagctcctgtaactggccaaggagctaatggacacccaccagggtcttaatgagtgagccagggttaatgggttactgggcccggtgacacattcaccagcctcccagggctctcaaagtccacactggcctggccttgaacgtcttagctcggccacctccttttccagctttgacacctcggggctcaggacgggcctagggtggtcaagaggtcccctgcagccctcacttcctggaaaaggctccatttcctggccttcaggctcaggtggttccttccgcctggcaggtcctccccaaatccaatcccagctcgggctggattcccaaggcccctattctggtgtctgccccttccctagggctcttccccctggggtgaccatactctcatgcccagccaggtcagggctccttgagagaagaatctggaggggccaggatttgatgggagaatgaatgatggaatgaaagaaggaacgtaagcgtgagccttgctaagagtgacaatactggcaggctgcagaccatgtgtggacctcgatctgagggcttagaggcttcggcctgccagcgctgtgggggcacccaccccatctcattgaatggggcagagcaggtgagggcatgagatggacagatgggcctcatccccctgcttccgttgcctggggtcctcggtcagcctgtttgctcagacccctgaaattgggggtcaaggaaggaccctcctggattatgtgactcccttcagtccaggtgaccagggtccttggagtgacagctcctagagccccacctgtagtcctgcaagctggggagagggcctgttaggagaggcatcccctgccctggggttgtagaggtgaactaggctcctcagaccttgtggggcctcagatgcttacatctccagcccctcctggcgtgggcatctggctgcagcccagctctgtggccccatctcccagggaacctttggtctaatctgcctcccgctgaaacccagcctcattcagccccaccgaggctttcagagttcaggtctctcattcagggtttgagaccccaccgggctcagagacacctgcagcctgcagcggtcccagatcacagcctcagggatgggaccaggagccagcccacatcccacctgcagcagttcctgtgcctttaaagcctcccctccccccgccccgcccccaggccactaggggagggaaggaggagctgggtcacagcagggaatcttagcttggttttggtgtgctgctggatgaccagaccgggcgtcgggtgagcccagaagtgagagcagttggctgtgccccagtgctgtgtgacccagaggcgccgctcaccctctctgagctggtggacatcataggtggggaagctcaggtcagggcactcccatgagtgtctggaggcctgagtcccattctcagctctgccatatgcttgctgcgctctagaggagttcctcttcctctccaagcctcggtttatgtacccgtgcagtgggagtgagttgcacttcggggtgaagggggcaagacttgtgtgggcgcatcctgcagaaggatcccacaggtgggcagagccctgggttctttatccgactgggtctgggctgggggcctctgtttcttggctgatgagtttatgtgagtttgagtgaggtatgcgagtgggtgaaggagggctggggggagtcacctgacttgtgcgaagaagctcttgagagagccgtggcttcttggaattaagaggaaagagtgcagcatgaacagacaggccctggaggatctggcagccctgagtgggggcggggggtcagctctggagtagagccagagctgtgatggggttgggggaccctgtgtccttgggccatgcttgcctcgctcctgggttctgtttgtggctgtggattggggtggggcagggccggttgtgcgaggggtcattgcccaactccagggggcgcctgccacctctcagctatatatatagggatatatatagttctttcgacaggtttccagcaggtagtggttattaaatcttactgaaggggtgttttttctgattctcggctctgtgccgcaagggtggaaactgtgagagacagattccaactccacgtctgggtagtaagcatccagtccagggctgtaggcagtcctggggaagacgccagagatctgtgcattctcatatcgagggatagcgactccaggctgggggctggcagggtaaggggtgggtgggtcctgggcttacccgcaggtctgcagacttcctggggccagctgacctcgtaaaatcccttttgtctaagcttcagtttcctgcctgtgaatggggttggggctgtgctctggtttcacccttgtggctctggggttgtggtgacaaagccatcaagctgggttgaaggattaaccaggaaacttcagactggctgccgtgtctacctcttcctcatactcctctctctgctgcatcctgggaagctgctctgctcagcctaaatgaggctcagttgtgtgtgtgcgcacgtgcttgcacgtgtgttggaagtgggtgatactgacaccagagtctgtgtctctgggtgagtgaggcttgcacatttctcgggacagggaactcactaccttatgtgcccaggacaagagctgtggggtctggagaagacttctaggccagcccctgcagtccttcctcaggtgacatggcttccccagacccacttccccctaggtgccctctctgcattcagggggtagagggctgactgggacagaatgtgacacactcagcatgtgaggaaaagcctccttcattctgtaggccctacctctattaacatgtcctttgataaagtgcctcccctcctgtctcccctctctggaatcctcagctgctgccaggcttcagctgtgccccattgaaggcagctctgtctccctactttccccagcccagggttttccttttggggtcagctgcagggatctgggccatcctttgcccactcagactttctttctgcccacctgctgctgtgaatcctgtatgtcatatatatatataaaatatgtaatatattatatattatatgtaatatataatatataaagtatattatataatatgtattatattatatattatataatatgtaatatattatataatatataatatgtattatattatatattatataatatgtaatatattatataatatataatatgtattatattatatattatataatatgtattatattatatattatataatatgtattatatattatataatatgtattatatattatataatatgtattatatattatataatatgtattatatattatataatatgtattatatattatataatatgtattatatattatataatattataatatgtattatatattatataatattatataatatgtattatatattatataacaatatataatgtgtattatatataatataatattatataatgtgtattatatattatataatattatataatgtgtattatatattatataatattatataatgtgtattatatattatataatattatataatgtgtattatatatataatattatataatgtgtattatatatataatattatataatgtgtattatatatataatattatataatgtgtattatatatttaatattatataatgtgtattatatatttaatattatataatgtgtattatatattatataatattatataatgtgtattatatattatataatattatataatgtgtattatatattatataatatatgatgtgtattatatattatatattatatgatgtgtattatatattatataatatatgatgtgtattatatattatataatatatgatgtgtattatatattatataatattatatgatgtgtattatatattatatataatatataatattatatataatatattacatataatatatcatatattatatttatataatttatataatatatcatatattatatttatataatttatataatatatcatatattatatttatataatttatataatatatcatatattatatttatataatttatataatatatcatataaatatattatatatagtattatatatataaaattatactttaagttctagggtacatgtgcacaacgtacaggtttgttacatatgtatacatgtgccatgttggtgtgctgcacccattaacttgtcatttacattaggtatatctcctaatgctatccctccccgttcccctcaccccacaacaggccccagtgtgtgatgttccccttcctgtgtccaagtgttctcattgtttaattccaacctatgagtgagaacatgcatgtcttatatgctctcaggcagagaggaaactgctgagcaggccggggcaggggacagagccctgtggctctccactttagacccctcctggctgactgccatggaatgcagccacttagcagggccaaatcccctgatgttcctgttggctgtctagccttcagggacaggtcatgggaccttggttcctgccctgtcatcttcccagtcaccctgatcttcacggggaggaatagcctgggaaaggacttggtcacagcacctccaccctagggctattgaggatctcacagttgtgtgtctggtgggttctgtccagagcccatttgagagcagtggatgacaggacaggcctatgtgacccaggcaggcagcaatattgggtcagccttcatgtccccttctgtcagctggggcagcctggaagcatgattgtggggtaggtgttatgggcacggaatagacctcaggtggaggctgcaggggctctccggcaccgtagacacagcaggcccaggagcaggggagggagccatgactcagggagactctggcccatatccttggcagatgagggccacaggggaatgggcagcactgtccaaagtcccctgggctgggtccgcagctgttcctggctcagacttcttggtgggctggtcagaaacatgcagtaacttggggcagttaccaggtggccaagcctgcactgctgggctctgtgagcttgggccagctcaggccctctctgggccctgcctttctgggctgttcgggtggttccttgggcctggggtgctaatgtttctggatgggcagcagaaccagtctgcactcagggccccaggccatgttcccggaacacacctttagcattgacagcagcgtgtggtgaggccccttaggctgggttctggtctagtgccaggggcaccactactccaccgcctccagagccatctctgggacactggctgtgagttcagatgttctgaacagggacagggagagccagagggaaccagcctggggctcactggaggggctcgtgggcagacagcgccctttggagggaactgagtctgaaaggaaggaaaccctttccccggctcatagcacctgccatccagggccctcccagggctgcgtgaactttagtcacgtggtgacaggccgagtcaccatgccaagtcactgtgcgcctccttgctgctgtgacgtcagcttccccatcctcccagccaggctggacctccgtgagaggcctgcctgtcctgcaccctgtgcagatgcctcccactgtccgccggggctgctgggcacgccctggctggtctcttggactaggtaagctcatgagtcctctggccgctcctgctccttccctgcctctgctcctcctcggaggtggccacccccagatcccagtcccaattcggaggccccctgaggagtgctgcagggggccacaggcgtggctctgagccactctggagagtggcggggggcccagccagttctgtggctgggactttcccaggcagacaagtctgtctcttcctccccagcgggtgcagcccagaactgtcttctgaggaagaggtgctctcctgggcccccactgtccccaggcctcaggtaagcccatcagggtcccaaggaagggggtctgggtttgaggccaaccatggcagctgacctactttctagcctcagtttcccctagtgtgtgcagctctcacgctgtttgggtgagaaccaggcctctgggcttggacattctttcagtgagtttttagggtggagggatgggaaatggaagcccaggacctcagcagggtgtcttcctccgatccggggacatctgcctgtgggaggctgggcccaccctcccttgctgacctgccctgggaggaagggacagggcccagcactgcctactcccctccctgttcttcccagcagtctgagcctggctgggtgtcccctgctcctccagcagcctacttgggcctttgggtagacagattaacagacaggcgaggctgggtcatggttggaccaccccaggaccctgaccgggggctcagctcatgaccctgagcctgggagagatgaggccatgccctccagggcactcagcatgacccggcccagtggacgggactgggtagcttccttggtgcagggggctgtcatgctaggacggggtcactgaccaggccaggcccctgccccatgacttgtggtggaaatgtccttttgtttttgtttttttgcattttttttgagacggagtttcactcttgttgcccaggctggagtgcagtggtgcaatcttgcctcactgcaacctccacctcctgggttcaagcaattctcctgcctcagctcctgagtagctgggattacaggcacctgccaccatgcctggctaattttttgtatttttagtggagatgggggtttcaccatgttggccaggctgttctcaaactcttcacctcaggtgatccacctgcctctgcctcccaaagtgctgggattataggtgtgagccactgcacccggccatgtgatgggaatgttctgtgtccataatagatgctgcatattgctggcccagctcctgaggctctttggacctccaggaatcggtgtctctatcaggaacccttaaccctgacccggactcccagctgggacccggggtgtcggagtggcaagagcgctgtcaggcctggtgaagggtgtgagctgtccaa

SEQ ID NO: 15589 - DNA, 45219 bp, Homo sapiens
gcctggattctcccagagattgcctggaacaccagctcgggtcctcgcacaccatcctggtaggaatctctcagtgacaattgagagtttgtgggctggcttagggccagtggtgggcagggagtcagcagggcgcaagggactggagagcttggcatttctccaacaggagtttcagggagagctcagaggcctgcttatgtgacaggtttatcagcttgcctggcccagggccggctctcataccgttttgatttaaataatagattgctcacagaataaatgtatgttggtttaagctttcactttctcataatcctctctgctggcccctcccaccatctaccccattttgcctcactctggggagcctgaacaccctgttccagagtaggggcatagggaaacacttctatggcttctgagctgctgggcagggccagtccctaaaacaaggagagctgggagggagctggaccccaggatggagtgctgagagctgaaagtcctatttaacagaggggagggagcagagatcccaaaaagggaaaggcctggccaggtcccacagcaagtcaggagcagagcgggcctgaactgtgagatctccaatctctccaaagcctttgggtaagaagtccgcctaaagcagtgagatcagtggggtctgaggaaaatccttttcctcactgcctccatcccagtcctgggacccaacaccatcctgtcctcaccctccttggccatctccttttgccctgagaagctgttatgcatccagccagactgggaatgtgctggaatccatgcaccacaggggatggatgcgccgcttacagtccctgtgggccatggctgtgagggaaagtcagagctggtggctggggtgtgtaggcccaggaggacccctgcctcctccttagccttggagcccccctctgctgctgagtctttcctcatctagcagggccccactgcccccagaccttacctcctggcttagcacatgacttccccactctgggcctcagtatccccccggacatctctaaattcctttcccgcctgccctgcctgtcttctggttgggctgaactgtaactccccacacagggctgagggtgactgtggcattaggcttctggctgggagcccaccctgatggtgcttggggaggaagggagacacttccccctgccaagggcagccctaggactactctgcccccaaggccccctgctgctggtgatgcgcacctccacccgctgcatgctctcccacacggggactcccacacggggacccccagggcctggagggaacacacaagcactttgtctctggcttgctgtctcctaaccccacagagctgcccctcgccaagtacaagaggcctggggctgggtcctgagggtggcaagcagcactgtaccctgtgggaggcaggcaccaagtcctctcacttagtcggctgtggcccctgcctctggtctgtgcagccttgtcccctgcccagagggctgtggtggtgaggctggcagcctgggctcagacgtgagcttgctgtggggctccatgtagagctttgctcctcctggggctcccgacccgctccttcgcagctccccttctcaaggagcccaagccctgcccagatgtgagggcccgctccctggaggcctcctctaactctccagcccacagggatggacccaggacccccacatcttagactccatgggggacttgcccaaagagcacctgggggaaggtcagtgtgacctttgtcccacccttttggatagacacagccaccctttctccccaccccagcagcagggctgttgctcagtgaccctgaggttggtgatgcagaaaagcagaggcgggtgtcactctttattgcggggtccacactgtgggtgctggggcccctcccactgagggaaggctgagcctctagccagggctggccacctggccacctatgagtccattcttctgtccccttaatctcaggctgagcatttacactggatttctgggggcctgtgagtcctccttgaccttcatcgcccactatcatgtgcttgagagcatcacaagtcagtagcaatgagccaggtgggtggtgggtcacctggcacagcaggcctggggctcgggtcccagcccagcagctgtggagtcccaggtggaggcaggggtggtggccccggccgcactgccctcaggctcaaggtccaggccctcgtagatggtggggagtgaggtgcgctggctcagccgccggcgcaggccgaccagcaggggctggggcagggaagccacatccacgttgttgcccaggtccacccaagccaaagcagggaacttggtggtgtccttgatggcatcagtgagcttgcgggcagtggcccgcgtcagtcggttgccgttgagcaggagctgggtgaggcggggcagcgcccacaggctgggcagcaggaggtgcagcagctcatcactcagccccgtgaagctcaggtccagcaccgccagcacagcaccatggctgctcaggtagcgtgtgatgtgttgcacgtcctgtgtcgacagcgggatgcctgagaggtccacagtctcccctgccagcagagtcttctggaggctgctcttgaggctatgggagagtggcaggtggggatggactaggcaaccaggcagtccccccactgaccacagacagtgacctgtcgggaacagcccaggcctacagtctggcaaagccagattcaaactgtgtctttcgtattttttgagacaaagtttcgctctttttgtccaggctggagtgcagtggcacaatctcggcttacggcaacctctgcctcccggattcaagcgattctcctgcttcagcctcccaagtagctgggattaaaggcatgtgccaccacgcctggctaattttgtatttttagtagaggcggggtttctccatctttgtcaggctggtctcgaactcctgacctcaggtgatctgaccgcctcagcctcccaaagtgctgggattacaggcgtgagccactgcgcccgggcccaaactgtcactttctaagtgggtggccatgggcaatgctcagaggctcagtttcccctttggtgaaaatgggacgtggttgttgtgaggattaaatgcacacacagtaaggctctttcttcatgaactattatttgaaatctcactgtgtgcccagcatcccacacctgttttattgacatctcacttatttttcagataggtgaagtaactcttccatggccacacaccactaagcggggaaccaggtcctcaaactgagatgctctgactcttgagcccacatgtttttttccctgtgccccttctgatgtcgattcttttagggtagggagaaattctcctacaaagggacggctattaggctgtacagggcaccggggatagagagggacaggcccacagtagtgaaaggggaggtcctgggtgtgcaggctgggggccggccatgagggagggctccccgtgttttctcagttagaagggaagttcagagactgagaaggacccccgcccccaccaaccctctaggtctctccccagttatctgaacagagcccactaggcagacaggccttttgggggactgacagcagtgagcacaccctcaggacccccaccagccatggcagggaacaaccttgtggggtccaagctcagcgtggcctattaggcccaaggtgggacaggggtggagggcagacaggggaggcctgctagggtaagctcccggcagcagttcaggcctctgggcctgggtgcctgtggccagctctggactgagcctgtgtgtgaggctccatggatggagtcactccaggatggagtgtctgagagggacccatggcagagggagctattgggcagccacggaagcctcagttttaggcagcctggcagtggcaaagaattcccaacaaggtacaggaaaatcagggtagagtgtggccttaggcaagccacttctccgaacctgtttccttccctctaaaatgagaatcgcgatccagaatctgcctcccccgcaacctgttgggaagtctcagctgaagatgcctactgaggtcaccttggctgttgggtggaggggtggggtgtccaggccgtgtaacagaccagggattgagggatgtatgaatggcaggaggcaggaccgtcctgtgggaaatgccaaacgggtcactcagagggtgcagcttggcttggggagcatctgctaccacgggccaggctgacttccagggtagggccctcatgcggaccaggtgagggcctcaccaggtgggatttcagcaccagcctcttggtgagagtgcaggtgtcaacctgagaagggaccttggagcagcagtgaggaggggcagtggctgggctacccttaccagctctgggtcttcctctggcgcaggctggacccttgctgctgcttcgagtgaggggtgaggtggtagatgagctgtcggcagatcttgtccgaggacttccagagctcatagtcctgtgggagggcagtgtcaccatggtgaatctgagcccctcctgcccacctcagggccttggggagagggacccaggcagccaagtgtgtgtgtgagcacagtcatgcaccatgcatcaccgagttgcccaccagggcctccccctcctaccccccaacccggctgtggcctggcacagagccaggggaggctgccctctgggagctggacaggctggtccagtcccgcagtgcccggcgggaggaagcccagacaatgagcccttgttccctgtcctcgggcccagggccagcgtctcgggctatcagccggctgcctgcccaccctcagcacccttcggggacttgccacagggggaggaggccagaccaggcccctcgagggagccgtgctccactgacgccaatcccagggagtaggaacaagccaggtcagcgtgttcttcttcctctcactctccaagcgagactgcgcctgcggggtctgggtctgggctgacagggctgggggatgtaatgttttacagcaccaccacctggctctctctcagtcctaactgggctccggcagaggcccagctcagggtggaatccgaggtgcgcggcccacaaagctggcactgagcatgctccactgcatcctttatccagtccctctgtgagcagccccaggagcaggcagcacacacagcagctgcaagccctggctgttcctgtgatggccgtgggctaggcgcagagtcctaggggccgactgtgcagagacctgggcattcagagctggcagggcccagagcggataccctggttttggttggggactcactgtgactaggagtctgggtccggtggctggtcacagccacacatcctggggctgtgtcgatgctcatggcaggacatctgcaggtgctgtcagcatggggttctgggcagctgtggggtggaggctgcaggtggcaaactccaccccagcaaggaggagggccttgcttatgaccccagctgttgtaggggaaagcagtgagcacccgtccgcaagggtgtctgtacaggatggagacctgcggacagacgggggctctagccgagagcggctctcttctggcccaggaattcagaggctaggagtttgtttccgttggtggatttctcagaacagtctgtgacccgcagggtccccatatgacttctgcccagctatagtcttcctggtctgggcccccaggcctggtgcacagtgctgccacacagaaaatgggtctgcccaggactctgagggtcctgcaaagcacagctcacacttgctctagctggtggccagcctaatatactgatgctggcagcaggtctcagacagggacagtgacttgcctaaggccacacagcaagccgcagaaggacctagcctcccagtccccagccctgggctctgttggcccccctgtccaccacagtgcccagcccagggcccgtgcctgccagcctcaccttcttggggcactgcaggtcccgggccaggttcacaagcaggtcatgggagatggggtcgaccgggttgaggaaggccacatctctgtagaggatatcaggaaggagggtcctctcaaggcccaggtcctgtgagtggtgaagagagagttgagtgagcccgttgggtctcccatctcgaggcaccaccccagccagccagatgctgcttatgcccgttcctgtctctccatctcctccctaaggctggctggattctccccacaggcggccatgggccaacagtccagtggcgggtggcccccttctttttttgcttatttattttttgagacagggtctcaccctgtcacccaggctggagtgcagtggcgtgatctcagttcagtgtaacatctgcctcctcaaggaatcctcccacttcagcctcctgaggagctggggctatagacaggcaccactatgctcagctaattaaaaaaaaaatgttttgtagaaatggggtctcactatgttgcccagactggtctcaaactcctgggctcaagcgatcctcccaaagtgctgggattacaggtgtgagccactcagccttggaggaccctttggataagtagaggggagggacatgggagccctcagggaagtggtaagtgaatcccagaacccttagaccagttcccttgaggtagtgttgtgctgtgacactgccttctctggggttaggacttgtcagtgggattctttggggtctttcgtcttatggtgggggggtttgctcttcttatgacccctcaaattcccctgtcccccagtgttcccttcagatcctctgccttcccacctatcccttggttttcctaagctgcggccagcatctgtttgcggacaggtatggatccttcccttgggggcggacctctctctcagatgtctcaaaggcatgccaccctgaagccagcctcaccacccatgccccagctcagtatagggcacctccatgaccatcttcccaggcactggggccagaagctctggaaccccccagcactcttccgtcctcctctctcccccagctcacctagtcatcccttctctctccccaccactcctgccaagattcaggcctccagcctcctctcctacccatccctcaccccaccgcctgcatagacctgccctggccttcctgcctcactcctccactttctcctcctgtctactcccacaggactggtgtggggctgaatactctttcagagggtctctttgttttgagacggagttttgctcttgttgcccgggctggggcgcagtggtgcgaggtcagctcaccgcaacctccgcctcccgggttcaagcaattctcctgcctcagcctcctgagtagctgggattgcaggcatgtgccaccacgcccagctaattttgtatttttagcagggaaggggtttctccatgttggtcaggctggtctcgaattcccgacttcaggtgatctgcctgcctcagcctcccaaagtgctgggattataggcgtgagccactgcatctggcccagagggtctctttagaggacattttgagagctgatggggcagccacagccaggaggggcctctagaccccatgtgggccttctccaatccataggtgatatgctctgtgcgtgggtcccaagcacaggaagttgggccaggcaggggaggccgtgggtcacagctgcagggtccctgcaggttatggagcaggataggccccggctggacctcaaatcccaacctctgagacacaaagaggtggtctctgaggatccttctttccctctagtttcccagctaaaatgcccaactggtgtcttggactccaggcagcatcccagactgagatctgtgcctctggttgtctggctgattcagtgctgctctgctgtttgccacagatgccagctagggaagatccaggaggaaggctggctgatgagcctggcagacccagacagggccccagaccgcaacctgccagcctgccttccatgggtctagacagctcctcttaaacggacagctccatttttccagcctgctgaatccagagttggaggaggtggagaagggaagggaggaagaagggctctggccctggcttgccccacattttctctgtgggccctggggtgaccacttcgctccatgcctcagtttccccatttctaatctaccttctgcaggccgaacacctgcatggctgacttcctgctcacaggatggggcaggtagtggtggtagctgctgtagggggtggggacggggtggtgagggaagtggcatgcccaggtgattggggggaccagcatcctgggacaacccaggggttgggatctgggtttagtgtacctggtgtgtgtaggagcagagccaccaccggaccgagtgttgtgatgcacagatgctggggatgtgtactctaagggcatgagccgcctgttggagaactggtgatgcatggatggctctctgtgggctgccatggtgtcttggggtgaggctgcatccctagaccagccctgggtcctctctccagggtccactgtctcccggatcctggaggagggggaagttaccctcttccattgtctctcaatacaagatgatttgacctcacttgccactcctcccgggcccctcccatcttgccagggcctgaatttgggctcttaggtccaggctaccgggccaccctcaacacacacaacccctctcaaaccccaaagacccggacacactcagcagccccctcctccacacggtccgccgacctcacccagccctcactccaggcggtcgccctctcgcccacgcaagaccccgcgtgctgcagcctgtcgcgccctcggaacccgcctgcgcgcgccagagaccagctccgcctcgcctcccggcggatacaggcccacaacccatagccccgcgcctcccagacccccagacccccagaccctccctggccgccagcccaggggcggacggctccttctctcgcctggcgcaggaggcgcagcagctgccgggcgcgctccggccgccgctcgcggagcgtggactggatctcgcggagccaccgcacccggcgctcgtagggcgcgggcccgcagccggccgccgccccggcctcagagccagcctcgggcccggcccgccggcccagccgcgcccccatggccgccgcgcgatggtcgccgaacccacaggaggccgggctgtctgcgccccgctcccggggccgcccctagtcgccccgcctccaatcaccgcggccctgccccgtccgggtccgaaggctgagcgcccgccccaccccgcgccggagcgaggccagtgggttcctcggtttggcctgatcacactggaggaggccctgcttgcgtcagtcttggcgctagaacccgagggcctggagccgccaggggagacgcggagctcggccgagacgaggtggcttttggcacctctttaccctctggccccagtgctgactggggaatagtcgctttgaccgtgcaaagagcattctaggcggggtgggggggttctgctgtgtgtgccagtgttaggtattgcccccattgcttttagaaatatgccctgcatggtgaatctccgtctctactaaaatacaaaaattaggccgggcatggtggctcacgcctgtaatcccagcactttggggggccgaggcaggcggaatctaaggtcaggagttcaagactagcctggctaacatggtgaaaccacatttttattgaaaatacaaaaaattagccgggcgtggtggcgggcgcctgtaatcccagctattcgggaggttgaggtaggagaatcaattgaacctgggaggcggaggttacagtgagccgagatggcgccaccgcactctaccctgggtgacagagcaaaactctgtctcaaaaaaaaaaaaaagaaaagaaaagaaatctctgcagctggcagttgtggtgtaggacctgctcacgctacatggacactcctgcactggcaaatatttactgcctcctgcttcttggtttggggcaggcccccacctctgaccccagcctgggaaataaaccggacgaagagtcaggttaaccgttaagcccagctctgggcaagctggcagcaggcgggctgtatctgccgctggcttcagtctgcctccctgacaaggggtgggggtggcggcaggcagagtgagatgggggccctggctcctctgaggaccagggtgaggtacggacccacccagctcaaggtgtatcccacttcccagggctccctcagcagaagcctaggtctctgctgcaggcctgctgggcccctgcagccccaatcccggctctgggacgctcacatctcctgcgtggggaacgtttgaggcactgatctgcagttcccacttctctaagcaaggagcacgtgtttagcctgtgaggactggtacctgttgtgcaggaagggctgagcactgtccgagggcatatatgagggacgacagccaagcacccgtgtgtatgtgtgtgtgtgtgtgtgtgtgtgtgtgtgtgtgtctgctaattaccctatgaagattcaaggttccttcctttgggttaagcactgcctgcccagagatggcagtggggagagggcagggtgctaggctctgtcatcctgtggggctgggcccctgagacaaggcagaggacagcaggatgtcttagccccttgaccatccacggacccccaacccctgctggagcagtgcttgcacccccttctcccctggcacctgccagctggacccaacagcctctcctcccactccagtgcagccagcattgtcctggggccaccttggcaccacaggtttcctccctggcaaacctgcatgacggccttgcgtgccctcccccagggccaaggcgctgttgctgaactgaagtggcaacctacccggtcagagctttaagctgcagctctgatgccccagggacctctcagacccccctgcccagagcaggcagcccggtaagccctcctcctcttcccctgcagcctcagggctggagccacagctgggagggctcccagatcctgaccatatcctcccagaggctgagccaggcctgggcactgtcccctcaaatgtgagaatactgggcagggggaggggagaaaggagggaatggagggctgagcctggaggcatgaaaggggcaacctaggcagcggtatgggggagtgctcagagcttagagtcctgtggaaggcagagaactgccccagcccctgcctctcatcccccaccctctgtgtccctggccgagaggttcctggaggacatttttccagcaaaagagggagggtggtgtctgggcctagatccttggatgggcttttctctgcctgcttgtggggtgcctagggcgagtgggcttttggagacaatttctggcctaacctgacttggacagcagcccccagaggcacagctctcccctcaggcatgggggcatgattccacctcgctagcccacatgtgttcttcacggagggctgctggcccgtctccctggggttaccctgagcagcagagctgtgtttgttgagactccatggggtggagggattgcgatgttgtcctctcagttcccggggctgatgtggaagctcaagggcttgccctggattcttcagggtagccctgccatccctagtgagtcagtgagttgggaggttgggggctggagaatcaggtagggaggacacagctagacctcaggccctgatgggaacgtactaggctccaagtgggacctgccaggagacaagaattgatgacagccacacctttggagtctcaagccctctgccacccatgcggtggcctagttcaaatgacaggaacacaaggtccagctggcccaatgggcaggtagagggctgcagccagggctggaactggccttgcactgcctctgggcccttctctacccacccagtagtattgttcaagcccaggagggaaaaaggccagctcagggttaatgttacctcagcaagtagctgagtggcactgagcctcctggtagccactgtaaagaaggacacagaatggtttgggggcattcgctaggaggaaggaagcagatggatactctatggagacagaatgtcctctgtgtttgctctacaggaacgggttgtcaaccttctgcagggccaggaattgtcatgaggctgtagtaggcagcagagcttggcggggtgaggcgagatcacaggtataggctcagggcctggattcaaatcccctgggctgccacttgttggatgtgtaaccataggcagagtaaggacctgccatagcaaattaccacaaactcagtggcttaaagcaacagaatagttctggaggctaaaagtctgaaatccaagtataggccaagccacactccctttgaggactccaggggaagatccttccttgtctcttcagcttctggtggctcctggcaatccttggccttccttggctgctgctgcatcactccagtctctgaaaccatctaccctatgtgtctgtgtggccttcacatggcattccttatttttgcagtggggtctcactatgttgcccaggctggtcttgaactcctgggtccaagcagtcctcctgcttcagcctcccaagtagctgggattatgagtgagtgccaccatgcccggctcacatggcctccttgtaataacgctagtgcctgggtgcggtggctcacgcctgtaatcccagcacttttggaggctgcggtggacggaccatgaggtcaggaaattgaggccatcctgtccaacatggtgaaaccctgtctctactaaaatacaaaaaaaaaaaaaaaaaaaaattagcctggtgtggtgacacatgcctgtagtcccagctacttgggaggctgagacaggggaatcgcttgaacccgggacgcagaagttgcagtgagctgagattgcgtggtgacttcactccagcctggtgacagagcgagactctgtctcaaaaaaaaaaaaaaaaaaaaaagaactgaagctactggatttagggctcattcattctttttttaattttaatttttttttttttttgagacagtctcactctgttagcccaggctggagtgcaatggcatgatcttggctcactgcaacctccacctcccaggttcaagcgattctcctgcctcagccttccaagtagctgggattacaggtgcccgccaccacgcccagctaatttttgtatttttagtagagacagcgtttcaccatattggtcaggctggtcttgaactcctgacctcaggtgatccacccctgtcagcctcccagtgttgggattacaggcgtgagccactgtgcccaacagggctcattcattctaatcccgtatgatctcatcttaactaattacttatgtagagactctatttccaaataaggtcgtgtgaggaaaaaccaactcaaactgtgttttttggcctggcgtggtggctcacacctataattccagcactttggggaggctaaggtgggcggatcacttgaggctaggagtttgagaccagcctggccaacatagcaaaaccccatcttcactaaaaaatacaaaacaaaaattagctgggtatggtggcatgtgccagtagtcccagctactcaggaggctgaggcaggagaatcgcttgaacctaggaggcggaggtttcagtgagccgagatagcaccacggcattccagcctgggtgacagagtgagactccatctcaaaaacacacacacacacacacacacaaaacaactgtgtttcgcctctgttctcacaagacaataatcatcacagaagacttcttgtaaccaaatttgtggattctcccacacacccagcaagaatcaattctgcagcagactccagctggtgtcttccaattcaactcaattctggtgctgtctacctggagatggcctcagaaaccacaggttgagggcttggtcccacaagaccaacccccatcccaccagtcacaagtctgggcattgggaacatctgactaactggcttctagttggggttccaaggccccctctttgggttcaattaatttgctagagtagctcacacaactcagggagacctgtttatcggtttatttcaaaggatgttttattttattttctcctcagacatactttatcatcccttaaagtcagtagctcaaaggaaactttaaaagctataaataggccgggcacggtggctcacgcctgtaatcccagcactttgggaggtcgaggcaggtggatcacttgaggtcaggagttggagaccagcctggccaacatggtgaaactccatctctactaaaagtacaaaataagctgggtgtggtggcaggagcctgtaatcccagctacttgggaggctgaggcaggagaatcatcggttgaacccgaggggtgcaagttgcagtgagccaagatcacacctctgcactctagcatgggcaacagagcgagactgagactccgtctcaaaaaaaaaaaaaaaaaaaaagataaaggctacaaataaacagtcagatgaagagatacatagggtaaagactggaagactcctaagtacagaagtttctgtcctggtagagctggacacatggatgagttggttttttttgttgttgcccaggctggagtacagtggcactatctcagctcactgcagcctctgcctcccgtgctcaagtgatcctcccccctcagcctcccaagtagctgggaccacaggcatgtgccactatgcccagctaacttttttatttttgtagagatggggtctctctattttgcccaggctggtcgtgaactcctgggctcaagccatccacccacctcgccctcccaaagcgctgggattataggcatgagccactgcacctggccatggatgagttcttgttccccttcctgtcagcctccacatgaaactccccaaaccctgtcctcttgggccttttttaaaaaaattaattaagaaattaaagacagggtctctctatgtttcccaggctgctcttgaactcctagtctcaagtgatccacccacctcgtcctcccatagtgctgggattacaagattagagatgccagctgtcaggtggctaggtggattcagtgtaaagtcctagaagatgcattttagtaaaaacagctagccacctgacagctggcatccatccattcagtgaagattgttgggcactgtggatactgtggaggaggcagcagtcgcagccggcctgcagagtgagatgcagtgccagagggcttcaggaggaggtggcattgtgattgatgtctgaagagtgtctccatgataatggagtcagtgcaaagtcccaaagactgggaaggagcaagaggaaaggatagctcatatccagctgccccactccaaaaaaaaaaaaaaaaagaggaaaggacgggcaccagcaaggtaggacaaggggggcctctggagtgttttcttctcagttggggaggggtgtgctcagatttgcatgccaagtgcctgggctgcagtagggaaacagcagaggggctgggacctgtgattgggagtctccaggtgagagggttggcctatggggactggaggtcaggtgaggctggtagtgggttatagaggtgggagcagctggacaggcccagtgaggatgcaggggtagctgcccagggctagactctggctgctctggtggcagttgcttagctcaggcttgggcacgtccacctggcgcatctgaaacattagccagcagggcgcagactcgtcagtgagagcattcctgagcccagcatccaagaagcgagggaggtcgggaaggtgctgctatgaggcagggggaggtccccaaaagtccaggtgagagcatggcatgcgtggaaagtgctgcgcagttttggcatcagtgaagtcacagggggctgtgggtgaacaggtgtgcttgggcatgtcaccagggaggccttgagacaggagcgggttggctttcctggagatcaggctgtggcatggtgtcgggactggggcatggacagtcttcctccacccccatcccctccttggagctttcagacactgcagataattaccaggtgatgtgataaatactacctgtggagggtgccttgggcagggaggacagggcggccaggaggggggccctttgggcccctgctctgagctgctcatcaggaaaggggagaagctcctacaggcctggtgttggagcctagccagaccctgtgaggccttgaaagtaggaggtgcattgtctgtgcattgtcatctcaaggaatccacccagcaactgttctagttatccctgctctctaggtaggagactgaggctaggaagggaaaggctgctgtgatacccacactatcagtggctggggttgagtttaaacccagggactctagggcccatgcctctgccatcctgcctctgagttttggagctggacttgttccatcaagtgccaggccagccctgctgctgggtgctcccaggcattcacaagctgacaattctgaagggcccacgcacttggccatgcttcagtctgtgtcctgacatcacaggtgggtgctggaataacaaatgctacaaatggcactgggggtgttggccaggctctgggggcacaggagttctgcccatgcccacagctggcctgtgctgacctccctccatcacagctgagtagcaccagcacttccattgagctgaagtcttcctcccattccttcagtgtggtctttgtggctcagagaggctgtggccaggtacaggatctggagtggcccctgcttctctgctctgtgaccttagacagtgggcaggatctgaggccaggcccacctgcagcaggtgttacaaagaggcaaattggcgcttaatgttggtaagaacttgccagccaaccagagtcccactatctttggaggtagtgagctccccattggggaaggtatgtaagccaacctttctgggatgctggaagatcagagagcaaacacttgagattctgtgatcctaatattgaatccaatgctatgatgtttggatttgaagtcagttctatttagccagtttaccaagtgtctccttggtgcaggacaccaggagacacaaaatgtcctggataatattgggtttctggctcccaggggtccctgagatgttgttccagcggttctggagtatgggccaggcaccgcttgcatctggaccgatccgcattgttcgatcattgtgagcctcatgatggcagttcgggatgtcatgcccccatgcgccccccaaccccaccccgccatggccctcaccatggcccactcagggcatgaggctttctgggtgattgctggtattcagtgttgtcagcttcttggacctgtcagtgggggtggggctgcaatgagatgccagttgcaggaagtggtttgcacagccttcctggtgtcatgggtcactctcttgccgagtggctttgggcaggtcccttcccctctcaggctgcaggttcctatgccaggagctcccttcttgccccaccagggccttgttttcccagatacagaggtggggcagatcccagcccgttgaaacagactgggctttggaggccacagtgggcccatttctcagagggactgtgtggctggatgctgagccaggcactggactggccctttgagcctcctgtctggccaaggcccctgaggcactgtgggctgctggtgccagcacacaagggtgataaggagatgaaagtcactaggatggtggggcggcacccgccccgggctgtgttggcagctgcccctggctggaggccagcttggccctggaaccctcctcaaggaacaaggacacaaaagagccagctcagccagcctctacctagcaccccaatcagcactcccttcttcccatgacccctaccctctgcccagctcctgtaactggccaaggagctaatggacacccaccagggtcttaatgagtgagccagggttaatgggttactgggcccggtgacacattcaccagcctcccagggctctcaaagtccacactggcctggccttgaacgtcttagctcggccacctccttttccagctttgacacctcggggctcaggacgggcctagggtggtcaagaggtcccctgcagccctcacttcctggaaaaggctccatttcctggccttcaggctcaggtggttccttccgcctggcaggtcctccccaaatccaatcccagctcgggctggattcccaaggcccctattctggtgtctgccccttccctagggctcttccccctggggtgaccatactctcatgcccagccaggtcagggctccttgagagaagaatctggaggggccaggatttgatgggagaatgaatgatggaatgaaagaaggaacgtaagcgtgagccttgctaagagtgacaatactggcaggctgcagaccatgtgtggacctcgatctgagggcttagaggcttcggcctgccagcgctgtgggggcacccaccccatctcattgaatggggcagagcaggtgagggcatgagatggacagatgggcctcatccccctgcttccgttgcctggggtcctcggtcagcctgtttgctcagacccctgaaattgggggtcaaggaaggaccctcctggattatgtgactcccttcagtccaggtgaccagggtccttggagtgacagctcctagagccccacctgtagtcctgcaagctggggagagggcctgttaggagaggcatcccctgccctggggttgtagaggtgaactaggctcctcagaccttgtggggcctcagatgcttacatctccagcccctcctggcgtgggcatctggctgcagcccagctctgtggccccatctcccagggaacctttggtctaatctgcctcccgctgaaacccagcctcattcagccccaccgaggctttcagagttcaggtctctcattcagggtttgagaccccaccgggctcagagacacctgcagcctgcagcggtcccagatcacagcctcagggatgggaccaggagccagcccacatcccacctgcagcagttcctgtgcctttaaagcctcccctccccccgccccgcccccaggccactaggggagggaaggaggagctgggtcacagcagggaatcttagcttggttttggtgtgctgctggatgaccagaccgggcgtcgggtgagcccagaagtgagagcagttggctgtgccccagtgctgtgtgacccagaggcgccgctcaccctctctgagctggtggacatcataggtggggaagctcaggtcagggcactcccatgagtgtctggaggcctgagtcccattctcagctctgccatatgcttgctgcgctctagaggagttcctcttcctctccaagcctcggtttatgtacccgtgcagtgggagtgagttgcacttcggggtgaagggggcaagacttgtgtgggcgcatcctgcagaaggatcccacaggtgggcagagccctgggttctttatccgactgggtctgggctgggggcctctgtttcttggctgatgagtttatgtgagtttgagtgaggtatgcgagtgggtgaaggagggctggggggagtcacctgacttgtgcgaagaagctcttgagagagccgtggcttcttggaattaagaggaaagagtgcagcatgaacagacaggccctggaggatctggcagccctgagtgggggcggggggtcagctctggagtagagccagagctgtgatggggttgggggaccctgtgtccttgggccatgcttgcctcgctcctgggttctgtttgtggctgtggattggggtggggcagggccggttgtgcgaggggtcattgcccaactccagggggcgcctgccacctctcagctatatatatagggatatatatagttctttcgacaggtttccagcaggtagtggttattaaatcttactgaaggggtgttttttctgattctcggctctgtgccgcaagggtggaaactgtgagagacagattccaactccacgtctgggtagtaagcatccagtccagggctgtaggcagtcctggggaagacgccagagatctgtgcattctcatatcgagggatagcgactccaggctgggggctggcagggtaaggggtgggtgggtcctgggcttacccgcaggtctgcagacttcctggggccagctgacctcgtaaaatcccttttgtctaagcttcagtttcctgcctgtgaatggggttggggctgtgctctggtttcacccttgtggctctggggttgtggtgacaaagccatcaagctgggttgaaggattaaccaggaaacttcagactggctgccgtgtctacctcttcctcatactcctctctctgctgcatcctgggaagctgctctgctcagcctaaatgaggctcagttgtgtgtgtgcgcacgtgcttgcacgtgtgttggaagtgggtgatactgacaccagagtctgtgtctctgggtgagtgaggcttgcacatttctcgggacagggaactcactaccttatgtgcccaggacaagagctgtggggtctggagaagacttctaggccagcccctgcagtccttcctcaggtgacatggcttccccagacccacttccccctaggtgccctctctgcattcagggggtagagggctgactgggacagaatgtgacacactcagcatgtgaggaaaagcctccttcattctgtaggccctacctctattaacatgtcctttgataaagtgcctcccctcctgtctcccctctctggaatcctcagctgctgccaggcttcagctgtgccccattgaaggcagctctgtctccctactttccccagcccagggttttccttttggggtcagctgcagggatctgggccatcctttgcccactcagactttctttctgcccacctgctgctgtgaatcctgtatgtcatatatatatataaaatatgtaatatattatatattatatgtaatatataatatataaagtatattatataatatgtattatattatatattatataatatgtaatatattatataatatataatatgtattatattatatattatataatatgtaatatattatataatatataatatgtattatattatatattatataatatgtattatattatatattatataatatgtattatatattatataatatgtattatatattatataatatgtattatatattatataatatgtattatatattatataatatgtattatatattatataatatgtattatatattatataatattataatatgtattatatattatataatattatataatatgtattatatattatataacaatatataatgtgtattatatataatataatattatataatgtgtattatatattatataatattatataatgtgtattatatattatataatattatataatgtgtattatatattatataatattatataatgtgtattatatatataatattatataatgtgtattatatatataatattatataatgtgtattatatatataatattatataatgtgtattatatatttaatattatataatgtgtattatatatttaatattatataatgtgtattatatattatataatattatataatgtgtattatatattatataatattatataatgtgtattatatattatataatatatgatgtgtattatatattatatattatatgatgtgtattatatattatataatatatgatgtgtattatatattatataatatatgatgtgtattatatattatataatattatatgatgtgtattatatattatatataatatataatattatatataatatattacatataatatatcatatattatatttatataatttatataatatatcatatattatatttatataatttatataatatatcatatattatatttatataatttatataatatatcatatattatatttatataatttatataatatatcatataaatatattatatatagtattatatatataaaattatactttaagttctagggtacatgtgcacaacgtacaggtttgttacatatgtatacatgtgccatgttggtgtgctgcacccattaacttgtcatttacattaggtatatctcctaatgctatccctccccgttcccctcaccccacaacaggccccagtgtgtgatgttccccttcctgtgtccaagtgttctcattgtttaattccaacctatgagtgagaacatgcatgtcttatatgctctcaggcagagaggaaactgctgagcaggccggggcaggggacagagccctgtggctctccactttagacccctcctggctgactgccatggaatgcagccacttagcagggccaaatcccctgatgttcctgttggctgtctagccttcagggacaggtcatgggaccttggttcctgccctgtcatcttcccagtcaccctgatcttcacggggaggaatagcctgggaaaggacttggtcacagcacctccaccctagggctattgaggatctcacagttgtgtgtctggtgggttctgtccagagcccatttgagagcagtggatgacaggacaggcctatgtgacccaggcaggcagcaatattgggtcagccttcatgtccccttctgtcagctggggcagcctggaagcatgattgtggggtaggtgttatgggcacggaatagacctcaggtggaggctgcaggggctctccggcaccgtagacacagcaggcccaggagcaggggagggagccatgactcagggagactctggcccatatccttggcagatgagggccacaggggaatgggcagcactgtccaaagtcccctgggctgggtccgcagctgttcctggctcagacttcttggtgggctggtcagaaacatgcagtaacttggggcagttaccaggtggccaagcctgcactgctgggctctgtgagcttgggccagctcaggccctctctgggccctgcctttctgggctgttcgggtggttccttgggcctggggtgctaatgtttctggatgggcagcagaaccagtctgcactcagggccccaggccatgttcccggaacacacctttagcattgacagcagcgtgtggtgaggccccttaggctgggttctggtctagtgccaggggcaccactactccaccgcctccagagccatctctgggacactggctgtgagttcagatgttctgaacagggacagggagagccagagggaaccagcctggggctcactggaggggctcgtgggcagacagcgccctttggagggaactgagtctgaaaggaaggaaaccctttccccggctcatagcacctgccatccagggccctcccagggctgcgtgaactttagtcacgtggtgacaggccgagtcaccatgccaagtcactgtgcgcctccttgctgctgtgacgtcagcttccccatcctcccagccaggctggacctccgtgagaggcctgcctgtcctgcaccctgtgcagatgcctcccactgtccgccggggctgctgggcacgccctggctggtctcttggactaggtaagctcatgagtcctctggccgctcctgctccttccctgcctctgctcctcctcggaggtggccacccccagatcccagtcccaattcggaggccccctgaggagtgctgcagggggccacaggcgtggctctgagccactctggagagtggcggggggcccagccagttctgtggctgggactttcccaggcagacaagtctgtctcttcctccccagcgggtgcagcccagaactgtcttctgaggaagaggtgctctcctgggcccccactgtccccaggcctcaggtaagcccatcagggtcccaaggaagggggtctgggtttgaggccaaccatggcagctgacctactttctagcctcagtttcccctagtgtgtgcagctctcacgctgtttgggtgagaaccaggcctctgggcttggacattctttcagtgagtttttagggtggagggatgggaaatggaagcccaggacctcagcagggtgtcttcctccgatccggggacatctgcctgtgggaggctgggcccaccctcccttgctgacctgccctgggaggaagggacagggcccagcactgcctactcccctccctgttcttcccagcagtctgagcctggctgggtgtcccctgctcctccagcagcctacttgggcctttgggtagacagattaacagacaggcgaggctgggtcatggttggaccaccccaggaccctgaccgggggctcagctcatgaccctgagcctgggagagatgaggccatgccctccagggcactcagcatgacccggcccagtggacgggactgggtagcttccttggtgcagggggctgtcatgctaggacggggtcactgaccaggccaggcccctgccccatgacttgtggtggaaatgtccttttgtttttgtttttttgcattttttttgagacggagtttcactcttgttgcccaggctggagtgcagtggtgcaatcttgcctcactgcaacctccacctcctgggttcaagcaattctcctgcctcagctcctgagtagctgggattacaggcacctgccaccatgcctggctaattttttgtatttttagtggagatgggggtttcaccatgttggccaggctgttctcaaactcttcacctcaggtgatccacctgcctctgcctcccaaagtgctgggattataggtgtgagccactgcacccggccatgtgatgggaatgttctgtgtccataatagatgctgcatattgctggcccagctcctgaggctctttggacctccaggaatcggtgtctctatcaggaacccttaaccctgacccggactcccagctgggacccggggtgtcggagtggcaagagcgctgtcaggcctggtgaagggtgtgagctgtccaacggggcagggaggaggcagggcctgttctgcagttggacagacagagccctctagctgctttctggaagactgaagggcaggtgatgttggagggagggagtgcaggcaggggctgtgagggagttcaggtcagaaacaggtggcgcctggattcaggctgtggtggtcacggtggggatgaggggctgctttggattgtgctggggatgtggggtggtgcgctgctgcatgactactgccaggtctctctgctcttagtgtctgcatccagggctgggagggggtcaaatgaatcacactatcggccccaggcccaccaagcctggggaggtggccacccttccatgatggcatttggatgttccctgtgtgtggggagggcacagggactccattcgtagaccacctctgggacagtgtgtctgcctctgaggtcagacgctctgcactgggacagggtggagtggagggaaatccagcttggggctcattggaggggcttgctggcagacaccgccctttgtgggaaactgactgtgggagaggggaaccccaacctctgtcaccacatccctcttccctgttgtcacacctgtcacctgctgccatagccatgagacttcccaagggtcactgctgccactcactgcacagcctggaagggagtccacaggggacatacagtgagcaagagacctgtgccactcaggcctcctgggggtgtccccagtgcagccatgatgataatcacagctaccattcaccaagccctgcccacagtctaacctactctattcacaacactcccagcagcaaggcaagtgaggtgctgccgtcatccaggctggacagttcagtgatttgcctgaggccccacagcaggtgagtggcaagtccagcatcagagcagggcaggctggcggtgccccctgagccccctttgccatgctgaccacatgcacatcctgggcttctgcaggaatgccctgtcccctacctgccctgctccgtgcaaaaccctctttgagctgtgcctgggagacatgctgagagaattcatggaaacaaatgtgttactgacagcctctttgcctccagagttcaactggagacagagaaaccagctagaggcagagggaggtaacacggagtcccccagaaaggtctgggctgcgcgtgcttcaggtaacctcccttgaccttcaggagaacgagaaggctgcctgatcagagagtccctgaagaagattctgtggctacaggcttcagcagagtgtgagggagaccccggttatttcctcagctatttccaccaaatcctcctgtctttcgtggccaacaccccaggcaaggcttggggcccccgtctgctgctggacggtaagtcctggccccgtggcagtgaatctgtggggcgctctgattgtgggcactatggaagctaaaccccatgctccaggtggggtggagggtcttcagaggactcctggacagtgccaggctctaggctggggtgggggacacaggagaaaccaggccaggcccatccctactggagcttctccctaagcagtggaggctcagccactgtaaggaggtaggcaaggccctgcagaaagaggggtgtggaaatctgggggctcccaggaagggccgctgctggagatggggttcttaccaggatgggctctgaagataagcagggaggatttgggagggcagagatgaggcccagagcttctggcagagggcatggcctgcgcaaaggtctgggggccggacagcctgcacgtattctgggaagcgggaaggagacacaggccttgtgtttctgaggcccgactttagactgtgccctgttggggaggggccagggaatgtctgaggctaggcctgaccctgcttcttaccccgtgggtgcagcagagccatgaagaagaagttagtggtgctgggcctgctggccgtggtcctggtgctggtcattgtcggcctctgtctctggctgccctcagcctccaaggaacctgacaaccatgtgtacaccagggctgccgtggccgcggatgccaagcagtgctcgaagattgggaggtgagcagggcagggcatgggacatgggccctgaaaactgggcaagtggacctgagcaataccttcacccccctgagactcagtttccccatgtgtaagcttcgcttggactctctcagtagcctttgggaaggggacagtgactccgagagcagggtgtgggtctctagagccaaacagggccccttttctcagttctaagagtctctgtctctttggaataaactgcactgttttgttgtttggttgttatttttacttatttcttcctatctatctatctatctatctatctatcatctatctatctatctatctatctatctatctatctatctatctatctatctatctactatctatctatctatttatttagagatggagttttgctctgttgccaggctggagtgcagtggtgcaatctcagttaactgcaacctccgcctcccaagttcaagtgattctcatgcctaagtctcccaagtagctgggattacaggcgtgcgccaccacgcccaacaaatttgtgtgtgtgtgtgtgtgtgtgtgtgtgtgtgtgtgtgtgtgtgtgtttccaagacagagtatcgctctgttacccaggctggagggcagtggtgcaatcttggcttactgcaacctccacctcccaggttcaagtgattctcctgcctcagcctccacagtagctgagactacaggcatgtgccaccatgcccagctaatttttgtatttttagtagagacagggttttgctatgttggccaggctggtcttgaactcctgaccttgtgatcctcccacctctgcctctcaaagtgctgggattaaggtgtgagccactgctcctggcctaattatggtgtttttagtagagatggggtttcaccatgttggtcaggctggtcttgaactcctgacctcaggtaatccacccacctgggcctcccaaagtgttgggattacaggtgtgagccaccacgcccggcttattctttttttttttttttttttttggttaggagacaatttctttctttctttttttttattttattttattattattatactttaagttttagggtacatgtgcacaatgtgcaggtttgttacatatgtacatatgtacacatgtgccatgttggtgtgctgcacccaccaactcatcatttagcattaggtatatctcccaatgccatccctcccccctccccccaaggaacactgttgcccaaacagggacatgaagggcttattcttttttgttgttgttttgttttgttttgttttttgagacggagtctcacgctgtctcccaggctggagtgcagtggcgcaatctcggctcgctgcaacctccgtctcctggattcaggtgattctcctgcctcagcctcctgagtagctgatattacaggcatccgccaccacgcccggctaatttttgtatttttagtagagacagggtttcaccataatggtctggctggtctcaaactcctgacctcaggtgatccgcctgccttggcctcccaaagtgctgggattacaggcatgagccaccatgcccggccgggcttattctttttttaaggtggagtcttactctgttacccaggctggagtataggggagcgatcatagcccactgcagcctcaaactcttgggtttaagtgatcttcccgcctcagcttcctaaagtgctgggattacaggtgtgagccatggtgcctggcttctactgttttattctattttagactcttatctcatgttatatacaaagatcagttccctcctaaagacttaaacagaaaaaatattatgtttttcatattttgagacagggtcttgttctgtcacccaggctggagtgcagtggcatgatcatagctcactgcagccttgaactcttgggcttaagcgatcctcccacctcagccccctgagtagctaggactacaggcgtgcatcacacctgactaattaaaaaagactgttttctagagatggtctcactctattgcccaggctggtcttgaactcctggcctcaagtgatcctccaccttggcctcccaaagtgctgagattacaggtgtaagccaccatctctagccgggaaaaaaaatgttattaataaagtatagcaatttccctttttgtcccagttataaaagtcatgtacatttgtttgcttgataaagaggaaactgtctgggcaaggtggtccacacctgtaatcccagcactttgggaggttgaggcgggcagaccacccgaggtcaggagttcgagaccagcctggccaacatggtgcactctgtccctactaaaaatataaaaagttagccgggcatggtggtgtgcgcctgtaatcccagctactcaggaggctgaggcaggggaatcacttgaacccaggaggcagaggttgcagtgagctaagatcatgccactgcactccagcctgggcaactgagtgaaactccctctcagaaaaaaaaaaagaaagaaaagaaaagaaaaagaggaaactgtaatcccagcactttgggaggttgaggcgataggattgctttagaccatgagttcgagaccagcttgggcaacatagaaagaccctatctctacaaaaaagacaaaaaattgccaggtgtggtggttcttacctgtagtcccagctactcagcagactgaagtgggaggattgcttgagcccaggaggtcaaagctgcattgagccaagactgtgccactgcacttcatcctgggtgacaaagtgagaccctgtctcataaaacaaaggctgggcacagtggctcatgcctgtaataccagcactttgggaggccaaggtgggtggatcacttgagcacaggagttcttgaccagcctgggcaacatgatgaaaccccatctctacaaaatacacaaacaaacaaaattggctgggcatggtggcatgtgcccatagtcccagctacttgggaggctgagatgggagggtcaattgagcccaggagactgaggctgcagtgatctgagatcacaccactgcactccagcctgagcaacaaagagagactttgtctcaaaaaaaaaaaaaaaaaaaaaaaaaaaaagaggccaaggcaggcggatcatgaggtcaagagatagagaccagcctggccaacatggtgaaaccccgtctctactaaaaatacaaaaattagctgggcgtggtggcatgcacctgtagtcccagctactcaggaggctgaggcaggagaatggcttgaacccgggaggcagaggttgcagtgagctgagatcgtgccactgcactccagcctggcaatagagcaagactccatctcaaaaaaaaaaaaaaaaagaaagaaagaaactaaaaacaaaaaccccaaaactcgaatggacttctcttccatcctcctttgggcaggtgggcagcagggtgtgtatgcggggccagggtggaagcctgcaggttctcatgcctttatgtgccacatggcagggatgcactgcgggacggtggctctgcggtggatgcagccattgcagccctgttgtgtgtggggctcatgaatgcccacagcatgggcatcgggggtggcctcttcctcaccatctacaacagcaccacacgtgagtgcctcgggagaggagagggagaggggcagggggtgtgggttgggccgaggcacagctgggcggtccccaggctcacgtggcataaagggtttgggtgggcgggcctgcctacctgcttctccttctaggaaaagctgaggtcatcaacgcccgcgaggtggcccccaggctggcctttgccaccatgttcaacagctcggagcagtcccagaagggtaagccatgcggcagacttggggcgtgggtgcagagctggctgagccaccgggaaggggccttgcccacaggagcctgctcccgtcagggttcaggggcagttctgtcaccccccatcccttcctgtccccatagcaccctcccacaatgagtggtcaggaccatcatcaccatggtaaagggccgggagcttctgttatttctgctaaggcctccggggccactctgtgcagcacatggagagaataattattatgctagcagacctcatggaccagggctcactggggcccacactctgctctgtgcttttcacccatgagcctctcacaaccctccctgctcctttgggctaggggatgctgtgtggattcccattttacagggtggggatgctgaggctcagacaggtcacgcaaatcagttgaggtcacacagctgggaggtggtgaagctaaaattgaacccaggctgtctataccgtgccttttcaacaggcatcccattcactcatttgttcatttgtggggatggtgctctagaatgtgaggtggagtctctcttttctaatctggtcttaagtggagaggaggcccccaaattccccaggtacctgaagggaagccactgtccatccaggaagccactgtctgtcctcaaaggtggtacagtagattgtgagataaaagttggaggatgggagggtctcaacaactcacgcctctaatcctagcactttaggaggccaagtcaggaggagcgcatgagcccaggagtttgagacctgcctgggcaacatagcaagactccatctctacaaaaaacggaaaaaaaaattagctaggtgtggcggtgtgtgcttatgttcccagctacttgggaggctaaggtgggaggatcacttgagcccaggaggttgaggctgcagtgagccatgattgtaccactacactctagcttgggcaacaaagtgagaccctgccaaaaaaaaaaaaaaggctgggcctttttttcacaggctcacgcctgtaatcccagcactttgggaggctgaggcagatggatcacctaggtcaggagttcaagaccagcctggccaacatagtgaaaccctttctctactaaaagtacaataattagtcaggcgtggtggcacaggcctgtaatcccagctactcaggaggctaaggcaggagaatcgcttgaacccaggaggaggagattgcagtgagccgagatcatgccactgcactccagtctgggcaacaagaatgaagctccgtctcaaaaaaaaaaaaagttggaggatggaggggcaggacacactcaccatagcaggtcttagacttcaggtgggggtcctgggtggtgccctttggagtcttctgcaacatactcaatctttgacttttttcttttttttttcttttttttttttttgtcacccagactgtcgcccaggctggagtgcagtggcacgatctcggctcactgcaagctctgcctcctgagttcacgccattctcctgcctcagcctcccgaatagctgggactacaggcgcctgccaccacgcccagctaattttttgtattttttagtagagacgggttttcactatgttgcccaggctggtctcgatctcctgacctcgtgatcccccggcctcggcctcccaaagtgctggaattacaggcgtgagccactgtgcccgatcaatctttcatttttttttaatactcattgagaaactcagcatttgtagacatgaagttgctcagggtaagagaatgcgggaatcataggcttggcaccttgtggactcttagaatcatttatttaacttgaatgtattgagtattctcttaaagaatcagctgttgttcctgaagctggggtgaaaaacaaagatggcagatgaaatctgtgacactccaggtgggaggagaaactaggcaggtgcaggtgtgttacgggctgtagaaaaacaggtctggagggcctcaaaatctgggactgtatagagggtgacctagtcagggaaggggacatctgagcaaagacccagaggcagagatggggtcaggggagttatctcctggtctgctatccaggtgtgatggcagggacagagccctgtggggagctggggaggctgcagcaagtgatccaagggaaatggcccaggttgtgtgggatctcttaggttatggtgaagcctctgcttcctgtctgagggaagtgggggctcgtggagtatgtgagtggaaggggatggatctggcctatggaccccgtgggttgctgtgtaaggggcagggagcatgtggggacctgtctggaggtcactgcagtaattcgtggagagggtgctgggaagtggctgacgctggacagacacacttggaagtggagtctgtggatttgaggatgggttgggtgtgacgcttgtgtagggagtccccggggacccctgatcttttgtctgtacctggaaggatggggtgaccctaatggagacaggcagggttctcaggaagcaggttgagcagacactcaggagctcggttttgggcacgttgaagtttgagatgctttcttcgagcaggcaggtagatcctcaggtctggtgatcggaggagcagcccaggccagcaggtcaatttgagagttgtcagtgcataaatggaggctgaagctcagatgtcaagcagaccaccaggagagagagcaaagacagaggggagagtaggagctaggatggcaggcgggggagactcgggtggagccaggtgctgggatgcaggggcagctctcagggaaagtgatgagcccagtaaagctgagagggggcactgggtctggcagtgtgggggtcaccagagaacttggcaagtgtgctggcatgagagtctgattggcctgaggtcaggagaagattttttttctgatattgatacatgatattttctatatttatgggtacatgtgagtgcttgttacatgcatagagtgtataatgatcaaggcagggtatttggagtctccgtcaccttgaatatttttcatttctgggtgttagcaccatagtcctctcttcgttactttgaaatatacaaaatactgttgctaagcatcgtcaccctggtctgctatcaaagattagaacttctcctgtcttggctgggcacggtggctcacacctgtcatcccagcaccttggaaggctgaggtgggtggatgacctgaggtcaggagtttgaaaccagcctggccaacatggcaaaaccccatctgtactaaaaatacaaaaattagcctggcgtgctggcctgtgcctgtaataccagctactcgggaggctgaggcaggagaatcgcttgaacctgggaggcggaggttgtagtgagctgagatcatgccactgcactgtagtctgggagacagagcaagactccatctcaaaaacaaacaaagaagaaaaacaaaacaaaacaaaaaataacttctgtctaactacaaggtggaaggaatcatgtgctgggtgtcagaccttccgggatgtatgtgcagcttctaggaattgaaaccaccagctcttggaaacttgtgccaggcttcagggtgggagaggcagttctagagccacagctgccaagccaagccaaatggccccatcatctctcgcaagagcaggagagtccctgggggcagaggccatagttgtacctttctgggcaaagggtcagtgtctgtagtgtccttatgggcagcggggctcaggggggaagcaggcccaggggtgtgtttccaatgacctcctcaaaagtcagaactggaaggcaaaaccccttataggctgagtgcacctgtaatcccagcatgttgggatgctgaggtgggaggattgcttgaggccagagtttgagaccagtcttggcaacgtagcaagacccctgtctctacaaaaaataaaaataaaaaattaggctgggaatggtggctcacgcctgtaatcccagaactctgagaggctgaggaggatggatcacctgatgttaggagttcaagaccagcctgaccaacctggtgaaaccccgtctctactaaaaatacaaaaattagcaaggcatggtggtgcatgcctgtaatcccagctacttgggaggctgaggcaggagaattgcttgaactcgggaggtggaggttggagtgagccaagattgtgccattgcactccagcctgggcaacaagagtgaaactccatctcagaaaaaaaaaaaaaaaaaaaaaagccctgtgtagtggggtatgtctgtagtcttaggtacttcagaggctgaggtaggaggatcgcttgagcctgggaagccaaggctgcagtgagccatgattgcaccactgcactccagctgggacaacagaatgagaccctgtctcaaaacagacaaacaaacaaaaacccttatagttggatggagaaactgaggctgggagaggggacaggacggaggttaaggctcagtcttgcctctctggggccgtagaaaagaggcagggagccctttcttggggctggctgtgtcttgaaggtggcctgtgcttgacctcggtcaaggtgggatctgctcttgttttggcacattctcgtggagcccatgagtcttacaggataaggccttgtggtcagtgagatgggagggggtctggcctggcacaggattttagacatgcaggcacctgcacagacagacacctcatcctgggacagcaaaacccagccgcatgctactgcttcccctgctgtgccctcctcagacatccctggtccatgtacactcctacctgctgagcccctcctaaaaaaaaaaattaaacatcccctcctaaaaaaaaacaattaaaattaaaaaataaatttaaaaattaaaaatccccttctgctaggtgtgctgttcacgcctgtaatctcagcgactcaggaggctgaggtgggaggatcgcttgaatccaggagttcgagatcgggctgggcaagatggcaagaccccaactcaaaaaagaaaaaaaaaaaatctttcctcctaagcctcattgccccatctgtaaaatgagtcagggactgtgcctgggatgctgcctgcgagagatcccgatgtcccccactcagggtcactaactatggctctctctccccaggggggctgtcggtggcggtgcctggggagatccgaggctatgagctggcacaccagcggcatgggcggctgccctgggctcgcctcttccagcccagcatccagctggcccgccagggcttccccgtgggcaagggcttggcggcagccctggaaaacaagcggaccgtcatcgagcagcagcctgtcttgtggtatgtctgtgggtgcggccccctgacacaggcagggcaggcacagcccaaggaccttgcaggccgtagcagcagtggagcagccctctgccttcaggaccctgtgctgataatgggatgaggagatacagacccttcccaccacgtgtggggacacattctgagcgtggggtcccagtggccactgtggctggccatgtgtcctgagtggcaagggacactaggaagctcccggaagggacactaggaagacgagcgctgagtgacagggccacccacctgtgacaggcgctgcccctgttctgctccgttctcctgtgtggacgggtgtgaggggtggtctagctgagtccaccccacctgctgcctcacatgagccccctctgccccagtgaggtgttctgccgggatagaaaggtgcttcgggagggggagagactgaccctgccgcagctggctgacacctacgagacgctggccatcgagggtgcccaggccttctacaacggcagcctcacggcccagattgtgaaggacatccaggcggccggtgagtgggtaacctcaggggcctgggtgaggaactctgcagtggaaaccctgagctgtagcccagagctatggggtcctcctgtcttgcctgagcctgcaggaagttcctggtggaggagggtcagtgactggccatgtgggtccacagctcctgcttatatcaaaaccaagagaggccacacagtccaggagagcaagtccctgttggggtaaatgcaggtgtaggcaagagccagggctagggaagcactagaatacagcctgaagatccaggaggacttcttggaggaggtggcggctgggctgcagataactttgttaggcagagagaggaagggattcctagcagaggaacagctgggctaaggcccagtagagggcgctttgattcaccaagagggttacaagggatgagggtctccttgagagaggcatggggaaggggatttgtggggcaggggcctggagcttggctgtggctttcttcaggtaatttttgtcacgtttcatggaggagggtgattagcgtgtcgacctttaccactgaggctggaaattggcatgccaataccctgtctgtctggagctgactccaggagaattaagagcctccctcctctattcattcatcatgaggagaagaggccaagcggcagggagactggcaggaattctccagttagaaaaggccctctgagccaggcgcggtggctcacgtctgtaatcccagcactttgggaggccgaggcgggtggatcacctgaggtcaggagttcaagaccagcctggccaacatggcgaaaccctgtctctactaaaaatgcaaaattagtcaggcatggtaggttgtgcctgtaatcccagctacttgggaggctgtgccaggagaatcgctagaacctggggggctgaggttgcagtgagccgagattgcaccactgcactccacagagtgagattccatctcaaaaaaaaaaaaagaaagaaagaaaaggccctctgaggccaagcttggtgtctcatgcctgtaatcccaacactttgggaggctgaggtagaagttgaggccaggaggtccaagacaagcctgggcaacatagtgagtctacaaaaaaaatattgagaaactacataaatatagtgggggtgggggtggggaacaagaaaacaaaaaattcaaagcatagtgaaaagaaatatagcaaaacccggccgggcatggtggctcacgcctgtaatcccagcactttgagaggccgaggcgtgtggatcacggggtcaggagatcgagaccatcctggctaacacagtgaaacctgtctctactaaaaatacaaaaaaattagccacgtgtggtggcgggcgcctgcagtcccagctacttgggaggctgaggcaggagaatggcgtgaacctgggaggtggagcttgcagtgagccgatatcgcgccactgcactccagcctgggcgatagagcgagactccgtctcaaaaaacaaaaaaaaagtagcaaaacacaacaaaaaaattaaaatttgctgggtgtagttgtgcctttagtctcagctactggggagggtctgctggaggatcacttgagcccaggagttcaaggctgtgattaagccactgcactccagcctgggtgacagagcaagatcctatctctaaaaaaaaaaaagaaaagaaaacactctgtggccacagatgagagaaggcagacaggaagccagtaagccaagcaggcaaagggcaggtggccccagcccggctgttgggtggtgagcagtgtcagggagacaggagtgccggagctgatgaggttcccaaggaggtgaggttgcctgtggccccctcccagggcacagtcccacccctccagtagtgcactctgtcctccctggtaggtacaggcttttccccaccaccatggtgcagccatgcctgcccccaacaccactgctgcagctccatcctccacgcagtggtgcagccccatcccagcacccatttgagctgctgtcccattgcagggggcattgtgacagctgaggacctgaacaactaccgtgctgagctgatcgagcacccgctgaacatcagcctgggagacgtggtgctgtacatgcccagtgcgccgctcagcgggcccgtgctggccctcatcctcaacatcctcaaaggtgagtggtcgcaccacagccgtgtggtaggacccatgacactgcctctctctccccacgccccacccctcctgcatctctgctcgccccccatgccacgtctttccatcactgagctcccgaggtgtgtccctgcgtcacagttcaccatgtcctgaaggaggcagtgcagagcgacagggctgaagcgggcaatgctcaagggttggaggaggaacaggagtcatcaggagggagagaggtgcaggagctcagggctgcagggccggtccagagggtaccccggtccagtgggtgaccctgccacttggtcattgaatggccagagctgatgcgtgacgtgaggtccaggctcgggagccctcaccttacttcactctcaccacagccttctgaagcagctgctgctattggttattaaacgctccttgaggtgggcaaagtggctcaggcaggtgttaaccctctgagcccctcagagcctctggggctcagcaacatgcacctggctctgatcaaccagggtacaacttctcccgggagagcgtggagagccccgagcagaagggcctgacgtaccaccgcatcgtagaggctttccggtttgcctacgccaagaggaccctgcttggggaccccaagtttgtggatgtgactgaggtaaggggcaggggctggcccactgtgggtgtggggcctgccatagaggcatcaggtgggctccccagggtggctacagcctcacatatgctttatgaatccattcctgccacagacttcgattgcgggcctactgtgtgctcggatggactcgtgggtgacccccagtcttggcttctgccgcacagaactgacagtgtggggaattagtggccaccctcctacctcaggtcctttgcacatgctgtggttctcgagtgctcagtgctgagatgaggaatgcatgggggcattgcagccctcgggcatggtgagatggatgggtgaaagggagagggccaggtgaacagagaccttggccacccactccctgtcactccaaactaacgcttcccagatgccaccctcagccctgcaccacctgacccactcactcagtagttgccccagctccacactgggtccctataagaccctgtcatatcccttcccgctgaggatcctcacatccctccttacctacttgggtccttggcattcctgggcggatctgcagacccccccacactgaccagtgacctcccaggaggggcgtcagctgcccaggtggtgtcttctctttccccgtgagcattctgcacctctgactcccgctgcagccagtgacctggtgtcttgtctctctgaggggacagagccactgcagtgtgtccctctgccctcctttttggctaaggccagctccttcatctactcgctggctcggggtgctgttcctacaatgctcctttctgcctctgatgatttacttctttatcacggcttattcccgaaagaaaggcagctgttgttgctctagaaacttctatctgctgcctccttctgtcctttgctcctcttagagcaaacatggctgggctatgtcctctctcccttcagggtatcccctcccctgctctatccccatgccaccagatcgccatgtccagcctcagtttccccatcaggccccactcagcagcatctcacacagctcaccacactctcctcgagttttcattttgcaaattttcgcacctacaaaaatgtaaaaaaaccccaaaactgcccaagcatcaatgctcccttttcctggagtctgcagtgtggatgtttctgtcggatttcctaactctctccgtctccacccacatctattgggattcgtgtttttctgagggattccacagtaggttactgatgtcgcacctcagggtgtgtctcaaaagtgagacttgaacatagcacagcaggatgtcggggtgacacaacctgttgtcccttctctttacctacagtaggctcccttggctgttttgtttttgttgtgtttttgtttgtacacagagtctctgtcatccaggttggagtgcagtggtgtgatcttggctcactgcagcctcaacctccagggctcaagcaatcctcccacttcagccccctgaacagctgggaccagaggcacgtgccaccaaacctggataatttttgtattttttttagagacagggtcttgcccagactggtctcaaactcccgggatcaaactatcttcccacctcagcctcccaaagcgctgggattacaggtgtgtttttttttttgagacagagtctcgctctgttgcccaggctggagtgcagtggcgctatctcggctcactgtaagctccgcctcctgggttcacgccattctcctgcctcagcctcccgagtagctgggattacaggcgcccgccacaccgcccagctaattttttgtatttttagtagagagggggtttcaccgtgatcgcgatctcctgacctcgtgatccgcctgcctcggcctcccaaagtgctgggattacaggcatgagccaccgtgcctggcctgttttgttgatttttaaagcccagggcagtagtcttggaaaatgtcccacatcgtggatttgcctttctgtttccttgagggcagattcagacagaacacctttccctgggattggtcaactaatccgtggggtgttgctgaaactttattttattttattttatttttgagacggagtctcgctctgtcccccaggctgtcccccaggctggagtgcagtggcgggatctccgctcactgcaagctccgcctcccaggttcacgccattctcctgcctcagccccccaagtagctgggactacatgtgcccaccaccgcgcccagctaattttttgtatttttagtagagacggggtttcactgtgttagccaggatggtctcgatctcctgacgtcgtgatccgccctcccaaagtgctgggattacaggcctcggcctcccaaagtgctgggattacaggcgtgagccaccgcgcccggtgttgaaactcccttgaggcattttcttcggccttcgggtccatcctctgtctcctccttgacctcctcatctcctcgccactgccttggggaccttggccaggctcatggcatccagcagccactcaatgtcaatacctccatgttcatctctcagcccgcccttgcccgtgaacccatgcttatttatttattttttttaatacgtgcacccatgctcttcaggtctgatgaagtatccaaaatcaagctcctgaccatccccaaacctgccccttctgcagggtttacctcgctagtcggcgccatccttgattcttctctttctcccacccaggccatcatctcttgcctggttgatacccacagcctcccctttgggctttatccttatccccatcatagctgccagagggatcctgtgaaaacactccccagcctgctcattcctctgccctaagcctgcatggcacagagcaaaagccagttgttatgggacctaggaagtcctgtgggatgggccccagcctgcatcttcatcctcttctccccaccccactccattcactctctgcctatcactcaccagcctataccacctgcctcagggcctttgcactgaccatttaggccacattccaggctcttttcacacgttgcctcctctgagaagccctccctgaccactctgcccatacctcatgcctcttgattccccttacctggcttgtggtttcagcactttccctgtgtgtgtttgtttttcttggcatgagagcaggacctaagtgtctgttccctgttgattccccagtgccaggcatgcagtgcaaactctagaaatattttttgcatgaaggaatgagtgattgaatgcagcaagggtctggaggctgaggaccaggcagacagacattcagagttgctggaacgcgacagagacagggagtcagactggtcatgcaaggtcctgggcctgcccttgggtcctggggagccacggaaggttgtgggtgccagagggttgcggtcagagtcacagtcaagggccttctgagacctgtgccccctccccaccctccctccccacctcctcaggccagctctggggtctcggcaggtggtccgcaacatgacctccgagttcttcgctgcccagctccgggcccagatctctgacgacaccactcacccgatctcctactacaagcccgagttctacacgccggatgacgggggcactgctcacctgtctgtcgtcgcagaggacggcagtgctgtgtccgccaccagcaccatcaacctctagtaggggctgctgggccgcctgggtgggaaagggccaggggcgggtggcccagggactgcccacttatccagtaaggtggctccgtcacctcttttcctggtgggaaactgaggcccaaccttggtagcttatcctgggcctctcagtgagtatgtttgagcctcagtgggtggatagggaccaggctgggccaggcaaggtcgggcactgtctgacctggctgggcggtagctttggctccaaggtccgctccccggtcagcgggatcctgttcaataatgaaatggacgacttcagctctcccagcatcaccaacgagtttggggtacccccctcacctgccaatttcatccagccaggtatggggtggaggtccgggggtgggggactggggtggagaggggcgggtgtcctgggcaggcagctgacgggcatccctgtcttctcccatcggccgcagggaagcagccgctctcgtccatgtgcccgacgatcatggtgggccaggacggccaggtccggatggtggtgggagctgctgggggcacacagatcaccacggccactgcactggtatgtgtcacaccttttctccctggccgtgcccaccctgcacagcccccaagccatgctgatcacactcccatgccccaggccatcatctacaacctctggttcggctatgacgtgaagcgggccgtggaggagccccggctgcacaaccagcttctgcccaacgtcacgacagtggagagaaacattgaccaggtgggccgggggttggagaaactgagtcaaggtgtggggccccagggcatcctgggctggaggcctggatcatcacagagtggacaatggttggtgtcctctctctagtgcctgggccatctggagcccctgtgccatgagggccaagccccctgctccagtgagacccagcaggccccaacctgctcttcctgatgacctggcccgaaatggcaccacctgggctgaggcctgtgaccacacagatgtggttcaggtggcatctggagccctgctcaggcttcccctctcctcccacccccaggcagtgactgcagccctggagacccggcaccatcacacccagatcgcgtccaccttcatcgctgtggtgcaagccatcgtccgcacggctggtggctgggcagctgcctcggactccaggaaaggcggggagcctgccggctactgagtgctccaggaggacaaggctgacaagcaatccagggacaagatactcaccaggaccaggaaggggactctgggggaccggcttcccctgtgagcagcagagcagcacaataaatgaggccactgtgcc

SEQ ID NO: 15590 - DNA, 72981 bp, Homo sapiens
gactcacgccttcgccgtagcatctttcgcagcggaccgaagagaagaaaagtaggccagagccggtgaggctggggacgggcgaggggaggtcgaggcgcctgtgaggggccaggggctggagaaagacttgctgcatggaactctgcggggctcggggagggaagaaagcgggaagcttgggccacccaaacatcagcgtcgcctcactagctcctggaagtaagttcattagctttcccctcaacgtgcatgcttctcacattctgtatctctccaggtgagtgtttttcaaagcttccaggcagtaatctcgaagtcatttctgattgactatctccttcccccaaatcctatgagtttttttttgtttttttttttttaagtagagacggggtttcaccatgttgccctggctggtctcgaactcctgggctcaagggatccaccggcctcggccttccaaagtgctgggattacaggcgtgagccaccgcgcccagccggtcattttttaaaaagttctttgtatctctgccccagtcccctttcaggcaatggtcccctcatgctttccacactgttgcagcagttttaactgttgcagaagttttaacaagtttctctgcttctaaaccttacgttctatccattttgtaaataaatgctgctatcttttcattgcgtcattctttacatataattctgcagtggttctccactaccttcagcataaaatctagactcctaaggctgaaagccagggatcctcaccaaaggagcctgtcctttcaacctcatgttctcctgtcttaggtacgcttaagttgaaacttagagttgttgctcatctcaataaaaagttcactgcttgatgcttttgattaggtcaagtcaggtgctttccctgattttcctccatgacaagcatttcctgcatatagcacgttgtcactttgatattttctcaatatccttgatagtaaaataagtgaagggttaaagggctgaattaaaagtacagcctgctctcctagatgtgcatggtcctttggtctgtatctgcaccttccatagggtagccactagctacatgtggccgttgaggacttggaatatggccactgggattgagggactgggtttttttattttaattctattgtgttttagttaagtttaatttaaatagctacgtgtgtacatgagctgctgtattggacagctcgggcctgtattattctcaaaacgtaatcatctacaattaagggttaacaaataacagtgcaacaaattaacattccagtccccctcccctgacacacacagtattggctaatggtcctttagctgaagattaagggacatagggtagcggggacacatgacccatgggagatgctctcttttcattcctagttttacttctgtccatcccatcattcctcctcaccccacatcttgcacatatttgccagatagtttcctccaaaccaggagctgagcttttttttttttccttggtagaaaatgcagctttggtgtttttgctaagttttatggagtgccaggccttaaaggaagcatgatgtgtgccacatgccttttcagactctgaaagatgaactgactgttgtctctctcattgtagaactctcttcctgccaagatgtctattggtgtgccgattaaagtactgcatgaggccgagggccacattgtgacatgtgagacgaacaccggtgaggtatatcgggggaagctcattgaagcagaggacaacatgaactgccaggtattctgctttgcatgtgaggctgtgtgggaggaatggccctgtgtcttgaaggacagaaaagtgtgtgttgagggtctctggaaattgttctcattcagcagtgatttcctaagtgcctaatgcataccagtcaggtgctgttataggctctgggggtgtgggcatgaacgagacacataatcttgaggcagaaaagccatttggaggtttggaatattttactttgtcctttttgttttttccatccccaaatatgggggtctatttgggagaagtgctacttccttcagtagaatccttcagattcagggccattatccatttgcctccacttgctttgcgattagcagaatcttctcacctactgtatttgtttcccttttctcttggaggaggagtctcatttgattattgcaactaccttgtgaggtaagcaggtttggtgatagtcttgtcatccataaaatagggagaatgagattaaagggctcatcactctgatgataaataatggagtagtttcctgatatggtgtccttctcatggcacaactttgccttttgcatagtcatctgaatttttatagcattgtttttcagttgtatcttcacactttctttgttctttaaaccactggttaagaacttggacttgggagtcagagagagatgtgggtttgaatcctaattatatgactttagatgtattaaccactcagttttctcatctgtaaaatgggggtggtattatgttgggttctttgatgtagatgccaagacagaattttgcaaggtatttattgggggaaatgacaataaaggataaaagagcaaggaagcagtagtaggcagggaaattttcagtctatggtgctggtctgactggtgaaatgagaggggaaaggaaggaggattgagcaggaagagccttagactacagcgtagttttgaggaaatctcagcaaggcagcgattgctcgttagaagagtctagcatggggcagaaatgggcggactggcacccccggtgtgttcaggctggcaacatggggagagagtagcctcaagttgaatgccatggtggactgcaaagatggagattgtcggctgcctgcactcctcatagcctgttctcttttgaagggagatgtgagcagcacacccttaagactgccacaggggtaatatccacacccccaggacttttacaaagatcagatgagctgtatgtgtgccatagctgctcagtgcctcacatactgtgagtgttcaacatatgatacctattgcttttttccagatgagaaggtcagagaggtaaagcaccttacaccgcggtcaggcatcctgaccatccattggtttgcagggttcatttatttgtgatttttctgtagctttgagcgtctgtcatcttcctgcgaggttgacaagcttggtcagttccctgaatgcagagaagtagacctctggtgactcaggtttattgcattactgtcaatagatcagtttatctattgagggtagataagtttatcatctctcatatatccagtcctctggcttaaggcatgctcatccactttaaggttctttaatttggtgaggagaatgcaagacttgggttagtgaagcttaatgggtttgttcaattagctgtatgtatttggacaacttgctgggtttccagggcctttgtcatcccatccgtaacgtgaaggtgtctaaccagataaccttggtagccattcagagatgcagtcaacatgacacaaagtgcacagaccttggtgtccgacagacctggaatcagcttgtagcctgccccctagggtgacttggggcgagcttagctttggacctccttcatcctctggtccctcctctaaatcagggataaaaatagcaccttggcctcagaaggaaccatgcctgaccaatggtgggggacagccacctgcctccctgcttgtatttgtatgctagtgctaccataacaaagtttcacagactgggcagcttagacaacacaaatttattttctcatagttctgaaggctggaagtctgagatcaaggtgttggcaaggctggtttcttctgaggaatgtgaaggaaggatctgtttcaggcctctctccttgcttatatatggctctcttcctgtgtcttcacttggtcttccctctgtagtgtttctgtccagattcttcttataaggataccatgcatgtaggattagggcccactctaatgacttcatcttaacataattatgtttataaagaatttttttttttttttttttgagatggagccttgctctgtcacccaggctgcagtcttgctctgtcacccaggctggagtgcagtggcgcgatcttggctcactgcaacctctgccttccaggttcaagcgattctcctgcctcagcctcctgagtagctgggactacaggcatctgccaccatgcccagctaatttttgtatttttatatttttagtagagacaggtttcaccatattggccaggctggtctcgaactcctgaccttgtgatctgctcgcctcgacctcccaaagtgctgggattacagatgtgagccaccatgcccagcttgcttgcttttttttttttttttttttttttttttttttttttttgagagtctcactctgtcgcccaggctggagtgcagtggcatgatctcagctcactgcaacctctgcctcctgggttcaagcacttctcatgcctcagcctcctgagtagctgggactatgcccagctagtttttcgtatttttagtagagatagggtttccccatgttgcccaggctggtctcaaactcctgagtttgcctcagcctcccaagtgctaggattacaggcgtgagccactgcacctggccttttttttttttttttttttttttttttttgagacagaatcttgctctgttgtccaggctggagtacagtggcacaatctcagctcactgcaaacctccgtcttcccgggtttaagcaactctcttgcctcagcctcctgagtagctggggttataggcatgggccaccgtaccccactaatgttaatattttttgtatttttaatagagatggaggctcatcatgttgcccaggctggtctctaactcctgagctgaggcaatctgcccaccttggcctcccaaagtgctaggattacaggcatgagccactgcacccagccttttttttcttttcctttttcttttctttttttttttttttttttttttttgagattaagctttggtctgttgaccaggctggggtgcagtggtttgatcatagctcatgggcagccttggacttctgggctcaagagatcttttcacctcagtcttctaagtatccaggactaccagtgtgccccaccatacctggctaatttttaaatttttttgtagagacggagtcttgatatgtttttcaggccagtttcaaactcctggccacaagtgatcctgctgcctcagtctctcaaactcctggaattacaggcatgagccaccacatctggcctgtaaagattttttgtctctaaatatgatcacattctgaggtgctgggtattaggacttcaacaatgaatttttttgagggatacaatttagcctgtaacaggatgtagaggcctcactgggtctatcaaaacctaggcacattgaataagagccagcagactgtggcgtagctaaagctggtggtgggtgaactctgagcacagtttagtttgttcagcacatctcaggctgtgaggcttgcctgtccttcccagatccagtcattctgccttttgggaatgagaacatcctcttagcacttttccttgcttgttcaataacattttctgttataaaagtggggtgggacaaaatgtggtggctactcctataatcccaacactttgagaggctgaggcaggaggatcacttgagcccaggggttcaagaccaacctgggcaacatgacaagactttgtctgtaaaaaaaataaaatagacggatgtggtggcacatgcctgtagtcccagccattcaggtggaggctgagttgggacgattacttgagcccaggaagtcaaggctgcagtgagctatggagtgccactgcactccagcctgggcgacggagtgagacctagtctcacacacacacaaaagcacaccacaacgattcggaaaagataaatagaggatctcactctgttgcccaggctagtcttgcactcctggacttaagcgatcctcccaccttggcctcccaaagtattggaattacaggcctaagccacacctgccctgttttggggttttagtatttactttttattctatcctctttcagaaatagttagaccctgtctcttctgaaaagcaaaaaagtttaaaaattatctggatgtggggctgggcactgtggctcacgcctgtaatcccagcactttgggaggctgaggcgggcagatcacgaggtcaggagattgagaccagcctggctaacacggtgaaaccctgtctctactaaaaaaaatacaaaaaattagccaggtgtggtggcgggcgcctgtagtcccagctactcgggaggctgaggcaggagaatggcgtgaacccaggaggcagagcttgcaatgagccaagatcgcgccactgcactccagcctgggcgacagagcaagactccatctccaaaaataaaaaatatattatctggatgtgatggcttatgcctgtagtcccagctactccataggctgaggcaaaaaggatcacttgagcccacccagcagttcaggctgcattaagctctggtcgcaccactgcactccagcctgggtgacagagcaagaccctatctctaaaattaaaaaaattctatggcaggataaaagtagatgcatagatcatggtgcaggtaagctggggtagaatgtaaaatgaagccaagcagtcagtatccagaaatgtaaacctgaatctctctgtacattgaataaaggtatattccagtgtaagattaagcagggaagatcatcagttccaaaatgcatagtgttcttaagttaaaatagcaattgtgtggatttccctggcactcagatacaggagacactattagatgatatcctcgacaacatccccatacaaaatacccttttatggtccctcaagtagttttaaagtatcctgttatcttagcactgtttttgacatttgaaaatgcaaaatatggccaggcacattggctcatgcctgtaatcccagcactttgggaggctgggccagggggatcacttgatcccaagagtttgggaccaccctgggcaacacagtgagaccctgtctcatatatgtgtgtgtgtgtgtgtgtgtgtgtgtgtgtgtgtgtatgtgtgtatgtatgtatatatgtatgtatatatatgtgtgtgtgtgtgtatatatatatatatttttttttttaaaggaagaagaggaaatatgtgtatgtgaaactcaggatgaggtccctgaaatggtgcttatcgggtcagagggtgtgcatctgaggttaagctgggaaggcagggagcttttgttctccttctcattccgacagctgcaagccaagcactggtggccagtgctgcaggatagggcatcagctgcaggatatggcatgttggtcaaaatgctgttggcataagtgagaaaaataacaatactccaaaatatgtccccagttttataaaaatggacccaaattataaatgatacaagcaaatacagagagtaatggtcaaacccatttcactacattcaaaatgacttaattcttagaagttttggtgggagaatgtggtgtagagctctgcacaagcagacattgtgcttttggggcttcaacatgaccacccaatcactgatgggactgtttgaaatctgttttgttggctttggcatataatagccatctttggaaaactggtctctgtatggaatatggtcttgtgtcactgtataaaaatgagaacccaaaagaagctctcacatgattgggtcagaaaattgcccataactattgctaggaaagtttttgaaatctctgaattcaatgtaattgaatttctttagacacctagccctctaggttgaaggaaaaccagttttttaaacttatcgtatactttttttttcctgtactgtttgtgtgtggattgcattcatcatgctcctctaccccataatacttttgtatttcctaagaacaaagataggtagatggccttagttggtattcgtattatagcagtggcatccaagcacctctgcctttgtgtatgtgtgaaattgtcctaaagaatgcatttctggtgtattgacaggcctgagacaccccaacacaccttcacagtcctggagctagctttctccatcttggccccaggtatctaagaaagtcccaccactttgtgctacaaagattctctctctccccctcaggatgtcatttcagttgggtacctggcttataccatatgtgtttcattgtggctgttgaggaaagttgattaaactgggtgttcctgcctggagttgattaggatctggttcactcaaaagttgctgccttgggcttgtgatacaaacacaggtcaggcttattagcaagctctagcaggcatgtgtgcagtgagactgtggggttttgtccacagcaagctgttcttagccagtgctacagggaaagcgagagcagtagtgagcctggttgttagggttaaaataggagtcagaggacactggactctcctgcttcagccaggacatagttcatttatggaaatgcctagattaagtcttgtcggacttatgcaacagcttctgtcaggaaaggagtgagatgtgcccctgtgctggagggagtgtggcttagcagtggcacagctcccaaaacacattttagctgtcaatcagatttagcatgtactgagtctctattatgtattaggcaatagagacagcatttagacatactttgccttgttcatttttttttttttttttttgacagggtcttactctgttgcccaggctggaatgcagtgtcataatcatagctcactgcagccttgaactcctgggctccagccatcctcccacctcagcctcccaagtagctgggaccacaggcatgcaccaccacacctggctaattgttaaaaatttttgtagagataggatcttgttacatttcccaggctggtctcaaactcctgacctcaagcagtcctcccaccttggcctcccaaagtgctgggattacagacatgaaccactgtacctggcctgatttgctttttaacaatttcaggaaatgtgcagtggttaagagtgtgagttagaaagaactgggttcaaactccagccaggccatgtaagcgtggtgtgacctcaagcaggagaatagagggaaagggcatgggtttctggggacagatctgcctctgaatggctatgtcacttcatctctttaccttgtaggattttgtggggtaacatgagctgccgtggggaaatcacctgggccagcacttgatgtctaataagtgctcagtaactgttggctttgttgtcttgtattttcaaaactcagctttgtagttgagggaacggaggctcagggaagcctggagatatacctagggttacacttctgacaaatggcagagctggatctcacctataggtctttaggcctattttgtgtcttctacagagtcatgagtgtggcacagtccccaaaacacgttttttgtttgtttggtttgttttttgttttttgagacggcgtcttgctctgttgcccaggctggaatacagtggcgtgattttggctcactgcaacctctacctcccgggttcaagtgattctcctgcctcagcctcccgagtaggtgggactacaggcacctgccaccacacccggctaatttttgtatttttagtagagccagggtttcaccgtgtttgccagactggtctcaggtgatccacccacctcggcctcccaaagtgctgggattacaggcatgagccaccgcgcccagccccaaaacacattttaattgtcagtcagattcaggtgagcctgagttgtatccagtttctgtcttgggtagtctgaccataaacctggcgttcatttgtggcactagaggttatggtattcttcaggggaagaaaaggattggtaaggacttgggaactggatgaaaatttaataacaggctgggagtgaggagcctggagcagaaggtttatgagaaactggagccctgttgcccctgaaggtagaacagggatagtgggtagaagctctagaaaccattcctctagaaactgctcatatacaacaggggcggccccagagcatagttttgtttgttttatttttgagaggatcttgctctgtggcccaggctagggtgcagtggctccatcacagctccctgcagcctcgacctcccagaaccaagtgatcctttcacctcagcttcccgagtagctggactacaggcacatgccaccacacccagctaatttttgtagagatgaggtctcactgtgttgcccaggctggtctcaaactcctgggctcaagtgatcctcccaccttgacctcccaaagtgttgatattacagacatgagccaccacacctggcccatagttgttcttttctgagtgttcaagcagaggctgggtggccagttagcacttgaggaaaagaatgaatgagtataagatggcagctagccagacagaaatctgcagagacagcacatctttctacaataagggctgacccattctaaataaattatagttctctctcttcagaaggttcatacaataagctgctttttctgtaaatgtggtgcttgttgaggttgatgctggcagattggtatcaccctcccatgccaagctggtctcaccttcaggctccccatttgtccatcctgcagtctatccttgttgccacatttatctttcctgagtgctgccttaaccctattgatctttcctctatcgacaaacttgactgactcctttatctgaagtaacgaccccgtccagtgtcattattcgactgctctggtcctcacatcctgtaggctcctgcccaagtgcctgctcttttccttgtgcaagctcttgcctcataaccctccagtaatttcaggccctttttacaggccttgtggtaccacctccatttctcagtccctagtcactcaacctagagggttctgtctcaccttctagagtatgcactctggagggtcagaaccacatctggtatatacttgtgaccttcatggtgcctttgaaatctgagtgccaggcagtgcaggggaagacagtttggaccagcagtttgaagctgttttcgttagggtttagcaccttcaagagctcttcacatctttgctcagcaggcagtgcagcacagccagggctctgaagctaggccagctggttcgaatctggagttccctgcattccagctgtttgacctgggataactgctttggtttttttaacatgtaaagatgggagcactcggctgggcgcagtggctcacacctgtaatcccaacactttgggaggctgaagcgggcagatcacctgaggtcaggagttcgagaccagcctgtccaacctggtgaaaccccacctctactaaaaatacaaaattagccgggcatggtggcgcatgcctgtaatcccagctactcaggaggctgaggcaggagaatcgcttgaacccgggaggcagaggtcacggttagccgagattgcaccattgcacttcagcctgggcaacaagagtgaaactccatctcaaaaaaaaaagggggggagcactcatacccacgctgaaggtgttgtgaggactgtttaggtaaagtgctcagtgcagtccctggtgtacacagttagtaccgatgattgctgggtaattcaccagctttgtcacaatgtcagtctgcttttctggacttccccctcccaccagtcaaggccctccccaccgctggtgctgttgaccgttaacttattagctggtgatttccttccagatgtccaacatcacagtcacatacagagatggccgagtggcacagctggagcaggtatacatccgtggcagcaaaatccgctttctgattttgcctgacatgctgaagaacgcacccatgttaaagagcatgaaaaataaaaaccaaggctcaggggctggccgaggaaaagctgctattctcaaggcccaaggtaggtgcttttcatgcacaggttttaaaatataggtttgtcttgtgtcttgtagaaaggggccctattactgcctggagacagagagggtttgacctctgctctctccacacccaccacccactgccaccccttccccttgcagcgtggagtgatcctgtgaggccattattttatttttttgagacagagtctcgctttgtcacccaggctggagtgcgatggtgtgatctcagctcactgcaacctctgcctcccaggttcaagcaattctcctgcctcagcctttcaagtagctgagattacagtgcgcactgccctgcctagctaatttttttatttttaatttatttttatttttattttatttttaattttttttaatttttttatttttttgagatggagtctcgctctgtcgcccaggctggagtgcagtggcgtgatctcggctcactgcaacctccgcctcccgggttcaagcagttctctgcctcagactcctaagtagctgggattacaggcacccgccactgcgccgggctactttttgtatttttagtagaaacggggtttcaccaccttggctaggctggtcttgaactcatgaccttgtgatccacctgcctcagcctcccaaagtgctgggattacaggcgtgagccactgcgcccggcttatttttattttatttatttatttttgtatttttagtagagatgggatttcaccatgttggtcaggctggtcttgaagtcctgacctcacatgatccacctgcctcggccccctgaaatgctgggattaccagtgtgagccaccgcacctggagaggcccatcttttctagaagttctgtgtgagaggtgtgggatcgcttgcccttgtctagtttgccgagcagacacagcccggagcagatgagctgactcgagtgtgagggcagcatttcctagcgagactgggtcttatggatggacaccagcatgtacttagggaggtctgatagtggagctccgttttcagaaataaagccaccttttagtacattccaaaagtgggactgtccttttcgcagtcccctagtctggtcttgcttcttggttagcctaatttggttttatatttaggttcatgaaagttctgtcatgttgattagacaacaaagtaattgtggcccttggaaactgtcttagtgttggtaaaaaaggtttgcagccaaggaaggcactggattcttcattggtatctttagctgctgtacatgttttatatgtgtgtgaggaaaaaagtcaaactgtgtttttcctctgctctcacaacacaacaatcaacaaagacttctgtgaccaagcaagcagtcagttctgcagtagacaccagctgggtgtccttcagttctgacactatctacctggagatagcctgaaaaaccacaggttgagggctcggtcccacaagacagcccctgcaccccccactattattcataagcacaggcctccagaacatctgaatggcttcaagccagggttctcacgtctcactccttgggttcgattaatttgctggagtagctcacacaactcgggaatcacatacttaaatttactggtttataacaggatattttataggctacaaataaacagccacatgaagagatgcatagggtgagatctggaagggtcgcaagcacaagagcttctagccccatggagtttcctcccggcacatggatgagttcttgttcaccttcctgtcaggctgcgcatgatcagctgtcccgaagctcccctaaccctgccctcttgggccttttatggagactttattggatagtcatgattaaaggatggacaaccatgtggaaatgccattagacaaaatgggtgtgatctaacactaatagacggggttgggaaaccccgcgaggcctgtccagattctttttggcctctctctgcagcatttgttcctccagggtatagggcaggacctttctctggagtgaggtcttatgacccacaatcagattagggtcctgccttgggcaggtgaaaggagggcaggagaagtttcaagagagagattctgtctcctgagtcctgcttctgaggcctaaagtgccccaatgttataacaaaagactataacaaggactataggagttacgagctgggaaccatagatgaaagctcaagtttaaagatgtaatagtgtgaggggccgggcgcagtggcccatgcctgtaatcctagcactttgggaggccgaggtgggcagatcacgaggtcaggagttcgagaccagcctggccaacacagtgaaaccccgtctctactaaaaatacaaaaattagctgggcatggtggcaggtccctgtagtcccagctactcgggaggctgaggcaggagaatcgcttgaacccaggaggtggaggttgcagtgagccgaaatcgtgccactgcactccagcctaggtgacagagctagactccatctcaaaaaaaaagaatattttatttgttcttcaaagcctgtcttctcctagaacccctgggttacagaggagaacagcagtcttatcatgctatttatatggagtgtgttttctttttgctactatgaaataattctttttttttttttttttttttggagactgagtctccatcacccaggctgcagtgcggtggcttgatctcagctcactgccacctcctccaactcccaggttcaagtgattctcttgcctcagcctcccaagtaactgggattacaggcgcataccaccacgtgcagctaatttttgtgtgttcagtagagaaggggttttgccatgttggccagtctggtctcaaacttatgacctcaagtgatctgcctgccttggactcgcaaagccctggggttacagacatgagccactgcacccagcctgaaataattattttctcagaaaaaaatacaaaagataatataacccttctcccagatctaacacatgttaacacttaactatatttgtttcagaattgaaaaaattaattcagtgcatctataatgtttttcagctcacccaaggccagccccaaggatttgtcttttctgtagctctcagaccaccttctttgccctcagcatgctgcctcccagcctcttgtagagagcagtgtgggactggaaggcaagagtgtgctgctagctcctgctttgatgccagtccccagcccctgcccctccgtctccatcccccctgttaaatgcagtggctgtcagctggacgtgttggcttatgcttgtaatcctgacactttgggaggccgaggtgggtggatcacctgaggtcaggagtttaagaccagcctggccaacatggtgaaaccctgtctctactaaaaatacaggaaattagccgggcgttgtggttcacggctgtagtcccagctactcaagtaggaggctgagacatgagaatcgcctaatcccaggaggtggagattgcagtgagccgagatcatgccactgcactccagcctgggtgacagagtgggactccgtctcaaaaaataaaaaaaaaaaaaggcgggaggtggaaatgcaatggccagggtggtgttggaccaggtaacccttcagaacccttctaactggtgtcctagggccctggctactctgtgctatgagcattcaccgaccacactgacctggcctcatattttctcttccctttcagtggccgcaagaggaagaggacgtggaatgggacgtggaaacatctttcaaaagcgaagataattttctaagttgaacagaactttgtccttttttctttcaggttatctgagttcattggagtgggtgcttgtgcatatatgctaggtatcttttgccatctttctctttagatcaggggaaatgtttaagctaaataaatctggggggttttttgttctgttttgttttgttttctttgagaaaataaggactttgtgttcatttgaagtttgctttggctaaattttgacaccctgggggatgtcctgggagaatgccagtactttgaaatagcacagctattgatgagattttaagctgctgttcctggccagttgcaggttaagccccagaaaagttcaccttggagaagctccgagaacacacagattgtgtctcattcatcttcagacacaggcacatagtgtggcactttgttcagttaacatttgtggagctgtcatcagctcagctttaacaacacaggtgactctttcccttgataaagtcataggtaattcaggggctgggtgcggcggctcacgcatgtaatcccagcactttgggaggccaaggcgggcggatcacgaggtcaggagttcgagaccagcctggccaatatggtgaaacctcgtgtgtactaaaaataaaaaaattagccgggtgcggtggcatgtacctgtagtcccagctactcgggaggctgaggcagaagattcgcttgaacccaggaggtggacattgcagtgagcagagatcatgccactgtactccagcttgggtgacagagcgagactgcacctcaaaaaaaaaaaagtaattcaggggatcctagtggccagcttccttggctcgtatactggctacaacaagtagttttgtggtgatttgtggaaacagattcttgggagcatatcagagcatctcagcattgattggcacatccatagttgttaatgtaggaagggtgaccagcagctcagcacagtggcttgcttccagcactctgggaggctgaggtagaggattgtttgagaggagttcaaaaccagcccgcgagacatagtgagaccctgtctctacaaaaaattctaaaaattaacttggcatggtggtgcacacctgtagtcctcgctactagggaggctgaggtgggaggatcacttgagcctgggagtatgaggctgcagtgagctatgaccttgccactgtactccagcctgggcaaaagagcaagactttgtctttaaagaaaaataagtagtagtaaagagtataagatacacagggtgaataattgtgacaaaaacacagaaactggaaaagcagcctgaaaaaatcaaatcaccaaaaagaggtcttgccaggtattcattatggtatgagctacagcataagccatcaagaggaaaactgatcaattattggcttttagaatattgctcattgaacagattattcaagtaatgaaagaggaggggaaaaaaatccagcacattagttaacctggcatcaattaatgaggttctaataagctttgtcttatgatactacctggaggttacagagctggtattctgaggaataagcatcagtgagttggtcagatacaatagacgtttaaaatagggcttcaggccaaacatggtgccccacgcctataatgccagcactttgggaggtcgaggcgggaggatcacttgaacctaggagtttgagactagcctgggctgttaagctttgttaaccaagaccgcatctctacaaaaaattgaaaagtagctgggcacagctgatgcctgcagtcccagctatcctggaggttgaggcaggacgaccacatgagcccaggagattaaggctgcagtgagctataattgcaccactgcactccagcctggatgacagtgagaccctgtctcttaaataaaaaacaaatgaaagcagtggttttcaacatcaactaaggatcttattagaaatgaagactgcaagccgcacacctggagtggggcccaggaatctgcattttaaacaattccctggtccccagataagtaattcttaagtattctatcttaagtagacctaaagccgtattttgaccctgtactagtatgttattttagtataatcattactgaattcatcatacttttacagtaaacagtacttactttgaataataacacattacacttaatagtagtgaactgcatcctcgatatcaaaagcgacttttgatgtagttcactctggacccgtacaggaacaccagccttgcagattctccacgcaatggaaactggctataaccctacctagatctgaaaagtgaagggggatcaacctaaaatatgtagctttgtaaacagttttatatcctgcatcttaggggggaaaatcagttgacgcagattgaaaacaagttgttccataaggtttattatgaaaaacagtagccctcctaccctgcctttaccccactttccttgcctcacagtagtctgtccaactcttggctgatttgtttgtatttacctccatgtctcaatatgaacatgttttcatgactattccttgatggttttttgtttgcttgttttaagacggtctcactcttccccaggcgggagtgcaatggcacaatcatggctcactgcagcctcaaccttctcgggctcaggtgattctcccacctcagcctcctgagtagctagaaatactggtgcacaccaccatgcctagctaatttttgtattttttgtagagacagggttttgccatgttgcccaagctggtcttgaactccggggctcaagtgatctgcccgcctcggcctgctgggattataggtgtgagccactgcacccggccaccattatcttttgaatcctctcttcctcctgcccaccatgaatttacttcctctcacccatctccctgatattgtaattctggttagatcatattcagtgtcaaattattaagatgtgattaaactttttaaaaatatgacagtgtcatagtgatcacagctgagtcatacaatagactagattactgtggaacttttccctgaaagtaatcctcttgcatttttatttgcttggttttctatttgtcactaattcaaccccaatcatatctgaagatcatgacatcatttatcagttattattcttgacccaccccaatctggactggtttctccccgtgcttggtgtgtcactgtcaccctgggcactccccacactgctcctctgttggatctctgttttctgtgtaacctcttcttttatcaccttattttgggggagtatctgcatgtctaaaaatgtgctcacacttgatttgattgggtatgaaattctatgttggaattagtgccgggcgcagtggctcattcctgtaatcccagcactttgggaggccgaggtgggtggatcacacagtcaggagatcgagaccatcctggctaacacgctgaaaccccgtctctactaaaaatacaaaaaaattagctgggcgtggtggcgggcacctgtggtcccagctactcgggaggctgaggcaggagaatggcatgaacccgggaggtggagcctgcagtgagccgagattgcaccactgcactccagcctgggtgacagagtgagactccgtctcaaaaaaaaaaaaaaaaaaaaaaaaaaggaattagtatccttcagaattttgaagttatggctactttgtcatctagcattgctgtagagaagtctgaagtgattttgagtccagatctttttttttttttttgagacggagtctcgctctgtctcccaggctggagtgcagtggtgcgatctcggcttactgcaagctccgcctcacaggttcatgccattctcctgcctcagcctcccgagtagctgggaccacaggcgcccgccaccacgcccagctaatttttttgtatttttagtagagacggggtttcagcgtgttagccaggatggtctcgatctcctgactgtgtgatccacccacctcggcctcccaaagtgctgggattacaggcgtgagccaccgcacccggccagagtccagatcctttttatatgacttttttttttttcccttctgttatcagtgttccaaaatttcagaatgacgtattaatacctgccttggcgaaggtctgtttccatgccaggcccctttccgagtgaactcttgtccttaatttctgggaaactttcttgaattcattctcagtgattttcttccttaggttgtctgtggtttttctttttctttttttttttaaagactgagtttcacgcttgttgcccaggctggagtgaaatggtgccatctcggctcactgcaacctttgcctccggtgttcaagcaattctcctgcctcagcctcccaagtaactgggattacaggcacctgccccaacacccggctaattttttgtatttttagtagaggcagattttcaccatgttggtcaggctggtctcaaactcgtgacctcgggtgatccacctgccttggcctcccaaagtgctgggattacaggcgtgagccaccaggcccggctgtctgtggtttttctttctggaatttctgttactcagatggtggacccagaattacctctcctccctgtgtgccccaaccccaattttcttttcttttgatcataatttatggaggattactccaagttgattctctgattgttcctttatatacgtagatatatagggacagtaccttgttccttgttgcaacatctttgaggatattaatatgctctgtagaagctttcatctccctgcatatgtctttctgctttctgttcttcaatttaatctttcatgttacagactttctttagctgcctggcaatcgttggtaatcttgcttatatttaagagtggagtattaaaaagaatatgtgattgtaaggtgatctcattgagcttctttggggaaatccccagtgtccatacttctagaactttgctccaggctggacaggttctcttggagaaacttttggtttcacatcaggagggtttactctgagctgctggattgagagctctgttggggaagagggtgagaatttcagcattctagtatgtccacattcagttccttcatccaggtctctgggagggctcctagtccagaaaccttctaaccccctctggagaataagcttccaacttttttgccaagattggggaagtcaggtcatgtggaaatatgaatgtttcagcatgcttttgctttttttctttgaaaatatattactttaaaatgaagaataagactgggggtggtggcttatgcctgtaatcccagcactttgggaggctgaggtgggcagatcacctgaagtcaggcattcaagaccagcctggccaacatgacaaaaccgtgtctctactaaaaatacaaaaattagctgggtgtggtggcacatgcctgtaatctcagttactggggaggctgaggcaggagaatcgcttgaacccaggaggtggaggttgcattgagctgagatcgcaccactgcacaccagcctgggcaacagagcgggactctgtctcaaaaagaaaaaaaaaagaataactcagatttaaagaagatatagactaaaggatgatgtcataaaggtaattagaccagtatttaacatgaattctgagcaggacacggtggctcacgcctgtaatcccagcactttgggaggccgaggcaggtggatcacgaggtcaggagttcgagaccagcctggccaagatggtgaaaccccatctctactaaaaatacaaaaattagccaggtgttggggcgggtgcctgtaatcccagctactcaggaggctgaggcagagaattgctttaacccaggaggcggagcttacagtgagccgagattgtgccactgcactccagcctgggtgacagagcaagactccatctcaaaaagaaaaagaaaaaccaaaaacatgaattctggttctgagtgccaccgtgaccacctctcccagcctctggttggttatctgtacaagggtggatgtggactcacttgattcactgatactatcccagcttctacactggtagaaccataaccttaaaaaacaatcaaagcatacaggagtttttctgccactagccaagatgaaagtaattgatttatcattgtgtctgaaaaaacacacacaaaataatatgaaacaatggttttcaagacatcagacattgaaggagactaatccctgagaaacgagaaataaataaggggagttgtacaattgccccagctcactgcttacaagagtctccaagctgtggcacagggaaggggactgaagctgacctaccagcctgcctgcattgagaaacgagagctaagagttcagagaagccaccaaggcagctaggactataggacagaatgtcaagagaagaaagccacacagagaacccaagagatctgcagcgggttgcttttgaacattcagcagaatactgatgagcacaccgatgtgaggaagttaacaggctggggaagacccataaagaattggaacagtgcttggcgtcatgctaggctgagactaaacattttcctatcagtcagacaagaaattcacaggatatggagtacagtgttgttttaagatgtaccatatctgattttgttttaatcaggtatggtaagacccagagacagctgccttgaaagaatgtattacagttctcaaagaagggggcaaaccacgttacgtgggccatatggggagacaccagcctgagtcaggaggcagaaggagcaatggcagagcaagacccagagccttcattgtagttttctcatgaaggaatgagtgaggcagagtaggcaagtttgagcaagtttaggattggatagtctgaataattttcaactgggttataagtggtctctgtaaagtaccttgccctgaggtgattgagggtaaaggaaatactggcttagtgtatgagagttagataaaggaggcagttttgggtgtggactttggattgtttggtttgtacatgaaagacacgctgccagcaagttgtttactatctctaggaattagctaaccctgggaggagcatccttcaggattagcaaggcccaagataccaaagcatcataaaacagaaaacaaaaggcatgattaatacaaatatccaggaaggccttgcctggtaaatgaggaataattagcccaagactgagcgctggacctgaataacaagtcataaaaacaacacattaaaacatgaaactgtttttccggaccaattaaatatatccaagaataagactcaaaaagatttataggaatataaaaatgtccagtaccccacacagtaaaattcactgtctggctccagtcagagattgctaggcatgcaaagatgcaggaaagcacagcacataatgagattaagagatccaaaactacacagatgttagaattagcaaagaaggacattaaaagttataactgtgtatttcaaaagctgagcagattttaaaagaagactccctgatttcaagaattactatagagctgtactcatcaaaacagcatggtatttcatcaagttaagcaaatagatcaaaggaacagagtctgaaaacaaatccacacatgtatacaaaatgagttttttcaaagccacaaaggtaatgcactggagaaaggatagcattttcaacaaatggtgccagaacaattggatatctgtatggaaaaatccctcaaaacttgggtctatacctcatgccatacaaaaaaattaattccaaatggatcatccacttaaaactataaaacttctagaagaaatgtaaccctaaaccttgggttaagcaaaaattcagatataataccaaaagtactatccatgaaagaccaaactaatatattagaccaccaaaataaaaaactgctttccaatgacactgttaaaagactaaccacgaaattttggcaaagctaagtctaataaaaaatgtgtatccagaatatataaagaatttgtggccaggcaccgtggctcacgcctgtaatcccagcactttgggaggccgaggccagatcacctgaggtcaggagctcgagaccagcaacatggagaaaccccgtttctagtaaaaatacaaaattagcccagtgtggtggcacatacctgtaaccccagctactcaggaaggctgaggcaggagaatcgcttgaacccaggaggcggaggttgcggtgagccgagatcgtgccattgcactccagcctgggcaacaagagcaaaactctgtctcaaaaaataaagaatttgcaaagctcaataataagacatggggaaaaaatttgaacagacttgagaagatacagatggcaaacatgcacattaaaacatgttcaacatcattagtcattagggaaatgcccaagttaaagccagagagatattgctacacacccagaagaatggctaatgtttaaaaaactcaccatgctatgtgctgttgaatatgtaaagcaacaagaactcccaaacactgctgatggggatgtaaaactgcaccaccactttggaaaacagtttgacagtttcttaagacattaaaaatacatctaccttatgatccccacattccattcctaggtatttacccaagagaaaaggaaatatatgtccatgcaaaaacttatacatgaattttcatagcagctttatttgtaatagccaaaaactggaaacaactcaaacatccatcaacagatgaatggataaattgtggcacaccgtccagtgcaatactcggcaataaaaaggaactactggtacacgtgagtgagtctctaaataattgtgctaagtgaaaagccatatagaagagagtacatccggctgggtgtggtggctcatgcctgtaatcccagcactttgggaggctgaggcaggcagatcacttgagatcaggagttcaagaccaacctggccaacatggtgaaaccccatctctactaaaaatacaaaaattagctgggcatggtggcatgctcctgtagtcccagatacctgggaggctgaggcaggataactgcttgaatctgggagggggaggttgcagtgagctgagactgcactccagtatgggtgacaaagtgagacttcacctaaaaaaaaaaaaaaaaaagtatatcctatatgattccatatatccccaaatctcacaaatgcaaactgtaaaaaacaaagcaaatcaatggttgcttttggatgtcagtgggcatggagaggcgggagggagggattaccaagaggcatgacaaaactttcggggtgacaggtacatttactatcttgattgtgatagtggcttcatagatgtatacatgtgcaaaatgtatcatattgcacattttaatcttgtgtagtgctcggaatgtctactttttgtgtttcaattatacctcaatgaagggttattttaaaaaataaaatatttttaaaaaacaagccgagcgcaatggctcatgcctgtaatcccagcactttgggaagccaaggcgggcagatcacaaggtcaggagttcaagaccggcctggctaatatggtgaaaccctgtctctactaaaaatacaaaaattagccaggcatgatagcagtctcctgtagtcccagctactcgggatcctgaggcaggagaatgccttgaacctggtggggcagaggttgcagtgagccaagatcatgccactgcactccagcctgggtgacagagtgagactctgtctcaaaaaaaaaaaaaaaaaaaaaaaaagttgtgcatagttggaaaagaaaatactagatttcatgggtgattggcaactagctctaagtggaacaagtgcattttcctttccttccaggtcccagagaaaaacctccatgctgggttgatagcagcagctaggatcagttgcccaagactctggattctcgagatgaagaccgtcagcagaggctgatctctcctgtgggctcatgtcctaaagcaccttatttgggctcaaatatcctcccttttaggacagaaaagaagttcccgagtcttggtcatgttgggcctgtggagcacatcatcttttctacgtgtttccttttgatgttctcagcatccctgcaagatgttctcagcatccctgcaaggcaggctaaggcatgaggagctataggcccagggagctgaaggcagattctaagagctgggtgtggatgctgcacccctgagcctgggccgcctgggttttgctcagtctgggaagtacttccaaacccactctttgctagtcttttacaatcctgcgggagggcaaagcccagatcatcatggctgcttccaccatgtagctgcagatcaggaaactgaggtccagggaggtccttactggctttgctccagggacaacgaggcttgaggtctgttccccacaggaggaccatgatggttctcctgcttcaaatggcccctttggaaggggcttgctcatttaggtgaatcctggggccgagcagccccagtgatagtccctgggatggctgtaggagagggagcagcatgcaggcgttaacgtcacagactggcaccaggccacccgggcttacactctggctcctccagttcctggctctttgaacttggacaagtaatcccctttctttattttttgtttttttgagacagtctcgctccgtcacccaggctggagtgcaatggcacaatctcggctcactgcaacctctgcccaccaggttcaagcaattctcctgcctcagcctcccaagtagctgggattacaggcacccaccaccacgcctgactaattttttttttttttttttagtagagatggggttttgccatgttggccagcctggtcttgaacttctgacctccacccgcctcggcctcccaaagtgctgggactacaggcatgagccacgccgcctggccaacaagtccccttaacctctttctgcctcagtcgactcacctggaaaacagagcacctacctccttcaaatgagaagagaagtaaaggagtataaggccatcagaacagtacctggcccaagggaggctatggaagtgcttgttgaataaaaaaatggcttcatctctggcctagccccaaaggtttgagttcctgccattgccacccagacagccctgggtggaggccctgctgacattgaagagtgcctgccctcctcccctcaatgcggtagacactttccaaaacttacgtcatcctcactctcactccagtgggataatgggaggcttggtgtacctcattcccaagatgagggaacaggctctgagaggaccacatcgccagcaagtgacaggctgggaccaaggccaggcctgtctgcctcctagactaggcctgagtgaggaccggcctgagtacggcccacctgcttcctcctccgtttagagcttgggctggagctgtcctggccagtgctctctgcctcaccaggctgcatgagccacaagctgccacttgtggagctcggtggccctgccctcgacagccttgctggtggtcgtgaaggctctaaacacctgcatggcaatgaggccaaccttctccgcttgatccgtttcaggctctggctccgctactgcatcgtgtgcttctgtccaagaggcagagagactgaaactatctgctgccgcctggattctcccagagattgcctggaacaccagctcgggtcctcgcacaccatcctggtaggaatctctcagtgacaattgagagtttgtgggctggcttagggccagtggtgggcagggagtcagcagggcgcaagggactggagagcttggcatttctccaacaggagtttcagggagagctcagaggcctgcttatgtgacaggtttatcagcttgcctggcccagggccggctctcataccgttttgatttaaataatagattgctcacagaataaatgtatgttggtttaagctttcactttctcataatcctctctgctggcccctcccaccatctaccccattttgcctcactctggggagcctgaacaccctgttccagagtaggggcatagggaaacacttctatggcttctgagctgctgggcagggccagtccctaaaacaaggagagctgggagggagctggaccccaggatggagtgctgagagctgaaagtcctatttaacagaggggagggagcagagatcccaaaaagggaaaggcctggccaggtcccacagcaagtcaggagcagagcgggcctgaactgtgagatctccaatctctccaaagcctttgggtaagaagtccgcctaaagcagtgagatcagtggggtctgaggaaaatccttttcctcactgcctccatcccagtcctgggacccaacaccatcctgtcctcaccctccttggccatctccttttgccctgagaagctgttatgcatccagccagactgggaatgtgctggaatccatgcaccacaggggatggatgcgccgcttacagtccctgtgggccatggctgtgagggaaagtcagagctggtggctggggtgtgtaggcccaggaggacccctgcctcctccttagccttggagcccccctctgctgctgagtctttcctcatctagcagggccccactgcccccagaccttacctcctggcttagcacatgacttccccactctgggcctcagtatccccccggacatctctaaattcctttcccgcctgccctgcctgtcttctggttgggctgaactgtaactccccacacagggctgagggtgactgtggcattaggcttctggctgggagcccaccctgatggtgcttggggaggaagggagacacttccccctgccaagggcagccctaggactactctgcccccaaggccccctgctgctggtgatgcgcacctccacccgctgcatgctctcccacacggggactcccacacggggacccccagggcctggagggaacacacaagcactttgtctctggcttgctgtctcctaaccccacagagctgcccctcgccaagtacaagaggcctggggctgggtcctgagggtggcaagcagcactgtaccctgtgggaggcaggcaccaagtcctctcacttagtcggctgtggcccctgcctctggtctgtgcagccttgtcccctgcccagagggctgtggtggtgaggctggcagcctgggctcagacgtgagcttgctgtggggctccatgtagagctttgctcctcctggggctcccgacccgctccttcgcagctccccttctcaaggagcccaagccctgcccagatgtgagggcccgctccctggaggcctcctctaactctccagcccacagggatggacccaggacccccacatcttagactccatgggggacttgcccaaagagcacctgggggaaggtcagtgtgacctttgtcccacccttttggatagacacagccaccctttctccccaccccagcagcagggctgttgctcagtgaccctgaggttggtgatgcagaaaagcagaggcgggtgtcactctttattgcggggtccacactgtgggtgctggggcccctcccactgagggaaggctgagcctctagccagggctggccacctggccacctatgagtccattcttctgtccccttaatctcaggctgagcatttacactggatttctgggggcctgtgagtcctccttgaccttcatcgcccactatcatgtgcttgagagcatcacaagtcagtagcaatgagccaggtgggtggtgggtcacctggcacagcaggcctggggctcgggtcccagcccagcagctgtggagtcccaggtggaggcaggggtggtggccccggccgcactgccctcaggctcaaggtccaggccctcgtagatggtggggagtgaggtgcgctggctcagccgccggcgcaggccgaccagcaggggctggggcagggaagccacatccacgttgttgcccaggtccacccaagccaaagcagggaacttggtggtgtccttgatggcatcagtgagcttgcgggcagtggcccgcgtcagtcggttgccgttgagcaggagctgggtgaggcggggcagcgcccacaggctgggcagcaggaggtgcagcagctcatcactcagccccgtgaagctcaggtccagcaccgccagcacagcaccatggctgctcaggtagcgtgtgatgtgttgcacgtcctgtgtcgacagcgggatgcctgagaggtccacagtctcccctgccagcagagtcttctggaggctgctcttgaggctatgggagagtggcaggtggggatggactaggcaaccaggcagtccccccactgaccacagacagtgacctgtcgggaacagcccaggcctacagtctggcaaagccagattcaaactgtgtctttcgtattttttgagacaaagtttcgctctttttgtccaggctggagtgcagtggcacaatctcggcttacggcaacctctgcctcccggattcaagcgattctcctgcttcagcctcccaagtagctgggattaaaggcatgtgccaccacgcctggctaattttgtatttttagtagaggcggggtttctccatctttgtcaggctggtctcgaactcctgacctcaggtgatctgaccgcctcagcctcccaaagtgctgggattacaggcgtgagccactgcgcccgggcccaaactgtcactttctaagtgggtggccatgggcaatgctcagaggctcagtttcccctttggtgaaaatgggacgtggttgttgtgaggattaaatgcacacacagtaaggctctttcttcatgaactattatttgaaatctcactgtgtgcccagcatcccacacctgttttattgacatctcacttatttttcagataggtgaagtaactcttccatggccacacaccactaagcggggaaccaggtcctcaaactgagatgctctgactcttgagcccacatgtttttttccctgtgccccttctgatgtcgattcttttagggtagggagaaattctcctacaaagggacggctattaggctgtacagggcaccggggatagagagggacaggcccacagtagtgaaaggggaggtcctgggtgtgcaggctgggggccggccatgagggagggctccccgtgttttctcagttagaagggaagttcagagactgagaaggacccccgcccccaccaaccctctaggtctctccccagttatctgaacagagcccactaggcagacaggccttttgggggactgacagcagtgagcacaccctcaggacccccaccagccatggcagggaacaaccttgtggggtccaagctcagcgtggcctattaggcccaaggtgggacaggggtggagggcagacaggggaggcctgctagggtaagctcccggcagcagttcaggcctctgggcctgggtgcctgtggccagctctggactgagcctgtgtgtgaggctccatggatggagtcactccaggatggagtgtctgagagggacccatggcagagggagctattgggcagccacggaagcctcagttttaggcagcctggcagtggcaaagaattcccaacaaggtacaggaaaatcagggtagagtgtggccttaggcaagccacttctccgaacctgtttccttccctctaaaatgagaatcgcgatccagaatctgcctcccccgcaacctgttgggaagtctcagctgaagatgcctactgaggtcaccttggctgttgggtggaggggtggggtgtccaggccgtgtaacagaccagggattgagggatgtatgaatggcaggaggcaggaccgtcctgtgggaaatgccaaacgggtcactcagagggtgcagcttggcttggggagcatctgctaccacgggccaggctgacttccagggtagggccctcatgcggaccaggtgagggcctcaccaggtgggatttcagcaccagcctcttggtgagagtgcaggtgtcaacctgagaagggaccttggagcagcagtgaggaggggcagtggctgggctacccttaccagctctgggtcttcctctggcgcaggctggacccttgctgctgcttcgagtgaggggtgaggtggtagatgagctgtcggcagatcttgtccgaggacttccagagctcatagtcctgtgggagggcagtgtcaccatggtgaatctgagcccctcctgcccacctcagggccttggggagagggacccaggcagccaagtgtgtgtgtgagcacagtcatgcaccatgcatcaccgagttgcccaccagggcctccccctcctaccccccaacccggctgtggcctggcacagagccaggggaggctgccctctgggagctggacaggctggtccagtcccgcagtgcccggcgggaggaagcccagacaatgagcccttgttccctgtcctcgggcccagggccagcgtctcgggctatcagccggctgcctgcccaccctcagcacccttcggggacttgccacagggggaggaggccagaccaggcccctcgagggagccgtgctccactgacgccaatcccagggagtaggaacaagccaggtcagcgtgttcttcttcctctcactctccaagcgagactgcgcctgcggggtctgggtctgggctgacagggctgggggatgtaatgttttacagcaccaccacctggctctctctcagtcctaactgggctccggcagaggcccagctcagggtggaatccgaggtgcgcggcccacaaagctggcactgagcatgctccactgcatcctttatccagtccctctgtgagcagccccaggagcaggcagcacacacagcagctgcaagccctggctgttcctgtgatggccgtgggctaggcgcagagtcctaggggccgactgtgcagagacctgggcattcagagctggcagggcccagagcggataccctggttttggttggggactcactgtgactaggagtctgggtccggtggctggtcacagccacacatcctggggctgtgtcgatgctcatggcaggacatctgcaggtgctgtcagcatggggttctgggcagctgtggggtggaggctgcaggtggcaaactccaccccagcaaggaggagggccttgcttatgaccccagctgttgtaggggaaagcagtgagcacccgtccgcaagggtgtctgtacaggatggagacctgcggacagacgggggctctagccgagagcggctctcttctggcccaggaattcagaggctaggagtttgtttccgttggtggatttctcagaacagtctgtgacccgcagggtccccatatgacttctgcccagctatagtcttcctggtctgggcccccaggcctggtgcacagtgctgccacacagaaaatgggtctgcccaggactctgagggtcctgcaaagcacagctcacacttgctctagctggtggccagcctaatatactgatgctggcagcaggtctcagacagggacagtgacttgcctaaggccacacagcaagccgcagaaggacctagcctcccagtccccagccctgggctctgttggcccccctgtccaccacagtgcccagcccagggcccgtgcctgccagcctcaccttcttggggcactgcaggtcccgggccaggttcacaagcaggtcatgggagatggggtcgaccgggttgaggaaggccacatctctgtagaggatatcaggaaggagggtcctctcaaggcccaggtcctgtgagtggtgaagagagagttgagtgagcccgttgggtctcccatctcgaggcaccaccccagccagccagatgctgcttatgcccgttcctgtctctccatctcctccctaaggctggctggattctccccacaggcggccatgggccaacagtccagtggcgggtggcccccttctttttttgcttatttattttttgagacagggtctcaccctgtcacccaggctggagtgcagtggcgtgatctcagttcagtgtaacatctgcctcctcaaggaatcctcccacttcagcctcctgaggagctggggctatagacaggcaccactatgctcagctaattaaaaaaaaaatgttttgtagaaatggggtctcactatgttgcccagactggtctcaaactcctgggctcaagcgatcctcccaaagtgctgggattacaggtgtgagccactcagccttggaggaccctttggataagtagaggggagggacatgggagccctcagggaagtggtaagtgaatcccagaacccttagaccagttcccttgaggtagtgttgtgctgtgacactgccttctctggggttaggacttgtcagtgggattctttggggtctttcgtcttatggtgggggggtttgctcttcttatgacccctcaaattcccctgtcccccagtgttcccttcagatcctctgccttcccacctatcccttggttttcctaagctgcggccagcatctgtttgcggacaggtatggatccttcccttgggggcggacctctctctcagatgtctcaaaggcatgccaccctgaagccagcctcaccacccatgccccagctcagtatagggcacctccatgaccatcttcccaggcactggggccagaagctctggaaccccccagcactcttccgtcctcctctctcccccagctcacctagtcatcccttctctctccccaccactcctgccaagattcaggcctccagcctcctctcctacccatccctcaccccaccgcctgcatagacctgccctggccttcctgcctcactcctccactttctcctcctgtctactcccacaggactggtgtggggctgaatactctttcagagggtctctttgttttgagacggagttttgctcttgttgcccgggctggggcgcagtggtgcgaggtcagctcaccgcaacctccgcctcccgggttcaagcaattctcctgcctcagcctcctgagtagctgggattgcaggcatgtgccaccacgcccagctaattttgtatttttagcagggaaggggtttctccatgttggtcaggctggtctcgaattcccgacttcaggtgatctgcctgcctcagcctcccaaagtgctgggattataggcgtgagccactgcatctggcccagagggtctctttagaggacattttgagagctgatggggcagccacagccaggaggggcctctagaccccatgtgggccttctccaatccataggtgatatgctctgtgcgtgggtcccaagcacaggaagttgggccaggcaggggaggccgtgggtcacagctgcagggtccctgcaggttatggagcaggataggccccggctggacctcaaatcccaacctctgagacacaaagaggtggtctctgaggatccttctttccctctagtttcccagctaaaatgcccaactggtgtcttggactccaggcagcatcccagactgagatctgtgcctctggttgtctggctgattcagtgctgctctgctgtttgccacagatgccagctagggaagatccaggaggaaggctggctgatgagcctggcagacccagacagggccccagaccgcaacctgccagcctgccttccatgggtctagacagctcctcttaaacggacagctccatttttccagcctgctgaatccagagttggaggaggtggagaagggaagggaggaagaagggctctggccctggcttgccccacattttctctgtgggccctggggtgaccacttcgctccatgcctcagtttccccatttctaatctaccttctgcaggccgaacacctgcatggctgacttcctgctcacaggatggggcaggtagtggtggtagctgctgtagggggtggggacggggtggtgagggaagtggcatgcccaggtgattggggggaccagcatcctgggacaacccaggggttgggatctgggtttagtgtacctggtgtgtgtaggagcagagccaccaccggaccgagtgttgtgatgcacagatgctggggatgtgtactctaagggcatgagccgcctgttggagaactggtgatgcatggatggctctctgtgggctgccatggtgtcttggggtgaggctgcatccctagaccagccctgggtcctctctccagggtccactgtctcccggatcctggaggagggggaagttaccctcttccattgtctctcaatacaagatgatttgacctcacttgccactcctcccgggcccctcccatcttgccagggcctgaatttgggctcttaggtccaggctaccgggccaccctcaacacacacaacccctctcaaaccccaaagacccggacacactcagcagccccctcctccacacggtccgccgacctcacccagccctcactccaggcggtcgccctctcgcccacgcaagaccccgcgtgctgcagcctgtcgcgccctcggaacccgcctgcgcgcgccagagaccagctccgcctcgcctcccggcggatacaggcccacaacccatagccccgcgcctcccagacccccagacccccagaccctccctggccgccagcccaggggcggacggctccttctctcgcctggcgcaggaggcgcagcagctgccgggcgcgctccggccgccgctcgcggagcgtggactggatctcgcggagccaccgcacccggcgctcgtagggcgcgggcccgcagccggccgccgccccggcctcagagccagcctcgggcccggcccgccggcccagccgcgcccccatggccgccgcgcgatggtcgccgaacccacaggaggccgggctgtctgcgccccgctcccggggccgcccctagtcgccccgcctccaatcaccgcggccctgccccgtccgggtccgaaggctgagcgcccgccccaccccgcgccggagcgaggccagtgggttcctcggtttggcctgatcacactggaggaggccctgcttgcgtcagtcttggcgctagaacccgagggcctggagccgccaggggagacgcggagctcggccgagacgaggtggcttttggcacctctttaccctctggccccagtgctgactggggaatagtcgctttgaccgtgcaaagagcattctaggcggggtgggggggttctgctgtgtgtgccagtgttaggtattgcccccattgcttttagaaatatgccctgcatggtgaatctccgtctctactaaaatacaaaaattaggccgggcatggtggctcacgcctgtaatcccagcactttggggggccgaggcaggcggaatctaaggtcaggagttcaagactagcctggctaacatggtgaaaccacatttttattgaaaatacaaaaaattagccgggcgtggtggcgggcgcctgtaatcccagctattcgggaggttgaggtaggagaatcaattgaacctgggaggcggaggttacagtgagccgagatggcgccaccgcactctaccctgggtgacagagcaaaactctgtctcaaaaaaaaaaaaaagaaaagaaaagaaatctctgcagctggcagttgtggtgtaggacctgctcacgctacatggacactcctgcactggcaaatatttactgcctcctgcttcttggtttggggcaggcccccacctctgaccccagcctgggaaataaaccggacgaagagtcaggttaaccgttaagcccagctctgggcaagctggcagcaggcgggctgtatctgccgctggcttcagtctgcctccctgacaaggggtgggggtggcggcaggcagagtgagatgggggccctggctcctctgaggaccagggtgaggtacggacccacccagctcaaggtgtatcccacttcccagggctccctcagcagaagcctaggtctctgctgcaggcctgctgggcccctgcagccccaatcccggctctgggacgctcacatctcctgcgtggggaacgtttgaggcactgatctgcagttcccacttctctaagcaaggagcacgtgtttagcctgtgaggactggtacctgttgtgcaggaagggctgagcactgtccgagggcatatatgagggacgacagccaagcacccgtgtgtatgtgtgtgtgtgtgtgtgtgtgtgtgtgtgtgtgtctgctaattaccctatgaagattcaaggttccttcctttgggttaagcactgcctgcccagagatggcagtggggagagggcagggtgctaggctctgtcatcctgtggggctgggcccctgagacaaggcagaggacagcaggatgtcttagccccttgaccatccacggacccccaacccctgctggagcagtgcttgcacccccttctcccctggcacctgccagctggacccaacagcctctcctcccactccagtgcagccagcattgtcctggggccaccttggcaccacaggtttcctccctggcaaacctgcatgacggccttgcgtgccctcccccagggccaaggcgctgttgctgaactgaagtggcaacctacccggtcagagctttaagctgcagctctgatgccccagggacctctcagacccccctgcccagagcaggcagcccggtaagccctcctcctcttcccctgcagcctcagggctggagccacagctgggagggctcccagatcctgaccatatcctcccagaggctgagccaggcctgggcactgtcccctcaaatgtgagaatactgggcagggggaggggagaaaggagggaatggagggctgagcctggaggcatgaaaggggcaacctaggcagcggtatgggggagtgctcagagcttagagtcctgtggaaggcagagaactgccccagcccctgcctctcatcccccaccctctgtgtccctggccgagaggttcctggaggacatttttccagcaaaagagggagggtggtgtctgggcctagatccttggatgggcttttctctgcctgcttgtggggtgcctagggcgagtgggcttttggagacaatttctggcctaacctgacttggacagcagcccccagaggcacagctctcccctcaggcatgggggcatgattccacctcgctagcccacatgtgttcttcacggagggctgctggcccgtctccctggggttaccctgagcagcagagctgtgtttgttgagactccatggggtggagggattgcgatgttgtcctctcagttcccggggctgatgtggaagctcaagggcttgccctggattcttcagggtagccctgccatccctagtgagtcagtgagttgggaggttgggggctggagaatcaggtagggaggacacagctagacctcaggccctgatgggaacgtactaggctccaagtgggacctgccaggagacaagaattgatgacagccacacctttggagtctcaagccctctgccacccatgcggtggcctagttcaaatgacaggaacacaaggtccagctggcccaatgggcaggtagagggctgcagccagggctggaactggccttgcactgcctctgggcccttctctacccacccagtagtattgttcaagcccaggagggaaaaaggccagctcagggttaatgttacctcagcaagtagctgagtggcactgagcctcctggtagccactgtaaagaaggacacagaatggtttgggggcattcgctaggaggaaggaagcagatggatactctatggagacagaatgtcctctgtgtttgctctacaggaacgggttgtcaaccttctgcagggccaggaattgtcatgaggctgtagtaggcagcagagcttggcggggtgaggcgagatcacaggtataggctcagggcctggattcaaatcccctgggctgccacttgttggatgtgtaaccataggcagagtaaggacctgccatagcaaattaccacaaactcagtggcttaaagcaacagaatagttctggaggctaaaagtctgaaatccaagtataggccaagccacactccctttgaggactccaggggaagatccttccttgtctcttcagcttctggtggctcctggcaatccttggccttccttggctgctgctgcatcactccagtctctgaaaccatctaccctatgtgtctgtgtggccttcacatggcattccttatttttgcagtggggtctcactatgttgcccaggctggtcttgaactcctgggtccaagcagtcctcctgcttcagcctcccaagtagctgggattatgagtgagtgccaccatgcccggctcacatggcctccttgtaataacgctagtgcctgggtgcggtggctcacgcctgtaatcccagcacttttggaggctgcggtggacggaccatgaggtcaggaaattgaggccatcctgtccaacatggtgaaaccctgtctctactaaaatacaaaaaaaaaaaaaaaaaaaaattagcctggtgtggtgacacatgcctgtagtcccagctacttgggaggctgagacaggggaatcgcttgaacccgggacgcagaagttgcagtgagctgagattgcgtggtgacttcactccagcctggtgacagagcgagactctgtctcaaaaaaaaaaaaaaaaaaaaaagaactgaagctactggatttagggctcattcattctttttttaattttaatttttttttttttttgagacagtctcactctgttagcccaggctggagtgcaatggcatgatcttggctcactgcaacctccacctcccaggttcaagcgattctcctgcctcagccttccaagtagctgggattacaggtgcccgccaccacgcccagctaatttttgtatttttagtagagacagcgtttcaccatattggtcaggctggtcttgaactcctgacctcaggtgatccacccctgtcagcctcccagtgttgggattacaggcgtgagccactgtgcccaacagggctcattcattctaatcccgtatgatctcatcttaactaattacttatgtagagactctatttccaaataaggtcgtgtgaggaaaaaccaactcaaactgtgttttttggcctggcgtggtggctcacacctataattccagcactttggggaggctaaggtgggcggatcacttgaggctaggagtttgagaccagcctggccaacatagcaaaaccccatcttcactaaaaaatacaaaacaaaaattagctgggtatggtggcatgtgccagtagtcccagctactcaggaggctgaggcaggagaatcgcttgaacctaggaggcggaggtttcagtgagccgagatagcaccacggcattccagcctgggtgacagagtgagactccatctcaaaaacacacacacacacacacacacaaaacaactgtgtttcgcctctgttctcacaagacaataatcatcacagaagacttcttgtaaccaaatttgtggattctcccacacacccagcaagaatcaattctgcagcagactccagctggtgtcttccaattcaactcaattctggtgctgtctacctggagatggcctcagaaaccacaggttgagggcttggtcccacaagaccaacccccatcccaccagtcacaagtctgggcattgggaacatctgactaactggcttctagttggggttccaaggccccctctttgggttcaattaatttgctagagtagctcacacaactcagggagacctgtttatcggtttatttcaaaggatgttttattttattttctcctcagacatactttatcatcccttaaagtcagtagctcaaaggaaactttaaaagctataaataggccgggcacggtggctcacgcctgtaatcccagcactttgggaggtcgaggcaggtggatcacttgaggtcaggagttggagaccagcctggccaacatggtgaaactccatctctactaaaagtacaaaataagctgggtgtggtggcaggagcctgtaatcccagctacttgggaggctgaggcaggagaatcatcggttgaacccgaggggtgcaagttgcagtgagccaagatcacacctctgcactctagcatgggcaacagagcgagactgagactccgtctcaaaaaaaaaaaaaaaaaaaaagataaaggctacaaataaacagtcagatgaagagatacatagggtaaagactggaagactcctaagtacagaagtttctgtcctggtagagctggacacatggatgagttggttttttttgttgttgcccaggctggagtacagtggcactatctcagctcactgcagcctctgcctcccgtgctcaagtgatcctcccccctcagcctcccaagtagctgggaccacaggcatgtgccactatgcccagctaacttttttatttttgtagagatggggtctctctattttgcccaggctggtcgtgaactcctgggctcaagccatccacccacctcgccctcccaaagcgctgggattataggcatgagccactgcacctggccatggatgagttcttgttccccttcctgtcagcctccacatgaaactccccaaaccctgtcctcttgggccttttttaaaaaaattaattaagaaattaaagacagggtctctctatgtttcccaggctgctcttgaactcctagtctcaagtgatccacccacctcgtcctcccatagtgctgggattacaagattagagatgccagctgtcaggtggctaggtggattcagtgtaaagtcctagaagatgcattttagtaaaaacagctagccacctgacagctggcatccatccattcagtgaagattgttgggcactgtggatactgtggaggaggcagcagtcgcagccggcctgcagagtgagatgcagtgccagagggcttcaggaggaggtggcattgtgattgatgtctgaagagtgtctccatgataatggagtcagtgcaaagtcccaaagactgggaaggagcaagaggaaaggatagctcatatccagctgccccactccaaaaaaaaaaaaaaaaagaggaaaggacgggcaccagcaaggtaggacaaggggggcctctggagtgttttcttctcagttggggaggggtgtgctcagatttgcatgccaagtgcctgggctgcagtagggaaacagcagaggggctgggacctgtgattgggagtctccaggtgagagggttggcctatggggactggaggtcaggtgaggctggtagtgggttatagaggtgggagcagctggacaggcccagtgaggatgcaggggtagctgcccagggctagactctggctgctctggtggcagttgcttagctcaggcttgggcacgtccacctggcgcatctgaaacattagccagcagggcgcagactcgtcagtgagagcattcctgagcccagcatccaagaagcgagggaggtcgggaaggtgctgctatgaggcagggggaggtccccaaaagtccaggtgagagcatggcatgcgtggaaagtgctgcgcagttttggcatcagtgaagtcacagggggctgtgggtgaacaggtgtgcttgggcatgtcaccagggaggccttgagacaggagcgggttggctttcctggagatcaggctgtggcatggtgtcgggactggggcatggacagtcttcctccacccccatcccctccttggagctttcagacactgcagataattaccaggtgatgtgataaatactacctgtggagggtgccttgggcagggaggacagggcggccaggaggggggccctttgggcccctgctctgagctgctcatcaggaaaggggagaagctcctacaggcctggtgttggagcctagccagaccctgtgaggccttgaaagtaggaggtgcattgtctgtgcattgtcatctcaaggaatccacccagcaactgttctagttatccctgctctctaggtaggagactgaggctaggaagggaaaggctgctgtgatacccacactatcagtggctggggttgagtttaaacccagggactctagggcccatgcctctgccatcctgcctctgagttttggagctggacttgttccatcaagtgccaggccagccctgctgctgggtgctcccaggcattcacaagctgacaattctgaagggcccacgcacttggccatgcttcagtctgtgtcctgacatcacaggtgggtgctggaataacaaatgctacaaatggcactgggggtgttggccaggctctgggggcacaggagttctgcccatgcccacagctggcctgtgctgacctccctccatcacagctgagtagcaccagcacttccattgagctgaagtcttcctcccattccttcagtgtggtctttgtggctcagagaggctgtggccaggtacaggatctggagtggcccctgcttctctgctctgtgaccttagacagtgggcaggatctgaggccaggcccacctgcagcaggtgttacaaagaggcaaattggcgcttaatgttggtaagaacttgccagccaaccagagtcccactatctttggaggtagtgagctccccattggggaaggtatgtaagccaacctttctgggatgctggaagatcagagagcaaacacttgagattctgtgatcctaatattgaatccaatgctatgatgtttggatttgaagtcagttctatttagccagtttaccaagtgtctccttggtgcaggacaccaggagacacaaaatgtcctggataatattgggtttctggctcccaggggtccctgagatgttgttccagcggttctggagtatgggccaggcaccgcttgcatctggaccgatccgcattgttcgatcattgtgagcctcatgatggcagttcgggatgtcatgcccccatgcgccccccaaccccaccccgccatggccctcaccatggcccactcagggcatgaggctttctgggtgattgctggtattcagtgttgtcagcttcttggacctgtcagtgggggtggggctgcaatgagatgccagttgcaggaagtggtttgcacagccttcctggtgtcatgggtcactctcttgccgagtggctttgggcaggtcccttcccctctcaggctgcaggttcctatgccaggagctcccttcttgccccaccagggccttgttttcccagatacagaggtggggcagatcccagcccgttgaaacagactgggctttggaggccacagtgggcccatttctcagagggactgtgtggctggatgctgagccaggcactggactggccctttgagcctcctgtctggccaaggcccctgaggcactgtgggctgctggtgccagcacacaagggtgataaggagatgaaagtcactaggatggtggggcggcacccgccccgggctgtgttggcagctgcccctggctggaggccagcttggccctggaaccctcctcaaggaacaaggacacaaaagagccagctcagccagcctctacctagcaccccaatcagcactcccttcttcccatgacccctaccctctgcccagctcctgtaactggccaaggagctaatggacacccaccagggtcttaatgagtgagccagggttaatgggttactgggcccggtgacacattcaccagcctcccagggctctcaaagtccacactggcctggccttgaacgtcttagctcggccacctccttttccagctttgacacctcggggctcaggacgggcctagggtggtcaagaggtcccctgcagccctcacttcctggaaaaggctccatttcctggccttcaggctcaggtggttccttccgcctggcaggtcctccccaaatccaatcccagctcgggctggattcccaaggcccctattctggtgtctgccccttccctagggctcttccccctggggtgaccatactctcatgcccagccaggtcagggctccttgagagaagaatctggaggggccaggatttgatgggagaatgaatgatggaatgaaagaaggaacgtaagcgtgagccttgctaagagtgacaatactggcaggctgcagaccatgtgtggacctcgatctgagggcttagaggcttcggcctgccagcgctgtgggggcacccaccccatctcattgaatggggcagagcaggtgagggcatgagatggacagatgggcctcatccccctgcttccgttgcctggggtcctcggtcagcctgtttgctcagacccctgaaattgggggtcaaggaaggaccctcctggattatgtgactcccttcagtccaggtgaccagggtccttggagtgacagctcctagagccccacctgtagtcctgcaagctggggagagggcctgttaggagaggcatcccctgccctggggttgtagaggtgaactaggctcctcagaccttgtggggcctcagatgcttacatctccagcccctcctggcgtgggcatctggctgcagcccagctctgtggccccatctcccagggaacctttggtctaatctgcctcccgctgaaacccagcctcattcagccccaccgaggctttcagagttcaggtctctcattcagggtttgagaccccaccgggctcagagacacctgcagcctgcagcggtcccagatcacagcctcagggatgggaccaggagccagcccacatcccacctgcagcagttcctgtgcctttaaagcctcccctccccccgccccgcccccaggccactaggggagggaaggaggagctgggtcacagcagggaatcttagcttggttttggtgtgctgctggatgaccagaccgggcgtcgggtgagcccagaagtgagagcagttggctgtgccccagtgctgtgtgacccagaggcgccgctcaccctctctgagctggtggacatcataggtggggaagctcaggtcagggcactcccatgagtgtctggaggcctgagtcccattctcagctctgccatatgcttgctgcgctctagaggagttcctcttcctctccaagcctcggtttatgtacccgtgcagtgggagtgagttgcacttcggggtgaagggggcaagacttgtgtgggcgcatcctgcagaaggatcccacaggtgggcagagccctgggttctttatccgactgggtctgggctgggggcctctgtttcttggctgatgagtttatgtgagtttgagtgaggtatgcgagtgggtgaaggagggctggggggagtcacctgacttgtgcgaagaagctcttgagagagccgtggcttcttggaattaagaggaaagagtgcagcatgaacagacaggccctggaggatctggcagccctgagtgggggcggggggtcagctctggagtagagccagagctgtgatggggttgggggaccctgtgtccttgggccatgcttgcctcgctcctgggttctgtttgtggctgtggattggggtggggcagggccggttgtgcgaggggtcattgcccaactccagggggcgcctgccacctctcagctatatatatagggatatatatagttctttcgacaggtttccagcaggtagtggttattaaatcttactgaaggggtgttttttctgattctcggctctgtgccgcaagggtggaaactgtgagagacagattccaactccacgtctgggtagtaagcatccagtccagggctgtaggcagtcctggggaagacgccagagatctgtgcattctcatatcgagggatagcgactccaggctgggggctggcagggtaaggggtgggtgggtcctgggcttacccgcaggtctgcagacttcctggggccagctgacctcgtaaaatcccttttgtctaagcttcagtttcctgcctgtgaatggggttggggctgtgctctggtttcacccttgtggctctggggttgtggtgacaaagccatcaagctgggttgaaggattaaccaggaaacttcagactggctgccgtgtctacctcttcctcatactcctctctctgctgcatcctgggaagctgctctgctcagcctaaatgaggctcagttgtgtgtgtgcgcacgtgcttgcacgtgtgttggaagtgggtgatactgacaccagagtctgtgtctctgggtgagtgaggcttgcacatttctcgggacagggaactcactaccttatgtgcccaggacaagagctgtggggtctggagaagacttctaggccagcccctgcagtccttcctcaggtgacatggcttccccagacccacttccccctaggtgccctctctgcattcagggggtagagggctgactgggacagaatgtgacacactcagcatgtgaggaaaagcctccttcattctgtaggccctacctctattaacatgtcctttgataaagtgcctcccctcctgtctcccctctctggaatcctcagctgctgccaggcttcagctgtgccccattgaaggcagctctgtctccctactttccccagcccagggttttccttttggggtcagctgcagggatctgggccatcctttgcccactcagactttctttctgcccacctgctgctgtgaatcctgtatgtcatatatatatataaaatatgtaatatattatatattatatgtaatatataatatataaagtatattatataatatgtattatattatatattatataatatgtaatatattatataatatataatatgtattatattatatattatataatatgtaatatattatataatatataatatgtattatattatatattatataatatgtattatattatatattatataatatgtattatatattatataatatgtattatatattatataatatgtattatatattatataatatgtattatatattatataatatgtattatatattatataatatgtattatatattatataatattataatatgtattatatattatataatattatataatatgtattatatattatataacaatatataatgtgtattatatataatataatattatataatgtgtattatatattatataatattatataatgtgtattatatattatataatattatataatgtgtattatatattatataatattatataatgtgtattatatatataatattatataatgtgtattatatatataatattatataatgtgtattatatatataatattatataatgtgtattatatatttaatattatataatgtgtattatatatttaatattatataatgtgtattatatattatataatattatataatgtgtattatatattatataatattatataatgtgtattatatattatataatatatgatgtgtattatatattatatattatatgatgtgtattatatattatataatatatgatgtgtattatatattatataatatatgatgtgtattatatattatataatattatatgatgtgtattatatattatatataatatataatattatatataatatattacatataatatatcatatattatatttatataatttatataatatatcatatattatatttatataatttatataatatatcatatattatatttatataatttatataatatatcatatattatatttatataatttatataatatatcatataaatatattatatatagtattatatatataaaattatactttaagttctagggtacatgtgcacaacgtacaggtttgttacatatgtatacatgtgccatgttggtgtgctgcacccattaacttgtcatttacattaggtatatctcctaatgctatccctccccgttcccctcaccccacaacaggccccagtgtgtgatgttccccttcctgtgtccaagtgttctcattgtttaattccaacctatgagtgagaacatgcatgtcttatatgctctcaggcagagaggaaactgctgagcaggccggggcaggggacagagccctgtggctctccactttagacccctcctggctgactgccatggaatgcagccacttagcagggccaaatcccctgatgttcctgttggctgtctagccttcagggacaggtcatgggaccttggttcctgccctgtcatcttcccagtcaccctgatcttcacggggaggaatagcctgggaaaggacttggtcacagcacctccaccctagggctattgaggatctcacagttgtgtgtctggtgggttctgtccagagcccatttgagagcagtggatgacaggacaggcctatgtgacccaggcaggcagcaatattgggtcagccttcatgtccccttctgtcagctggggcagcctggaagcatgattgtggggtaggtgttatgggcacggaatagacctcaggtggaggctgcaggggctctccggcaccgtagacacagcaggcccaggagcaggggagggagccatgactcagggagactctggcccatatccttggcagatgagggccacaggggaatgggcagcactgtccaaagtcccctgggctgggtccgcagctgttcctggctcagacttcttggtgggctggtcagaaacatgcagtaacttggggcagttaccaggtggccaagcctgcactgctgggctctgtgagcttgggccagctcaggccctctctgggccctgcctttctgggctgttcgggtggttccttgggcctggggtgctaatgtttctggatgggcagcagaaccagtctgcactcagggccccaggccatgttcccggaacacacctttagcattgacagcagcgtgtggtgaggccccttaggctgggttctggtctagtgccaggggcaccactactccaccgcctccagagccatctctgggacactggctgtgagttcagatgttctgaacagggacagggagagccagagggaaccagcctggggctcactggaggggctcgtgggcagacagcgccctttggagggaactgagtctgaaaggaaggaaaccctttccccggctcatagcacctgccatccagggccctcccagggctgcgtgaactttagtcacgtggtgacaggccgagtcaccatgccaagtcactgtgcgcctccttgctgctgtgacgtcagcttccccatcctcccagccaggctggacctccgtgagaggcctgcctgtcctgcaccctgtgcagatgcctcccactgtccgccggggctgctgggcacgccctggctggtctcttggactaggtaagctcatgagtcctctggccgctcctgctccttccctgcctctgctcctcctcggaggtggccacccccagatcccagtcccaattcggaggccccctgaggagtgctgcagggggccacaggcgtggctctgagccactctggagagtggcggggggcccagccagttctgtggctgggactttcccaggcagacaagtctgtctcttcctccccagcgggtgcagcccagaactgtcttctgaggaagaggtgctctcctgggcccccactgtccccaggcctcaggtaagcccatcagggtcccaaggaagggggtctgggtttgaggccaaccatggcagctgacctactttctagcctcagtttcccctagtgtgtgcagctctcacgctgtttgggtgagaaccaggcctctgggcttggacattctttcagtgagtttttagggtggagggatgggaaatggaagcccaggacctcagcagggtgtcttcctccgatccggggacatctgcctgtgggaggctgggcccaccctcccttgctgacctgccctgggaggaagggacagggcccagcactgcctactcccctccctgttcttcccagcagtctgagcctggctgggtgtcccctgctcctccagcagcctacttgggcctttgggtagacagattaacagacaggcgaggctgggtcatggttggaccaccccaggaccctgaccgggggctcagctcatgaccctgagcctgggagagatgaggccatgccctccagggcactcagcatgacccggcccagtggacgggactgggtagcttccttggtgcagggggctgtcatgctaggacggggtcactgaccaggccaggcccctgccccatgacttgtggtggaaatgtccttttgtttttgtttttttgcattttttttgagacggagtttcactcttgttgcccaggctggagtgcagtggtgcaatcttgcctcactgcaacctccacctcctgggttcaagcaattctcctgcctcagctcctgagtagctgggattacaggcacctgccaccatgcctggctaattttttgtatttttagtggagatgggggtttcaccatgttggccaggctgttctcaaactcttcacctcaggtgatccacctgcctctgcctcccaaagtgctgggattataggtgtgagccactgcacccggccatgtgatgggaatgttctgtgtccataatagatgctgcatattgctggcccagctcctgaggctctttggacctccaggaatcggtgtctctatcaggaacccttaaccctgacccggactcccagctgggacccggggtgtcggagtggcaagagcgctgtcaggcctggtgaagggtgtgagctgtccaacggggcagggaggaggcagggcctgttctgcagttggacagacagagccctctagctgctttctggaagactgaagggcaggtgatgttggagggagggagtgcaggcaggggctgtgagggagttcaggtcagaaacaggtggcgcctggattcaggctgtggtggtcacggtggggatgaggggctgctttggattgtgctggggatgtggggtggtgcgctgctgcatgactactgccaggtctctctgctcttagtgtctgcatccagggctgggagggggtcaaatgaatcacactatcggccccaggcccaccaagcctggggaggtggccacccttccatgatggcatttggatgttccctgtgtgtggggagggcacagggactccattcgtagaccacctctgggacagtgtgtctgcctctgaggtcagacgctctgcactgggacagggtggagtggagggaaatccagcttggggctcattggaggggcttgctggcagacaccgccctttgtgggaaactgactgtgggagaggggaaccccaacctctgtcaccacatccctcttccctgttgtcacacctgtcacctgctgccatagccatgagacttcccaagggtcactgctgccactcactgcacagcctggaagggagtccacaggggacatacagtgagcaagagacctgtgccactcaggcctcctgggggtgtccccagtgcagccatgatgataatcacagctaccattcaccaagccctgcccacagtctaacctactctattcacaacactcccagcagcaaggcaagtgaggtgctgccgtcatccaggctggacagttcagtgatttgcctgaggccccacagcaggtgagtggcaagtccagcatcagagcagggcaggctggcggtgccccctgagccccctttgccatgctgaccacatgcacatcctgggcttctgcaggaatgccctgtcccctacctgccctgctccgtgcaaaaccctctttgagctgtgcctgggagacatgctgagagaattcatggaaacaaatgtgttactgacagcctctttgcctccagagttcaactggagacagagaaaccagctagaggcagagggaggtaacacggagtcccccagaaaggtctgggctgcgcgtgcttcaggtaacctcccttgaccttcaggagaacgagaaggctgcctgatcagagagtccctgaagaagattctgtggctacaggcttcagcagagtgtgagggagaccccggttatttcctcagctatttccaccaaatcctcctgtctttcgtggccaacaccccaggcaaggcttggggcccccgtctgctgctggacggtaagtcctggccccgtggcagtgaatctgtggggcgctctgattgtgggcactatggaagctaaaccccatgctccaggtggggtggagggtcttcagaggactcctggacagtgccaggctctaggctggggtgggggacacaggagaaaccaggccaggcccatccctactggagcttctccctaagcagtggaggctcagccactgtaaggaggtaggcaaggccctgcagaaagaggggtgtggaaatctgggggctcccaggaagggccgctgctggagatggggttcttaccaggatgggctctgaagataagcagggaggatttgggagggcagagatgaggcccagagcttctggcagagggcatggcctgcgcaaaggtctgggggccggacagcctgcacgtattctgggaagcgggaaggagacacaggccttgtgtttctgaggcccgactttagactgtgccctgttggggaggggccagggaatgtctgaggctaggcctgaccctgcttcttaccccgtgggtgcagcagagccatgaagaagaagttagtggtgctgggcctgctggccgtggtcctggtgctggtcattgtcggcctctgtctctggctgccctcagcctccaaggaacctgacaaccatgtgtacaccagggctgccgtggccgcggatgccaagcagtgctcgaagattgggaggtgagcagggcagggcatgggacatgggccctgaaaactgggcaagtggacctgagcaataccttcacccccctgagactcagtttccccatgtgtaagcttcgcttggactctctcagtagcctttgggaaggggacagtgactccgagagcagggtgtgggtctctagagccaaacagggccccttttctcagttctaagagtctctgtctctttggaataaactgcactgttttgttgtttggttgttatttttacttatttcttcctatctatctatctatctatctatctatcatctatctatctatctatctatctatctatctatctatctatctatctatctatctactatctatctatctatttatttagagatggagttttgctctgttgccaggctggagtgcagtggtgcaatctcagttaactgcaacctccgcctcccaagttcaagtgattctcatgcctaagtctcccaagtagctgggattacaggcgtgcgccaccacgcccaacaaatttgtgtgtgtgtgtgtgtgtgtgtgtgtgtgtgtgtgtgtgtgtgtgtttccaagacagagtatcgctctgttacccaggctggagggcagtggtgcaatcttggcttactgcaacctccacctcccaggttcaagtgattctcctgcctcagcctccacagtagctgagactacaggcatgtgccaccatgcccagctaatttttgtatttttagtagagacagggttttgctatgttggccaggctggtcttgaactcctgaccttgtgatcctcccacctctgcctctcaaagtgctgggattaaggtgtgagccactgctcctggcctaattatggtgtttttagtagagatggggtttcaccatgttggtcaggctggtcttgaactcctgacctcaggtaatccacccacctgggcctcccaaagtgttgggattacaggtgtgagccaccacgcccggcttattctttttttttttttttttttttggttaggagacaatttctttctttctttttttttattttattttattattattatactttaagttttagggtacatgtgcacaatgtgcaggtttgttacatatgtacatatgtacacatgtgccatgttggtgtgctgcacccaccaactcatcatttagcattaggtatatctcccaatgccatccctcccccctccccccaaggaacactgttgcccaaacagggacatgaagggcttattcttttttgttgttgttttgttttgttttgttttttgagacggagtctcacgctgtctcccaggctggagtgcagtggcgcaatctcggctcgctgcaacctccgtctcctggattcaggtgattctcctgcctcagcctcctgagtagctgatattacaggcatccgccaccacgcccggctaatttttgtatttttagtagagacagggtttcaccataatggtctggctggtctcaaactcctgacctcaggtgatccgcctgccttggcctcccaaagtgctgggattacaggcatgagccaccatgcccggccgggcttattctttttttaaggtggagtcttactctgttacccaggctggagtataggggagcgatcatagcccactgcagcctcaaactcttgggtttaagtgatcttcccgcctcagcttcctaaagtgctgggattacaggtgtgagccatggtgcctggcttctactgttttattctattttagactcttatctcatgttatatacaaagatcagttccctcctaaagacttaaacagaaaaaatattatgtttttcatattttgagacagggtcttgttctgtcacccaggctggagtgcagtggcatgatcatagctcactgcagccttgaactcttgggcttaagcgatcctcccacctcagccccctgagtagctaggactacaggcgtgcatcacacctgactaattaaaaaagactgttttctagagatggtctcactctattgcccaggctggtcttgaactcctggcctcaagtgatcctccaccttggcctcccaaagtgctgagattacaggtgtaagccaccatctctagccgggaaaaaaaatgttattaataaagtatagcaatttccctttttgtcccagttataaaagtcatgtacatttgtttgcttgataaagaggaaactgtctgggcaaggtggtccacacctgtaatcccagcactttgggaggttgaggcgggcagaccacccgaggtcaggagttcgagaccagcctggccaacatggtgcactctgtccctactaaaaatataaaaagttagccgggcatggtggtgtgcgcctgtaatcccagctactcaggaggctgaggcaggggaatcacttgaacccaggaggcagaggttgcagtgagctaagatcatgccactgcactccagcctgggcaactgagtgaaactccctctcagaaaaaaaaaaagaaagaaaagaaaagaaaaagaggaaactgtaatcccagcactttgggaggttgaggcgataggattgctttagaccatgagttcgagaccagcttgggcaacatagaaagaccctatctctacaaaaaagacaaaaaattgccaggtgtggtggttcttacctgtagtcccagctactcagcagactgaagtgggaggattgcttgagcccaggaggtcaaagctgcattgagccaagactgtgccactgcacttcatcctgggtgacaaagtgagaccctgtctcataaaacaaaggctgggcacagtggctcatgcctgtaataccagcactttgggaggccaaggtgggtggatcacttgagcacaggagttcttgaccagcctgggcaacatgatgaaaccccatctctacaaaatacacaaacaaacaaaattggctgggcatggtggcatgtgcccatagtcccagctacttgggaggctgagatgggagggtcaattgagcccaggagactgaggctgcagtgatctgagatcacaccactgcactccagcctgagcaacaaagagagactttgtctcaaaaaaaaaaaaaaaaaaaaaaaaaaaaagaggccaaggcaggcggatcatgaggtcaagagatagagaccagcctggccaacatggtgaaaccccgtctctactaaaaatacaaaaattagctgggcgtggtggcatgcacctgtagtcccagctactcaggaggctgaggcaggagaatggcttgaacccgggaggcagaggttgcagtgagctgagatcgtgccactgcactccagcctggcaatagagcaagactccatctcaaaaaaaaaaaaaaaaagaaagaaagaaactaaaaacaaaaaccccaaaactcgaatggacttctcttccatcctcctttgggcaggtgggcagcagggtgtgtatgcggggccagggtggaagcctgcaggttctcatgcctttatgtgccacatggcagggatgcactgcgggacggtggctctgcggtggatgcagccattgcagccctgttgtgtgtggggctcatgaatgcccacagcatgggcatcgggggtggcctcttcctcaccatctacaacagcaccacacgtgagtgcctcgggagaggagagggagaggggcagggggtgtgggttgggccgaggcacagctgggcggtccccaggctcacgtggcataaagggtttgggtgggcgggcctgcctacctgcttctccttctaggaaaagctgaggtcatcaacgcccgcgaggtggcccccaggctggcctttgccaccatgttcaacagctcggagcagtcccagaagggtaagccatgcggcagacttggggcgtgggtgcagagctggctgagccaccgggaaggggccttgcccacaggagcctgctcccgtcagggttcaggggcagttctgtcaccccccatcccttcctgtccccatagcaccctcccacaatgagtggtcaggaccatcatcaccatggtaaagggccgggagcttctgttatttctgctaaggcctccggggccactctgtgcagcacatggagagaataattattatgctagcagacctcatggaccagggctcactggggcccacactctgctctgtgcttttcacccatgagcctctcacaaccctccctgctcctttgggctaggggatgctgtgtggattcccattttacagggtggggatgctgaggctcagacaggtcacgcaaatcagttgaggtcacacagctgggaggtggtgaagctaaaattgaacccaggctgtctataccgtgccttttcaacaggcatcccattcactcatttgttcatttgtggggatggtgctctagaatgtgaggtggagtctctcttttctaatctggtcttaagtggagaggaggcccccaaattccccaggtacctgaagggaagccactgtccatccaggaagccactgtctgtcctcaaaggtggtacagtagattgtgagataaaagttggaggatgggagggtctcaacaactcacgcctctaatcctagcactttaggaggccaagtcaggaggagcgcatgagcccaggagtttgagacctgcctgggcaacatagcaagactccatctctacaaaaaacggaaaaaaaaattagctaggtgtggcggtgtgtgcttatgttcccagctacttgggaggctaaggtgggaggatcacttgagcccaggaggttgaggctgcagtgagccatgattgtaccactacactctagcttgggcaacaaagtgagaccctgccaaaaaaaaaaaaaaggctgggcctttttttcacaggctcacgcctgtaatcccagcactttgggaggctgaggcagatggatcacctaggtcaggagttcaagaccagcctggccaacatagtgaaaccctttctctactaaaagtacaataattagtcaggcgtggtggcacaggcctgtaatcccagctactcaggaggctaaggcaggagaatcgcttgaacccaggaggaggagattgcagtgagccgagatcatgccactgcactccagtctgggcaacaagaatgaagctccgtctcaaaaaaaaaaaaagttggaggatggaggggcaggacacactcaccatagcaggtcttagacttcaggtgggggtcctgggtggtgccctttggagtcttctgcaacatactcaatctttgacttttttcttttttttttcttttttttttttttgtcacccagactgtcgcccaggctggagtgcagtggcacgatctcggctcactgcaagctctgcctcctgagttcacgccattctcctgcctcagcctcccgaatagctgggactacaggcgcctgccaccacgcccagctaattttttgtattttttagtagagacgggttttcactatgttgcccaggctggtctcgatctcctgacctcgtgatcccccggcctcggcctcccaaagtgctggaattacaggcgtgagccactgtgcccgatcaatctttcatttttttttaatactcattgagaaactcagcatttgtagacatgaagttgctcagggtaagagaatgcgggaatcataggcttggcaccttgtggactcttagaatcatttatttaacttgaatgtattgagtattctcttaaagaatcagctgttgttcctgaagctggggtgaaaaacaaagatggcagatgaaatctgtgacactccaggtgggaggagaaactaggcaggtgcaggtgtgttacgggctgtagaaaaacaggtctggagggcctcaaaatctgggactgtatagagggtgacctagtcagggaaggggacatctgagcaaagacccagaggcagagatggggtcaggggagttatctcctggtctgctatccaggtgtgatggcagggacagagccctgtggggagctggggaggctgcagcaagtgatccaagggaaatggcccaggttgtgtgggatctcttaggttatggtgaagcctctgcttcctgtctgagggaagtgggggctcgtggagtatgtgagtggaaggggatggatctggcctatggaccccgtgggttgctgtgtaaggggcagggagcatgtggggacctgtctggaggtcactgcagtaattcgtggagagggtgctgggaagtggctgacgctggacagacacacttggaagtggagtctgtggatttgaggatgggttgggtgtgacgcttgtgtagggagtccccggggacccctgatcttttgtctgtacctggaaggatggggtgaccctaatggagacaggcagggttctcaggaagcaggttgagcagacactcaggagctcggttttgggcacgttgaagtttgagatgctttcttcgagcaggcaggtagatcctcaggtctggtgatcggaggagcagcccaggccagcaggtcaatttgagagttgtcagtgcataaatggaggctgaagctcagatgtcaagcagaccaccaggagagagagcaaagacagaggggagagtaggagctaggatggcaggcgggggagactcgggtggagccaggtgctgggatgcaggggcagctctcagggaaagtgatgagcccagtaaagctgagagggggcactgggtctggcagtgtgggggtcaccagagaacttggcaagtgtgctggcatgagagtctgattggcctgaggtcaggagaagattttttttctgatattgatacatgatattttctatatttatgggtacatgtgagtgcttgttacatgcatagagtgtataatgatcaaggcagggtatttggagtctccgtcaccttgaatatttttcatttctgggtgttagcaccatagtcctctcttcgttactttgaaatatacaaaatactgttgctaagcatcgtcaccctggtctgctatcaaagattagaacttctcctgtcttggctgggcacggtggctcacacctgtcatcccagcaccttggaaggctgaggtgggtggatgacctgaggtcaggagtttgaaaccagcctggccaacatggcaaaaccccatctgtactaaaaatacaaaaattagcctggcgtgctggcctgtgcctgtaataccagctactcgggaggctgaggcaggagaatcgcttgaacctgggaggcggaggttgtagtgagctgagatcatgccactgcactgtagtctgggagacagagcaagactccatctcaaaaacaaacaaagaagaaaaacaaaacaaaacaaaaaataacttctgtctaactacaaggtggaaggaatcatgtgctgggtgtcagaccttccgggatgtatgtgcagcttctaggaattgaaaccaccagctcttggaaacttgtgccaggcttcagggtgggagaggcagttctagagccacagctgccaagccaagccaaatggccccatcatctctcgcaagagcaggagagtccctgggggcagaggccatagttgtacctttctgggcaaagggtcagtgtctgtagtgtccttatgggcagcggggctcaggggggaagcaggcccaggggtgtgtttccaatgacctcctcaaaagtcagaactggaaggcaaaaccccttataggctgagtgcacctgtaatcccagcatgttgggatgctgaggtgggaggattgcttgaggccagagtttgagaccagtcttggcaacgtagcaagacccctgtctctacaaaaaataaaaataaaaaattaggctgggaatggtggctcacgcctgtaatcccagaactctgagaggctgaggaggatggatcacctgatgttaggagttcaagaccagcctgaccaacctggtgaaaccccgtctctactaaaaatacaaaaattagcaaggcatggtggtgcatgcctgtaatcccagctacttgggaggctgaggcaggagaattgcttgaactcgggaggtggaggttggagtgagccaagattgtgccattgcactccagcctgggcaacaagagtgaaactccatctcagaaaaaaaaaaaaaaaaaaaaaagccctgtgtagtggggtatgtctgtagtcttaggtacttcagaggctgaggtaggaggatcgcttgagcctgggaagccaaggctgcagtgagccatgattgcaccactgcactccagctgggacaacagaatgagaccctgtctcaaaacagacaaacaaacaaaaacccttatagttggatggagaaactgaggctgggagaggggacaggacggaggttaaggctcagtcttgcctctctggggccgtagaaaagaggcagggagccctttcttggggctggctgtgtcttgaaggtggcctgtgcttgacctcggtcaaggtgggatctgctcttgttttggcacattctcgtggagcccatgagtcttacaggataaggccttgtggtcagtgagatgggagggggtctggcctggcacaggattttagacatgcaggcacctgcacagacagacacctcatcctgggacagcaaaacccagccgcatgctactgcttcccctgctgtgccctcctcagacatccctggtccatgtacactcctacctgctgagcccctcctaaaaaaaaaaattaaacatcccctcctaaaaaaaaacaattaaaattaaaaaataaatttaaaaattaaaaatccccttctgctaggtgtgctgttcacgcctgtaatctcagcgactcaggaggctgaggtgggaggatcgcttgaatccaggagttcgagatcgggctgggcaagatggcaagaccccaactcaaaaaagaaaaaaaaaaaatctttcctcctaagcctcattgccccatctgtaaaatgagtcagggactgtgcctgggatgctgcctgcgagagatcccgatgtcccccactcagggtcactaactatggctctctctccccaggggggctgtcggtggcggtgcctggggagatccgaggctatgagctggcacaccagcggcatgggcggctgccctgggctcgcctcttccagcccagcatccagctggcccgccagggcttccccgtgggcaagggcttggcggcagccctggaaaacaagcggaccgtcatcgagcagcagcctgtcttgtggtatgtctgtgggtgcggccccctgacacaggcagggcaggcacagcccaaggaccttgcaggccgtagcagcagtggagcagccctctgccttcaggaccctgtgctgataatgggatgaggagatacagacccttcccaccacgtgtggggacacattctgagcgtggggtcccagtggccactgtggctggccatgtgtcctgagtggcaagggacactaggaagctcccggaagggacactaggaagacgagcgctgagtgacagggccacccacctgtgacaggcgctgcccctgttctgctccgttctcctgtgtggacgggtgtgaggggtggtctagctgagtccaccccacctgctgcctcacatgagccccctctgccccagtgaggtgttctgccgggatagaaaggtgcttcgggagggggagagactgaccctgccgcagctggctgacacctacgagacgctggccatcgagggtgcccaggccttctacaacggcagcctcacggcccagattgtgaaggacatccaggcggccggtgagtgggtaacctcaggggcctgggtgaggaactctgcagtggaaaccctgagctgtagcccagagctatggggtcctcctgtcttgcctgagcctgcaggaagttcctggtggaggagggtcagtgactggccatgtgggtccacagctcctgcttatatcaaaaccaagagaggccacacagtccaggagagcaagtccctgttggggtaaatgcaggtgtaggcaagagccagggctagggaagcactagaatacagcctgaagatccaggaggacttcttggaggaggtggcggctgggctgcagataactttgttaggcagagagaggaagggattcctagcagaggaacagctgggctaaggcccagtagagggcgctttgattcaccaagagggttacaagggatgagggtctccttgagagaggcatggggaaggggatttgtggggcaggggcctggagcttggctgtggctttcttcaggtaatttttgtcacgtttcatggaggagggtgattagcgtgtcgacctttaccactgaggctggaaattggcatgccaataccctgtctgtctggagctgactccaggagaattaagagcctccctcctctattcattcatcatgaggagaagaggccaagcggcagggagactggcaggaattctccagttagaaaaggccctctgagccaggcgcggtggctcacgtctgtaatcccagcactttgggaggccgaggcgggtggatcacctgaggtcaggagttcaagaccagcctggccaacatggcgaaaccctgtctctactaaaaatgcaaaattagtcaggcatggtaggttgtgcctgtaatcccagctacttgggaggctgtgccaggagaatcgctagaacctggggggctgaggttgcagtgagccgagattgcaccactgcactccacagagtgagattccatctcaaaaaaaaaaaaagaaagaaagaaaaggccctctgaggccaagcttggtgtctcatgcctgtaatcccaacactttgggaggctgaggtagaagttgaggccaggaggtccaagacaagcctgggcaacatagtgagtctacaaaaaaaatattgagaaactacataaatatagtgggggtgggggtggggaacaagaaaacaaaaaattcaaagcatagtgaaaagaaatatagcaaaacccggccgggcatggtggctcacgcctgtaatcccagcactttgagaggccgaggcgtgtggatcacggggtcaggagatcgagaccatcctggctaacacagtgaaacctgtctctactaaaaatacaaaaaaattagccacgtgtggtggcgggcgcctgcagtcccagctacttgggaggctgaggcaggagaatggcgtgaacctgggaggtggagcttgcagtgagccgatatcgcgccactgcactccagcctgggcgatagagcgagactccgtctcaaaaaacaaaaaaaaagtagcaaaacacaacaaaaaaattaaaatttgctgggtgtagttgtgcctttagtctcagctactggggagggtctgctggaggatcacttgagcccaggagttcaaggctgtgattaagccactgcactccagcctgggtgacagagcaagatcctatctctaaaaaaaaaaaagaaaagaaaacactctgtggccacagatgagagaaggcagacaggaagccagtaagccaagcaggcaaagggcaggtggccccagcccggctgttgggtggtgagcagtgtcagggagacaggagtgccggagctgatgaggttcccaaggaggtgaggttgcctgtggccccctcccagggcacagtcccacccctccagtagtgcactctgtcctccctggtaggtacaggcttttccccaccaccatggtgcagccatgcctgcccccaacaccactgctgcagctccatcctccacgcagtggtgcagccccatcccagcacccatttgagctgctgtcccattgcagggggcattgtgacagctgaggacctgaacaactaccgtgctgagctgatcgagcacccgctgaacatcagcctgggagacgtggtgctgtacatgcccagtgcgccgctcagcgggcccgtgctggccctcatcctcaacatcctcaaaggtgagtggtcgcaccacagccgtgtggtaggacccatgacactgcctctctctccccacgccccacccctcctgcatctctgctcgccccccatgccacgtctttccatcactgagctcccgaggtgtgtccctgcgtcacagttcaccatgtcctgaaggaggcagtgcagagcgacagggctgaagcgggcaatgctcaagggttggaggaggaacaggagtcatcaggagggagagaggtgcaggagctcagggctgcagggccggtccagagggtaccccggtccagtgggtgaccctgccacttggtcattgaatggccagagctgatgcgtgacgtgaggtccaggctcgggagccctcaccttacttcactctcaccacagccttctgaagcagctgctgctattggttattaaacgctccttgaggtgggcaaagtggctcaggcaggtgttaaccctctgagcccctcagagcctctggggctcagcaacatgcacctggctctgatcaaccagggtacaacttctcccgggagagcgtggagagccccgagcagaagggcctgacgtaccaccgcatcgtagaggctttccggtttgcctacgccaagaggaccctgcttggggaccccaagtttgtggatgtgactgaggtaaggggcaggggctggcccactgtgggtgtggggcctgccatagaggcatcaggtgggctccccagggtggctacagcctcacatatgctttatgaatccattcctgccacagacttcgattgcgggcctactgtgtgctcggatggactcgtgggtgacccccagtcttggcttctgccgcacagaactgacagtgtggggaattagtggccaccctcctacctcaggtcctttgcacatgctgtggttctcgagtgctcagtgctgagatgaggaatgcatgggggcattgcagccctcgggcatggtgagatggatgggtgaaagggagagggccaggtgaacagagaccttggccacccactccctgtcactccaaactaacgcttcccagatgccaccctcagccctgcaccacctgacccactcactcagtagttgccccagctccacactgggtccctataagaccctgtcatatcccttcccgctgaggatcctcacatccctccttacctacttgggtccttggcattcctgggcggatctgcagacccccccacactgaccagtgacctcccaggaggggcgtcagctgcccaggtggtgtcttctctttccccgtgagcattctgcacctctgactcccgctgcagccagtgacctggtgtcttgtctctctgaggggacagagccactgcagtgtgtccctctgccctcctttttggctaaggccagctccttcatctactcgctggctcggggtgctgttcctacaatgctcctttctgcctctgatgatttacttctttatcacggcttattcccgaaagaaaggcagctgttgttgctctagaaacttctatctgctgcctccttctgtcctttgctcctcttagagcaaacatggctgggctatgtcctctctcccttcagggtatcccctcccctgctctatccccatgccaccagatcgccatgtccagcctcagtttccccatcaggccccactcagcagcatctcacacagctcaccacactctcctcgagttttcattttgcaaattttcgcacctacaaaaatgtaaaaaaaccccaaaactgcccaagcatcaatgctcccttttcctggagtctgcagtgtggatgtttctgtcggatttcctaactctctccgtctccacccacatctattgggattcgtgtttttctgagggattccacagtaggttactgatgtcgcacctcagggtgtgtctcaaaagtgagacttgaacatagcacagcaggatgtcggggtgacacaacctgttgtcccttctctttacctacagtaggctcccttggctgttttgtttttgttgtgtttttgtttgtacacagagtctctgtcatccaggttggagtgcagtggtgtgatcttggctcactgcagcctcaacctccagggctcaagcaatcctcccacttcagccccctgaacagctgggaccagaggcacgtgccaccaaacctggataatttttgtattttttttagagacagggtcttgcccagactggtctcaaactcccgggatcaaactatcttcccacctcagcctcccaaagcgctgggattacaggtgtgtttttttttttgagacagagtctcgctctgttgcccaggctggagtgcagtggcgctatctcggctcactgtaagctccgcctcctgggttcacgccattctcctgcctcagcctcccgagtagctgggattacaggcgcccgccacaccgcccagctaattttttgtatttttagtagagagggggtttcaccgtgatcgcgatctcctgacctcgtgatccgcctgcctcggcctcccaaagtgctgggattacaggcatgagccaccgtgcctggcctgttttgttgatttttaaagcccagggcagtagtcttggaaaatgtcccacatcgtggatttgcctttctgtttccttgagggcagattcagacagaacacctttccctgggattggtcaactaatccgtggggtgttgctgaaactttattttattttattttatttttgagacggagtctcgctctgtcccccaggctgtcccccaggctggagtgcagtggcgggatctccgctcactgcaagctccgcctcccaggttcacgccattctcctgcctcagccccccaagtagctgggactacatgtgcccaccaccgcgcccagctaattttttgtatttttagtagagacggggtttcactgtgttagccaggatggtctcgatctcctgacgtcgtgatccgccctcccaaagtgctgggattacaggcctcggcctcccaaagtgctgggattacaggcgtgagccaccgcgcccggtgttgaaactcccttgaggcattttcttcggccttcgggtccatcctctgtctcctccttgacctcctcatctcctcgccactgccttggggaccttggccaggctcatggcatccagcagccactcaatgtcaatacctccatgttcatctctcagcccgcccttgcccgtgaacccatgcttatttatttattttttttaatacgtgcacccatgctcttcaggtctgatgaagtatccaaaatcaagctcctgaccatccccaaacctgccccttctgcagggtttacctcgctagtcggcgccatccttgattcttctctttctcccacccaggccatcatctcttgcctggttgatacccacagcctcccctttgggctttatccttatccccatcatagctgccagagggatcctgtgaaaacactccccagcctgctcattcctctgccctaagcctgcatggcacagagcaaaagccagttgttatgggacctaggaagtcctgtgggatgggccccagcctgcatcttcatcctcttctccccaccccactccattcactctctgcctatcactcaccagcctataccacctgcctcagggcctttgcactgaccatttaggccacattccaggctcttttcacacgttgcctcctctgagaagccctccctgaccactctgcccatacctcatgcctcttgattccccttacctggcttgtggtttcagcactttccctgtgtgtgtttgtttttcttggcatgagagcaggacctaagtgtctgttccctgttgattccccagtgccaggcatgcagtgcaaactctagaaatattttttgcatgaaggaatgagtgattgaatgcagcaagggtctggaggctgaggaccaggcagacagacattcagagttgctggaacgcgacagagacagggagtcagactggtcatgcaaggtcctgggcctgcccttgggtcctggggagccacggaaggttgtgggtgccagagggttgcggtcagagtcacagtcaagggccttctgagacctgtgccccctccccaccctccctccccacctcctcaggccagctctggggtctcggcaggtggtccgcaacatgacctccgagttcttcgctgcccagctccgggcccagatctctgacgacaccactcacccgatctcctactacaagcccgagttctacacgccggatgacgggggcactgctcacctgtctgtcgtcgcagaggacggcagtgctgtgtccgccaccagcaccatcaacctctagtaggggctgctgggccgcctgggtgggaaagggccaggggcgggtggcccagggactgcccacttatccagtaaggtggctccgtcacctcttttcctggtgggaaactgaggcccaaccttggtagcttatcctgggcctctcagtgagtatgtttgagcctcagtgggtggatagggaccaggctgggccaggcaaggtcgggcactgtctgacctggctgggcggtagctttggctccaaggtccgctccccggtcagcgggatcctgttcaataatgaaatggacgacttcagctctcccagcatcaccaacgagtttggggtacccccctcacctgccaatttcatccagccaggtatggggtggaggtccgggggtgggggactggggtggagaggggcgggtgtcctgggcaggcagctgacgggcatccctgtcttctcccatcggccgcagggaagcagccgctctcgtccatgtgcccgacgatcatggtgggccaggacggccaggtccggatggtggtgggagctgctgggggcacacagatcaccacggccactgcactggtatgtgtcacaccttttctccctggccgtgcccaccctgcacagcccccaagccatgctgatcacactcccatgccccaggccatcatctacaacctctggttcggctatgacgtgaagcgggccgtggaggagccccggctgcacaaccagcttctgcccaacgtcacgacagtggagagaaacattgaccaggtgggccgggggttggagaaactgagtcaaggtgtggggccccagggcatcctgggctggaggcctggatcatcacagagtggacaatggttggtgtcctctctctagtgcctgggccatctggagcccctgtgccatgagggccaagccccctgctccagtgagacccagcaggccccaacctgctcttcctgatgacctggcccgaaatggcaccacctgggctgaggcctgtgaccacacagatgtggttcaggtggcatctggagccctgctcaggcttcccctctcctcccacccccaggcagtgactgcagccctggagacccggcaccatcacacccagatcgcgtccaccttcatcgctgtggtgcaagccatcgtccgcacggctggtggctgggcagctgcctcggactccaggaaaggcggggagcctgccggctactgagtgctccaggaggacaaggctgacaagcaatccagggacaagatactcaccaggaccaggaaggggactctgggggaccggcttcccctgtgagcagcagagcagcacaataaatgaggccactgtgccaggctccaggtggcctccc

SEQ ID NO: 15591 - DNA, 52586 bp, Homo sapiens; identical to SEQ ID NO: 1192

SEQ ID NO: 15592 - DNA, 52498 bp, Homo sapiens
agaagagcgggctaagacgccggaggaggtggcggcggctgggagaggcgagggttctggccggtaagtggagttgtggagaggttcagggtggccagggctcgcggttggccgtgagccgcggcggacttggtgctgcgggccgactaggccacgcgaggtggtggagcctgcccacctaggcgagcaggaatcggaagacatggcttcctctgatgcagcccgcacgcgcgctggggtgttcactcgccttccagcgcgctgccctgaggaccgggctgactcgcgcccctactgagggcttggggccgagccttgccgccaggagaagcgatggtctcctcctgaaggccgccgttgtcttgtctccgtgtgatacagtgatttcactagctggattgatcactttggggactgcaactcctagagagaaatggaatggagggcatctgaatcttcaccccctatagataagcttgtgttgcaccccaatttttgtgaggtgagacattaaaaatgaaaaatcccctgatgattagaattttgatttcaggtccaccttttggaaattttttttcagaaaagaagtgctttgctttttaaaagccctttagttcgtatatgcctcgcctcttgggagtgctcgagaggttttttttgtttttttttccttcaaagtagctttcaaaactatgctcctagaaaacttaaaacatgcaataagggcttctaaaaaaacactttattttcttaggcaaacatactaagattcagtaataacatttcaactttaaaactttacattttctcctagcatgctattggaccaaaaaacacaacaacaaaaactttccattttctttattgtatttactaataatttatcacactgaaacataacttttgaatacttaagtgtaatatcacggatagttaacagtgtgttttgtatttgtagattttagcatcgaaactaggagaaataagaatggctgtagaggaacttcagtctataataaagagatgtgtaagtattaatttttgtaaaattaaatacctttcaaaatatgggaagggcacagattgtttttaattatatttgtggtcactcaaattgtttatcttctttaatccttgctttttttgacctgtaaagagcatgagtgggggaggcagattggattatttctccaggtgacatacttatctaaataaccttttacattttaatcctgatccttttcatagatttcactggtacagtagatttcaaggtcacttattaaagtatttattagggtaatcctaattttgatacgtgtgttatttacgttacatttatctagaatttaaacagatttccttttttcatagataaatcaagaagttattgtatttaatttttatttgcatatacttttttttgtttgttttttgggttttttttttttttgccagcaaatcctagaagagcaagactttaaagaagaggattttggcctatttcagttagctgggcaaagatgcatagaagaagggcacacagaccagctattagaaattattcaaaatgaaaagaataaggtgcgtacaatcttggtgtttacttttcagtcttgggaagagaataatcacatgatgctattcatccagtcatttatccatcaaacatttaagaatctacttaaattttcacagtagggaactgaaaacaaaaaaagaattagaaatatttaggccaggcgcagtggctcacgttcgtaatcacagcgttatgggaggccaaggcaggcagatcacttgagcccaggagtttgagaccagcctgggcaacagagtaagaccctgtctcagaaaaaaaaaaaaaaaaaagaaaagaaacagtcatatacttgaaggtttttaccatctggtcaaacataaacatgtaaacaactaacaataatgaggcaaaataaataattgctatagttgaagtaaagagtttttagaagaaacagaattacttctggtttagggagtccaaaaatggtgtttgagtcattaatttacaatgagaaatatacatatcaagcaggctaaatattcattttgggtgatcagcccattctcctccagccaaatgtgtatggaaaaccaaattttaattaaaacagtattttatgtgcatagaatcagaacaggaggaaaacgatatgtcattatactagccagtatcatccagttacaatggtttgagaaatcatcctccacaatggaaaaggatcttatttgtggatcaggaataactttttcctgggacactgtgttggcaacatcctgccaaattttgtgtctttggatactccttataaggaagacggctatggtttggctctgtgtccccacccagatctcaccttgaattgtaataatccctgtgtgtcaaggatgggaccaggtggaggtgattgaatcatgggggtggtttccccatgcttctcatgatagggagtgagttctcaccaggtctgatggttttataaccatctggcatttcccctgttggcactcagtccctctcctgctgccctgtgaagaggtgccttccgccatgattgttaagtttcctgaggcctccctagccatgtggaactgcatgtcaattaaacctcttttctttctaaattacccaggcttgggtattttttcatagcagcatgagaacagactaatacaaagaccatcttccttctaggtacacactctttcttcatttgcagtgctacttatttattagaagttttctttcttgatatcacagtgtaatcatgttgatctgtgtttctctccagggcatcttgattggatttgggggattcctaaaactttttaatcatatattattataacatctcttagtcagtagttcaaatggcttatacccttcttattttttattaaaataggacattttatttagtttttgatacatgtttatgataactttgtaacctccaatataataaatcttatgttttttaaactcttcttgatttttttctaattgcgttctcaggataaccttctaaagtacttagctttcagctaataataaaaaaattaataacaactaatatttattgcatgtttacatgtaccagatgctgtctttagtcctttacatttattaacttaattagtctctccaaaatctcagaaggtaggtgttcattttgtaactgaaaagttaaatgacttgcccaaaagtaagtcagcttttatgtaacatccaagattcagacctgtgtagcatggttttggagctcctaaccactctgctctacctctggttagtgctgtatggcgtatggttttagggtagaatacaggggattgcttgattgagagggagaggcatcaaaaatgactgggtttctagcctctaaaaggataacatatgatatcaaacagaaaaaggcaacctaagtagagggaaaagttttctgaaggaacaagtgagttgacttttagaaattttgagtttaagtacagcagtcaattggaaaataaggttttgagctcagtagagatagaggaattaagatgtagatctctgagacacatatctgtgagactttaattacctaaagattgggtaattgaagcattgaggagtgaaaaaaaaaaacaagaatttacctgagttcacataaaaggggcagaagagaagaggcccaagatcccatcttgaagaatttaagaaacaggtagagagaagaggcctgccaaggagatgaggatcagcaccacatcagtgaggcagaaggaaaagggaagtataaacaaagtatttttcaggcattgcatgccttagcgttttatttttagcatgcttctgaatagctaatgggatagatttaaacatgtgaggcttagtcttaatagtttgagaatcacctttgcaatatgtggtcagctaaatgcaaaggtttagatattgataagacaatgttcaaaactgactacaggctgggcacagtggttcatgcctataatcccagcactttgggaggccgaggcgggtggatcacctaaggtcaggagttcgagaccagcctggccaacatggtgaaaccctgtctccactaaaaatgcaaaaattagctgggcgtgatggtgcgcccctgtaatcccagctactcgggagactgagatggggggattgcttgaacccaggaggtggaggctgcagtgagccaagatcgtaccactgcactccagcctgggaaacagtgagaccccatctcaacaacaacaacaacaaaaaactgactacaatttaattttcttgccaggtgacactatcaaaattgaccaagatttactattatcttcacctataagactgaattaaagaaaaaaaataaaaataaaaagatttactatttactgctttgtgagagaccattcacatactatttattacagtatattataattgttgtagttattgttaatctcataaattaaactttgtcacagatatgcatgtatagtatttatatatagtgtttggtactattcatggtttcaggcatccactgggggtcctggaatgtaccccctgcagataagtggggagactactgtatcgtatactctatttttattatcttacaagactggggtcaagatgaggtattataggtgtcattttgtcttcttcctagatcagattttttttaaaaaaattctaatttttgtgggtacatagaaggcatatatattgatgggtacatgagatgttttgatatagacatgcaatgtgtaataagaatatcatagagaatggggtatccatcccctcaagcatttatcctctgtgttacaaacaaaccaattatactcatttactttaaaatgtacaattagttattgactatagtcaccctgttgtgctatcaaatagtaggtcttattcattacttataacttttttttttttttttggtacccattagccatcttccctgcctcccactaccattttcagcctctggtaaccatcctcctactctctacgtccgtgagttcagttgttttggttttcagatcccacaaaaaagtgagaacgttcaatgtttttctgtgcctgacttctttcacttaacataatggtctacagtcccatccatgttattgcaaatgacaggatgtcattcatttttgtggccaaatagtactccattgtgtatgtgtaccacattttctttatccattcatctgttgatggacacttaggttgcttccatatctgagatattgtaaatagtgctgcaatgaacatgggagtgcaaatatctcttcaatatagtgatatcctttcttttgggtatatacccagcagtgggattgctggatcatatggtagctctatttttgtattttttgaggaactgccaaactgttctcattaatggttgtagtaatttacattcctaccaacaatatctaaaaaaaaaaatacaaaaaattagccgggagtggtggcgggcacctgtagccccagctacttgggaggctgagacaggagaatgacgtgaacccaggaggtggagcttgcagtgagctgagatcgcgacaatacatgtcgcgacaatatatgagggtttccttttctccacatccttgccagcatttgttattgactgtcttttgtatataagccattttaactggggtgagatgatatcccattgtagttttgatttgcatttctctgatgataatgatgcgtaccttttcatatgcttgtttgccatttgtatgccttttgggaaatgtctattcaaatcttttgccaattttttaatcggattattagattttttcctttagtgttgtttgagcttcttttctattctggttattaatctcttgtcagatgggttagatctgctttttcattatttatatatttttttgagatagggtctgtctctgtcacccaggctggtttgcagtggtgtgatcacaactcactgctacctcgcctcccaggctcaagccatcctcccactcatcctcccaagtagctggggctacaagcgtgtgccaccagacccagctaatttttgtattttatacacagggtttggccgtgttgcccaggctggtcttgaactcctgagctcaagtgatccacccacctcagcctcccaaagtgttgggattacaggcatgagccaccatgcttaaaaaaaaaaaaaaaaagaaaagaaaagacggggtgcggtggctcacgcctgtaatcccagcactttgggaggctgaggtgggcggatcacgaggtcaggagatcgagaccatcctggctaacatggtgaaaccccatctctactaaaaaaaaaaaaaaaaaaggcaaaaaattagccaggcatggtggcgggtgcctgtagccccagctacttggggggctgagacaggagaatgacatgaacccaggaagcagagcttgcagtgagctgggacagcgccactgcactccagcctgggcgacagagcgagactcagtttcaaaataaataaataaataagaatgtatttaactttaaaaaacagagacagggtctcactaggttgcccaggctggtctcaaactcctgggctcaagtgatcctcctgcctcagcctcctaaggtgctgggattagagacatgagccactgcacccagccaaccaccgtgcttttaaagaaggactctaggagggtagtgatcttatccagtgtgttcctcactttatttctaacctctagaatattatagtgtaggcttggtaaatactgatgagttaaaatacaaagcaggccagagaagtggaatacattgttgatcctttgagaattagtggttttgataatgaatgtgaattagtcattataaagataaacttttacttgtatggtaagcattctgaaatatctttgaacatagaagccacttgtatgtaggagagaaaattaatgaagttgtatcccttcttttttttataaattacaaggattatatttagagactccaagaactttaaaaggtacatgagcattggctggatttctttatgaataaggggagcaaaattgtctgtggaagttaagtacctgtattaagcaaattaactcttttgttggaaatagaggcactatttaaatcttgggaaacaccaacttgcctgataaaaagtaaagacccttttgcctttcctcagggaacatattaaaaactatttaaaaatgttgatgtctgttagtagccaaccctggaaagtctctggtgaaatgtcataggcttcacttgtctcatcttcctatttcagaaacaattctgagctcttccaagataggaaagcacactgcgagagtcctatagatggcagtgtttgctttactctgaaaatgtttttacaggtcatcatcaagaatatgggctggaatctcgttggtcctgttgttcgatgccttttgtgtaaagataaagaggatagtaaaagaaaagtttattttttgatctttgatttattggtaaaggtaagttaacaaaacaaggttctctttatcataacacacagcagtattttataattccctttaatgtttattgtttggtaagaaagcttttggttcatgaaagtacatgcagaaaggaactcgttggagaaaagacccagtcttattgattggataggcaattccatttcaggatttcccaaattttctggataaaagaattgtctaacctcatattaacctcatatcggacccattgattcagcatctccagggagagacctgggaagctatatcttaacaagtagccttatcgtatagatgtggaatacaagctttagagaggtagttcaaggtcacatttatcttttggcaacattggaactagattaaaatctcagtcctctttcctttgtggtatgttccctaaaagaaaatggaaggcctagaatacaagtgattaaaattgaagtaggaatagggtagaatacagatcagttgtgactaacaaccttagaaagcgaccctgggtaaaaggctagtagagtttacagtcaatatttgatggccaagaaagataaattctgagaaaaagtatattataagaaactgtttagtgatcagtgcaaatatacccaaatatatattggaaggagagctccatctgtatgagttattgactatgggagctgggagcttttaaaaaaccagtcaagtgagatgataagatatggccagtcagaaagcaatgcaaagttttacctgttcaaaaaatacaaaagagattccagactagtctaaataggcttgcagcatgggattgaaaggtcccacctgctggagcccctgagaatctgttaaggcaatttcagagtggacaggtgaagctcaaaggaaacctgagcctaaagatccattgacttcttgctttttagttttatagttacttgaccatcacagattctgtgttttgctcatgcatattttttcaacaattgtataaataattttaatgttaagcaaaaacataattgtataatattttgtcgatacatgccttcttaaaaatagtaataatgtggctttaaatacaacttgtattaaacaggttcaattgtgaatatttttatagttatgcaatccaaaggaattattgttgggtttgcttgaactgattgaagagccctctggaaaacagatatcccaaagtattcttcttttgcttcagccattacaaacaggtaatgagaattttgatatcagagtacttcttgttgtatctctaaatgccttgatggttacctcaaaatgtcaatactacaccaaagtaaagtttacagctaattagtgagtactctgcttaaaccaataatagcaatgccaatgtgaatactgctgctcatagaaagattatagtatctggccagagtgggtacccagtaaatattctgttgaatgtcatactatttttcatgtgctatattgaaaactatacctttttgcctaaccttcctatctgctgcttaaatctagaattttctctctaaacatgtttcaagggttacctctgtggtgtctgcagtactaaatctgatagcattatggtagtctggaagagtatcaggcaaggcattgctcagcctctgctttgggaggttggattgggcatagcaaagctactactgaagaatgaaacgaggagatatgggatgataaggctccatggctgagtgcagtaacagtattggtaggtaatgggtcttagcaaccaaggcagacagtatccataggaagaggttatttttcattttaggaaattcgtttatctcacaatctgatagagggacctagaatcagaaattaaatttgttttaaatatgaatgcctgccagcttcatactacctgtaatattcagtcttctagggaaaaaaaatctaataataccacctcctatttgtgtagtgctttatagtttacaatacacttatattttgtgcttataacaacccaaaaacatggaaagaacatgtttctgtcttaagtacatagcctgttacacatagtctgttataaacataacctaaacagcatttcatggcaagatgctgtattattttatgcacaactaagaagaaaaaaacactgccaattagactgtgatgtgtcatcttgattcaagagttgttaaaatgtgggaggaggaagtgtcttataattccacatttgccgaatttcttgtcccatgtttagcatacttgatgagcgacaacttgatctctgttttagtgattcagaaacttcataacaaggcatattcaattggattagcattgtctaccctttggaatcagctatctcttcttcctgttccatactcaaaagaacaaatacaaatggatgactatggcctttgtcagtgttgcaaggccttaatagagttcactaagccttttgtggaagaagtcattgataacaaagaaaactcactggaaaatgaaaagttaaaggatgaattactgaaattgtaagtataattttaagaacatctcacagtggacttaagtaattgatagttcagttattttatgtttcttcactttgtttgacatgtaaatagaaatctagtttcagattttgaattttagaagaatgtggggttcagttgatacagcatgggaacttgagacatttatattttaaaaaattataggccgggtgtagtggctcacacatgtaatcccatcactttgggagactgaagtgagaggattgcttggggccaggagtttgagacgagccttggcaacatagtgagacccccatctctataaaaaaatttaaaaattagctagatgtagtggcatatacctgtagtgctactgcttgggaagctgaggctagaggatgggttgaatccaggagtgtgaggctgcagtgaatgatgattggccactgtactccagtctgggcaacagagcaagaccctgtctttaagaaattaattaataaaataattataaaaccaaaatccattcatttactttatattcttctttgtattgccttattcatcatagtaggtgaataatgaaagtgggggaaatagatacatgtagctcagggtgagtgtgggaaatagatataggtagctctgtggagaaattgtgttttactctttcaaaggaagcagcagaaagaccaccagacagaacatccaactggaccacaaaaatagtggtagagtatccacccaatagcattccctccatgggtactatagactaaacatctactgttcaatatggctgtagcacttgacatatggctggtccaaattcagatatactttaattataaaatatcccctggattttgaagacttgttatttaaaaaaaaaaaacagtaaaatacctcaatttttatattgataacatgttgaaatgacaatatttcagatatactgggttaagataaattattaaaatcatctctcccattcttactacttttttcatgtgtctactaaaagatcttaaattatatatggggctgtgttatatttctattggacagtgatagactagattaattacatggaccagtaatttttaaattttggctacttgggaggctgaggcaggaggatcacttgaggccaggagtacaagaccagcctgggcaacatagcaagacctcgtctctaaaaaatagaatataaaataatattttaattttggagactaatactatttttagcttcctacttgtcaggttaggacatttaaaaaaaaatttacagccagacgtggtggctcgcacctgtaatcctaacactttgggaggtcaagctgggagattgcttgagctcaggagtttgagaccagcctaggcaacatagtgagaccctgtctctacaaaaaataaaaaagttagctgggcacagtggtgtgtgcctgtagtcccagctacttgggaggctgtggcaggaggatcctttgagcccaggagtttgaggttacagtgcactattattgtgccactgtactccagcctgggtgacagacaccctgtctcaaaaaaaaagttttttaccatttataaaacccattatttcataaaagaaaaggtattttaactaaagaaataggaaaggcttaatcacagaataaagtttggttttctaaataaaacaaatagagctgtgtgaaaaaatgactgtatttcttgattttttctttgaactaatgaaaacaacatcatagactagcaccagccctcaaacattcagaattcaatggaatagttcagatgtagaagtcagtcttagcatgttgagtctagcaaggtgttctcatgttctccccattactagtacgaacgacgttacatcaccagttttatagaccattgagttattgatgcttgtcttaatccatttgtgctgatataacagaatacctaagactgggtgatttataatgaacagaaattcattggttcacagttctggaggctgggaagtctgcaattaaggcgctggcatctggcaagggccttctagctgtgtcataatgtggctgaaggtaaaagggcaaaaggcaaaagtgggctgaacttgcccttttataacagcattaatctcatccgtgagagtggagcccccttggcctaattcccacctccttatggcagttaaatttcaacatgagttttggagagcagagtcattcaaaccatagcagtgcttatgttatttttcaagtaaaattaacttagatttgaagacctagggattttatacttggaagtgttgatttcatagttacctatttcttatgccttagttgtttcaaaagcttgaaatgccctttgctgacagcacaattctttgaacagtctgaagaaggtggaaatgatcctttcaggtattttgcatcagaaataatagtaagtacagctaatttaatctgctataatcttaaatgttatcccactatattctcagtactgcacatgtaaattgatacattcattaataaagaaatgtgtattttttgtagaacacacataaacaaaagatggaaaataaaacagcaataattttattatccaaagataaatattaacatcctccaggcttttttcttatatacttatttataataatacatatatataaatttttcaaagattttatatatatatataatcttgtaatctacctttttcctcttcaacagtatattatgaatatttttccattggcttaatagtgttccatggtatggacttagtataatgtatttcacctgtgccatatagttcaacatttggattgtttctaattttccattattgtaggacaactccaagttttctttttttaactgttaagtctatgataagtaacctagtaattaaatttttgcatacttttcaaattatttccttaaaactcctagagtggaaattccatgccctgtgataaatattttcaaaatagctccatatttaagtaaattttattttaaaagcaatttggctttatgcatcaatagtattttaaaatgtgctcagattctgtattagagaaataatctgaaatattaaaaaatttattttaagttgatgtttctgaatttcaaaagagaaagtccatgtggctgtgtagttttcttcagccatgttcagctacatgagtgcaggtgcagcataggagtaacatttggttgaattagggtggggttttaagaacagggtaagttgtagagagcaagaggggggcaagggattgagcatgtatgtaaggtgatttctttttcaattatactttaagttctagggtacatgtgcacaacgtgcaggtttgttacataggtatacatgtgccatgttggtttgctgcacccatcaactcatcatttacattaggtatttgtcctaatgctatccctcccccagccccccacgccccaaccagccatggtgtgtgatgttccccaccctgtgtccatgtgttctcattgttcaactcctaccaatgagtaagaacctgcggtgtttggttttctgttcttgtgatagtttgcttagaatggtggtttccagcttcatccatgtccctgcaaaggacatgaactcatcctttttaatggctgcatagtattccatggtatatatgtgccacattttcttaatctagtctatcattgatggacatttgggttggttccaagtctttgctattgtgagtagtgctgcaagaaacacacatgtgcatgtgtctttatcatagaatgatttataatcctttgggtatatacccagtattgggatggctgggtcaaatggtatttctagttctagatccttgaggaatcgccacactgtcttccacaatggttgaactaatttacactcccaccaacagtgtaaaagcgttcctatttctccacatcctctccagcatctgttgtttcctgactttttaatgatcaccattctaactggcgtgagatggtatctcactggttttgatttgcatttctctgatgaccagtgatgatgagcattttttcatgtctgttggctgtataaatgtcttcttttgagaagtgtctgttcatatcctttgcctactttttgatgggattttttttttcttgtaaatttgtttaagttctttgtagattctggatattagccctttgtgagatgggtagattgcaaagatttttctcccattctgtaggttgcctgttcactctgatgatactttcttttgctgtgcagaagctctttagtttaattaatcccatttgtctattttggcttttgttgacattccttttggtgttttaatcatgaagtccttgcccatgcctatgtcctgaatggtattgcctaggttttcttttagggtttttatggtgttaagtcttacatttaagtctttaatccatcttgagttaatttttgcataaggtgtaaggaagggatccagtttcagctttctacatatggctagccagttttcccagcaccatttattaaatagggaatcctttccccattgcttgtttttgtcaggtttgtcaaagatcagatggttgtagatgtgtagtgttatttctgaggcctctgttctgttccattggtctgtatatctgtttcggtaccagtaccaatctgttttggttactgtgtccttgtagtatagtttgaagtcaggtagcttgatgcctccagctttgttcttttggcttaggattgtcttggctatacgggctcttttttggttccatatcaactttaaaatagttttttccaattctgtgaagaaagtcagtggtagcttgatggggatagcattgaatctgtaaattactttgggcagtatgaccactttcatgatattgattcttcctattcatgagcatggaatgttcttccatttgtttgtgtcctcttttattttgttgaacagtggtttgtagttctccttgaagaggtccttcacatcccgtgtaagttggattcctagctattttattctctttgtagtaattgtgaatgggaattcactcatgatttggctctctgtttgtctattattggtgtataggaatgcttgtgatttttgcacattgattttgtatcctgagactttgctgaagttgcttagcagcttaaggagattttgggctgagacgatggggttttctaaatatacaatcatgtcatctgcaaacagagacaatttgacttcctcttttcctaatcaaataccctttatttctttctcttgcctgattgccctagccagaacttccaacactgtgttgaataggagtggtgagagagggcttccttgtcttgtgccatttttcaaagggaatgcttccaattttttgcctattcagtatgatattggctgtgggtttgtcataaaagctcttattattttgagatacgttccatcaatacctagtttattgagagtttttagcatgaagggctgttgagttttatccaaggccttttctgcatctattaagataatcatgtggtttttgtcattggttctgtttatgtgatagattacgtttattgatttgcatatgttgaaccggccttgcatcccagggaagaagccgacttgattgtggcgcataagatttttgatgtgctgctggattcggtattttattgaggattttctcatcgatgttcatcaaggatattgccctaaaattctctttttttgttgtgtctctgccaggctttggtatcaggatgatgccggcctcctaaaatgagttagggaggattccctctttttctattgattggaatagtttcagaaggaatggtaccatctcctctttgtacctctggtagaattcggctgtgaatctgtctggtcctcgactttttttggttggtaggctattaattattgcctcaatttcagaacctgttattggtctattcagagattcaacttcttttaggtttagtcttgggagggtgtatgtgtctgggaatttacccatttcttctagattttctagtttatttgcatagaggtgtttatactattctctgatggtagtttgtatttctgtgggatcagtggtgatatcccctttatcattttttattgcatctatttgattcttctctcttttcttctttattaatcttgctagaggtctatgtattttgttgatcttttcaaaaaagcagctcctggattcattgattttttttgaagggttttttgtgtctctatctccttcagttctgccctgatcttagttatttcttgccttctgctagcttttgaatttgtttgctcttgcttttccaattcttttaattgtgatgttaggatgtcaattttagctctttcctgctttcttttgtgggcatttagtgctataaatttccctctactcactgctttaaatgtgtcccagagattctggtatattgtgtctttgttctcattggtttcaaagaacatctttgtttctgccttcatttcgttatgtacccagtagtcattcaggagcaggttgttcagtttccatgtagttgtgcagttttgagtgagtttctgaatcctgagttctaatttgattgcactgtggtctgagatacagtttgttgtgatttctgttcttttacatttgctgagtagtattttactaccaattatatggtcaattttagaataagtgcgatatggtgctgagaagaatgtatattctgttgatttggtgtggagagttctgtagatgtctattaggtccacttgttccagagctgagttcaagtcctggatatccttgttaaccttctgtctcattgttctgtgtaatattgacagtggggtgttaaagtctcccattattatcgtgtgggagtctaagtatctttgtaggtctctaaggacttgctttataaacctgggtgctcctgtattgggtgcatatatatttaggatagttagctcttcttgttgaatttatccctttaccattatgtagtggccttctttgtctcttttgatctttgctggtttaaagtctgttttatcagagactaggattgcaacccttgcttttttttttttgctttccatttgcttggtagatctttctccacccctttattttgagcccatgtgcatctttgcatgtgagatgggtctcctgaatacagcacaccaatgggttttgactctttattcaatttgccagtctgtgtcttttaattggagcatttagcccatttacatttaaagttaatattgttatgtttgaatttgatcatgtcattatgatgatagctggttattttttctgttaattgatgcagtttcttcatagtgtcactggtctttaccatttggcatgtttttgcagtagctggtaccggtcgttcctattcatgtttagtaaatccttcaggagcttttgtaaggcaggcctggtggtgacaaaaatctctcaccatttgcttgtctgtaaaggattttatttctccttcacttatgcagcttagtttggctggatatgaaattctgggttgaaaattcttttctttaagaatgttgaattttggcccccactctcttctggcttgtagggtttctgctgagagatctgctgttagtctgatgggcttccttttgtgggtaacctgacctttctctctggctgcccttaacagtttttccttcacttccaccttggtgaatctgacaattatgtgtcttggggttgctcttctcaaggagtatctttgtggtgttctctgtatttcctgaatttgaatgttggcctgccttgctaggttatggaagttctcctggataatatcctgaagagtgttttctaactttgttccattctccctgtcactttccggtgcaccaatcaaacatagatttggtcttttcacatagtcccatatttcttggaggctttgttcgtttctttgcactcttttttctctaatcttgtcttcttgctttatttcattaattggatcttcagtcactgataccctttcttccacttgatcaaatcggctattgaagcttgtgcatgcgtcatgaagttctcgtgccatggttttcagctccatcaggtcatttaagtgcttctctacactgtttattctagttagctatttgtcttaccttttttccaggtttttatcctccttgtgatgggttagaacatgctcctttagctcggagaagtttgttattaccgaccttccgaagcctacttctgtcaactcatcaaactcattctccgtccagttttgttcccttgctggtgaggagctgtgatcctttgaaagagcagaggcgctctgttttttggaattttcagcttttctgctctggtttctccccatctttgtggttttatctacctttggtctttgatgttggtgacctacagatggggttttggtgtagatgtcctttctgttgatgttgatgctattcctttctgtttgttagttttccttctaacagacctctcagctgcaggtatgttggagtttgctagaggtccactccagaccctgtttgcatgggtatcaccagtggaggctgcagaagagcaaatattgctgcctgatccttcctctggaagctttgtcccagaggggcacccgcctgtttgaggtgtctgtcggccccctactggcaggtgtttcccaatcacgctacgcgggggtcagggacccgcttgaggaggcagtctgtctattatcggagctcgaatgctatgctgagagaaccactgctctcttcagagctgtcagacagggatgtttaagtctgcagaagctgtctgctgccttttgttctactgtgccgtccccagaggtagaatctatagaggcagtaggccttgctgagttgcggtgggctccgcccagtttgtgcttccaggcctctttgtttacactgtgagctactcaagcctcagcaatggcggacaccccttcccgtctagctgcagcctcgcaggtcgatctcagactgctgcgctagcagtgcgcaaggctctgtgggtgtgggacccaccaagccaggcatggcagggtatctcctggtctgccggttgctaagactatgggaatagcacagtatttggtcaggagtgtactgtttctccagaaacagtctgtcacggcttcccttggctaggaaggggaaattcgctgacccctcgcacttcccgggtgaggcaatgccccgccctgcctcagcttgccctccgtgggctgcacccactgtccaaccagtcccagtgaggtgaaccaggtacctcagttggaaatgcagaaatcactggtcttctgcgtcgatctcgctgggagctgcagacctgagctgttcctatttggccatcttggaagtgactcctttttttttttttttttttttgtgacagagtctcgctctgttgcccaggctgtcgttcaatggcatgatctcagctcactgcaacctccacctcctaggttcaagcaattctcctgcctcagcctcccaagtagctgggattacaggcacccgccaccacacctggctaattttttgtatttttagtagagttggggtttcgccatgttggccaagctggtctcaaactcctgacctcacgtgatccacccgcctcagcctcccaaagtgcagggattacaggcgtgagccactgtgcccagccgcaaggtgattttaatgtacaaagtgactttaatgatggacatagaatttaagctgggtaaggagtaaagttaggacatgcaagagacagtgaaaaggtgattggatcattaggttgtagaacctggtgtgggtgacagatgtttggagttaggttactaaaaggggtgaactgaaaaaataggtgtaaagaataggatgcttgaaaatagtattatggaaagattatagttactagtatcaatgtctggggtgtgaccatgagagggtgttctaaaggagaggatagaggcaaaggtcattgggctagagaaaatgaaatacttgagatttcagagtatcagaagatctttggttgtacatttaaatcacacagaattataatgttggaaagccatgtgatggggtgaccttggggtctactaactgcaacaaggaggggtagaaatggtaaagtcataaaaaatgagtttcagagttgagggatttttagagaggatggggagagaatggtgtagaagcagcaaggagaacagatgtattcccaggctcagtggtacaatgggtatagatgaaaaatacagtagtcttttgaagggttgcagagaaagcagctgttttcagatgagagccaattttaatttaggagagatggaaaaaggggtcagatgaagggatgctagaagtttatgggaataaattctgaagatgagagatgacttggtgactgatataattaggaatacataatttaataaggttaatgctgatggtcacgataatagtgaagaggctgtgagggatgaagtaggagaggtgacgggttttctctggagcacacaaaagtctgggggctcttcattgttaccagtgctagagcacagtatcatcttctggaggtagtataagcaccatcacatatgatatgtattttgagaagacaactatgaaagttggaaactattaaaggaaatctggtgatgtagaaaaaccaaactcagtttctcctactatagtcataacaagtttctgacaccagatgtatggagttccctgccctgccccctgcccttcacggcaagcaagcaagcagttgtacaacggacaccaattgggtgtcctctaattcaattccaacgttacctacctggagatagtgtcagatttcacaggttgagggctaaatacctcaagactgcccccccttccaatgccagtctcaagccctaggatgttttacctgtgctctaactgactggcaataaatcaggattcccaggaccccctccttgggtttgattaatttgctagattggcttacagaactcagggcactgcttacttacatttagtggtttactataaagaatattaccaaggatacagatgaagagatgcatagggctaggtataggggagggggcaccaagtttccataccctgcctggatgcaccaccctactggaaacttcgtgcgttcagcttccagaagctttctgaatccaatcattttgggtttttatggaggcttcattatgtaggaatgattgattacatcattgaccgttggtaatcaacttaatattcagcccctttcccttactggggtgggatgggggtagggctgtgggactgaaaggtccagccttctaatcacagggttggttcccttggcaaccagctcccatcctgaggctatccaggagacgcagctatcagtcaactcaatagcataaagacacttatcactttggagattccaaggattttaggagttatatcccaggaagtgggaacaaagagcaaatatatatgtcacagtatcacagatgttaaatctgggagtgatgtaatcaaactgtgtttaggattcatcactttaaaggaagatgactaactgggataaaattggaagtagggaagccttgggagttaagtaagcaatgatgggagcctgagtatagatgtatggatattttttgtttgtttcctttttttaattgactaaatttatgacacattctgttagtagggatatagttttaaagatgaagaaagggcagatttgagaactttatagtaggtaaaattggcaaaatttggtcattgattggatttagaataaaacatggatgagggtttttgcttggataactgggcagatgaaggtgccaatacttgagatagagaatacagagcaagaatctgggggtcttgtgcctttaaaacaaatgtattgtaaaaatttacaaacattcagaaaagtactaaaaataatctagcacatgcccatgtacccatcacccagcttcaataattatgaacattttgccaattttgttttatctgtcctcctccttttcttgctgtagtataacaagtcctaaacataattcatctgtaagtctttaaggatgcttccctaatgacaagggcttttttaaaaaaacaaataaccaccaggctattatgacacctaacaagattttattaccttttgttaaaattttttgagacagggtttcactcccattgcccaagctggagtgaagaggcatgatgtcggctcactgaaacctctgcctcccggactcaagcagttctcctgcctcagcctcccaagtagctgggactgcaggcacacatcgtcccacctggccaatttttgtattttgggtagagatggggtttcaccatgttacccaggctggtctcgaactcctgggctcaagcgatctggctgcctttggcctcccaaagtactgggattacaggcgagagccactgttcccagcctaactcctaacaagattaacaataattttttaatatatatctaataaccagagagagaataggtttttaaggaatttaaaatataatattttaatatgtaaatatatgtatatttaatatagaattatatgtaaatgtgtatatatattttttgagatagggtcttgctctgtggcctaggctggagtgcagtggcacaaccatggctcactgcagcctcaacctcccaggctcaagtgatccttccacctcagcctcctgagtagctgggacttacaggcataccccagcatgcctggctaatttaaaatttttgttttgtaaaggtgaagtctcactatgttgtacagactggtcttgaactcctgggctcaagtgatcctcccaccttggcttcccaaagtgctggaattacaggtctgagccaccatacctggccaggagatactttgaatgagagggggtgagattacctaaagaggtgacaagagaaaagggctcaggagtgaactctagagagtaccagcacttaaaatgagcccaagaaggaagtcggaagtggtagaaatacacagaaactggtgtagtagagttttagaaggatagaggtgatcagtactgttaaatgcatagaggtatgctgaaaagcatctgtaggatttaggaagtaagatggcattggtaatcttagcaagaacagtgtaagtacagtgttggagacaaatcagagtggagttgataaaagaatgaatgacagatgagaaaaaggagatgactagtgtaagctattctttaaaagaggttggatgaataaggaaggagaggtaatagctagaagacatgagctaagggtaggaaggtaatggaggtgggaagacttgagcatgtttatagctgttggggtgcaaactgttgagggaaaaatacaagtgtttatgagataactgaaataatgtggcttatgagcaaatggctggacatagtatcaaggccataaggaaagtcctagacaggaagaactagtgggtatcaaggtaagaaaacatgttgagaaatttgtagcaggaatggaatcttacaattgaggggagtcaaacccactggcctcagatttctaggtgaaggagagatgatctcttaataatgaggaggtagaaatgggcattgagtaaaagggcttaaggaaactggtaaaggtttggaatactgaggggaaaggaaagagatggtggaagaccacggaagcatgagtcagtagtactgagcactcaatggtgcttggaaaccacaactatagtggtaacagtctgtatttttttatccagcaatactcagctccctgtgtgtagaagcagagaaggtagattgcagttatttttccaaggctggcattttactgggtagatactgctgaaggaaatacagggtgcagatagttcagctggtcaataatccatgattcaggttggatagggaaagaaggggggttaggagggaatgcctaggtaggtcaaaatgtaggaatcacaggactggagaagtcagaagtagaaaagcagattgctaggagagacaggatgacagattttggtcagaaaatgggatattggagtttaaagtatcaaatacagaatagttccagatgttcagagatccagcatgggattaggtactgaaatggattagaactaaaagtcactagaatttagaaattgagaaccatgagagtggatgcaatgacttgttgcttgattgaaaaataaattaataataataaaggaccatgagactagcctgttataggggttatctccatgaacattgaattttcccaggatcatagcaggaattgggtagagaaaaagattatgagaaggtgccagagtcttcagtgaatgtcaggaaattaccaggaagtcagcatatgacagagaaaaggacagtatgttatctgcatcaaaggaaaatgtgcttttgttgaaaagtacagaaaaagccaatactacaatactgtgctaagcccctacctgtactcctctacccaacagctgcattccaggccctgtggtataaaaggtgtgagaatgagcatctcccaccagaaatcagacaggtttagttaaagcagtgaggcagaacaagcatcctatgaagagactgaggatgtaggtgagtggttctaaaatctcagtagaaggaacattgcaagtagaaagagccagcagtaaggatgcacgtagcagtctagaagtagaggtgagaccagcttggagatgaaatgaggagatgtcttctgttctgtgctggagaagtactggtaagtgtggtgtggttgggattcacaggcctcagccatcctcactttggtacaagttattttggtacagaactactagaatgtcccaaaggctgtagtacaggaacatttctgaaaggacaaaagctgccatgaatattgagaaattgtatggtgccaggtacagcctggatctgagcaagactgctggatggtgtgtggatagatagtgaaggcccagatttgggaacagattggatctcagatatccagagcagcactgtagaatctagttgcatataataatgttttaaaaagggtatcttaggctgggcacggtagctcccgcttgtaggcccaggcctttgggaggccaaggtgggcagatcacttaagcccaggagttcaagaccagcctgggctgcatggcgaaaccccatctctataaaaaataaaaaaaataaaaaaaaaatagcgggcatggtggcatgtaccagtagtcctagctactcaggagactgaggagggtggattgcttgagcctggggaagtcaaggctgcagtaagccatgatcatgccactacactccagcctgagtgacagagtgagaccttgtcgccaaaaaaaaaaaaaaaaaaaacagggctaccttactctggaaaaaacacatgtagcattggctgaataaagaaatggagcttcatgattaaggacatttggaatcagagtgcaataaactttttgtcttgtagctataaccagaatgcatggctttgaaaatcactgcagcagtatatatttagcatctggtcgctgaatagcagtctcttgtgactgaggatgattttccatggttcctttttgtattctgaaatgactaatggaaccatctgggatcagcagattttaagtccctgaaggctggaaaagacttatacttggctttataattccccacaaagtcaggcccagcaccttgcacttaagtgtttattgaataaaagagtgacttgtgtggaagttattcattctgctttagctgtttttgtcattcattcccttttaactcttgtagtttgttgtgactttaactttcttacgctttttttgtggagctgctcgataaatatttgacataggtattatgtcattttatggctcatccagtgtcacacaagtagtaaatggtagagccaaaactcaaaatcaatgtcagtggattctgaaggtaggtgctttctggtacgctagaattagtaccagtataagaggcataggagtgatcttgtttcctgagcggaaagctttatttagccctgtggtcctacccactcatgcaaggatgcttctctttctcgtctcacatgagaaccctgatgactgagagatcaacagtgtttcctcaggcccagctgccctgcccagcgttcctgcatcccactctctacaggcacaatgttagtggagcattgttcctagagtattcttcatcttagttgctttacccttgcttcatatatttgtatgtctcacgtttcagattgctctcaaatatccctgaagcacttttttaaaaaaaattgtggtgaaatatacataaaattcatcattttaaactttttaaactatgattctgaattaatttagaatacttctgatgtataaaatgctatgtaaaatacgattttgctgttggcttctgtattagtttttcattgctgtataacaaattcctgcaaacttagcagtttaaaacagcatacctttgttatctcacagtttctatggatcaggagtccagccacagcttaattgggtcctctgctcagggtctcattgggctacaggccagttgttgactgggtctgtagtcttatcagaagcttaactggggaaagatccactttcaggtttcctccgctggcagaattcatttcctctaagctgtaggactgaggtccccattttcttgctggctgtcagccagggaccacatttagcttctaggagctgcctgtagttggtcccttgccatgtagttctgtccatgagccttctcataacatggcagcttagttctttaaagccagcaagggagagagtcagagagcaaagtttctgactctcagggaaggcctggaccccctttaaaaatatacctgattaagttagggccacccaactcaaaatctactgatttgggaccttaattacatctgcaaaaaccccttcacttttgtcatataatctaatcatgggagtgacatcttggcgcattctgttggttgaaagcaagtctcataggtcccactcacgctcaaagggagtgattacacctccccttggtgagaatgtggagtttgaatacacggggtggggggcattttagagtctgtgtgctatggtttccttttttatccatttcatagggttttttatcagcaattggacaccctttccccaaaatgatttttaatcatggaaggaaaaagagaacttggaattaccttgaatttgaagaagaagaaaataaacagttagcagactcaatggcttctctggcatatctagtatttgtacagggcatccatattgatcagcttccaatggtcttaaggtaagagttagtgtttggtttattcatgtattctaaaaggaatttcataaaattctcatttatctaatgtccaatatatgcatattaacacactaatacattttaaataaatagtaaaggctatttttaataagaatgatcccagctataatctgttaaagatagcagtagacaagtaatgaaagtggggagtgttgaaataggtgtaagggaatggtggggacaagaatcagaagatgataaacagggcttggttttgaagcttttgagaccaccctggaactagccaggtacccaggggtatcatcatcttttcactggattactgctgtaatcctgagtggatttatatatctacttttacttccttttaatttaacacattctcaacataccagaaagcgaagccttaaaagaagtcccttactgaaaaccctccagtggctttttattgctttaagaataaagtcttaatgcctttgcataacttctgagacaaacttgtgcctggtctggtccctgcttaattgacctgattcatctcctaccacctttcctcttgtttactatgctccagtgacacagaccttcttttgtttctagtttaaatgttatgaattttcctatttggcctttgtatatgcttaaaattctctttatccttaaatgtcactttctgaagaaagccttcactcaccacccaatttaggttgaatccttctattataattaccttgaccttgtcttcttttcccacaatgtttattaaaattatttttaaaatatataattttataatgtaatatcttctggactttgagttctatgataataaggattgtgtatttgtcttataggcattgggtatttgtgtgagtttgtgcatttatatatgaatatagctaggagtacattcgtatgtaaatgttgaaatactggctatcatttgcatgttcaccatgtatgaaacattatgctaataactttatatgcattatctcatccttataataagcctgtgaaatagagcattctctcattttacagatgaaaataacaggcttagacaagttaatataccactgaagatctaactactttgtggcataggtgggatgcagatagctctgtctgaccccagagcctatactcttaagcatcacattctatcaccaaaataacttatacagcatatgtatattaacttgctagggctcctgtaaaaaagtgctaccaactggatggttgaaataacagaaatagtttgtctcatagttctggatgctccttctgagggttgtgaaggagaatcttctccatgcctctctcctggcttctggtgatttgctcacaatctttgatggtctttggcttgtagatgcattatcctgttctctgccttcatgttcgtatgctgttctccctgtgtgcttgtgtctgtctccaaactttccttttacataaggacaacagtcatattggattagggcccaccctaataatctcattttaaattgattacctccataaccctatctccaaataaggtcaaattctgaggtactagaggttaggactccaacatatcttttttgggggagatacaattcaacccataacaatatgtatgtgtgtacatatctctgtgtgtgtgtataatatatatatttgttttgtttctattttagcccattgtaccttttgcagtttaatatggggcacattgaagtctttttgcaaaggtaagatcgtttagatggtatctcaaaatgaaatagtagtgttaaaatagtccttgttaagatcagcggagactgccttttctttgctaagctctaattaattaattggttattttataaaacagcgaggcaaataattcacgagagagacagaaatgagtcaaggaggttttacaccaaagtctgttttattttaaacttaagacagtattaagattttgtcttaagggcttttacagtcatctgtttctaaggtttcttctcttactccaaaagttggtaaattaaaacacctctaccccactgcatcctcctccatcttaaggaagggcagtcaataaaagaagttcttccgtatttttccttcatggacacagtctgtgaattgcatcaaaaggaaggaggtgtcttgacttccaccttttataatttagattattgacagtgatgtcattcaattacaacttttctcatttgaggtgctaagcagcaggactttctatttaaaaaaaaaaaaaaaaagccaggcacggtggctcacgcctataatcccagcactttgggagaccaaggcgagaggattgcttgaccccaggagttcgaaaccagtctctctctctacaaaaaatagaaaaaattagccaggagtggtggcgcctgcccgttgtcccagctacttgggaggttgaggtgaaagaatcacctgtgcctgggaggtctgggctgcagtgagcagagatcatgccactgcagtccagcctgggcaacagagtaagaccctgtcgcaaaagaaaaaaaaaaaaaaaaggaaattacagagtaacaggtatacataatttctagacagaaattaaagaatttcacagaactatatgctttgttttctttcactataacatgtaacatgtttaaattatcccctgagatcagttagggctttgcaattatcctctatgaacactagtgacagtttatcagtcccatctcttaccaggtgaaggaagatttgtaacatggcaatgtccaaagcttcagcatacaaggcaggaatttccaagggtctcctggcacaagtagttactaattctgtaaatttgctgtattatgtatgttttaatgattttatattcattacatttagtttctgttattcatacagtgataatatgtattgttttgaatctaagtcctaaattcttgagatttccaaactgcagagtcattgagtctttttttgaataaaaagaattggaaagattttacagaataatcaactggaatatatagcattggttatatcaggtttagttagtttcttagcacttgctgttgaagatctattgttttgaagttaggaaataatccctgagtagatttattttggtcagatttagtggccttagccaaaccgaaagacagatcaaagatggattaaaacttttgatcaagttcttcaacagaatttctccttaatgatatgcattttaaaagtgttaaaatttcagtttttgctgtatttttcataagatgaagtatcattctaaaatagtttacaaattcatgataaattttaatattatttttcagaacagaagagtctgttatctccaaaggattggtaagatgtttgttcccattataacttaaatacatagttatgtcaacaaataacagctgttgacttcactatatatgtatctgcatatattttaatctgtaggagctgctggagaatagtttattgagaatagaagacaatagtctactttaccagtacttagaaatcaagagttttcttactgtacctcaggtaaataaaatatgtattctaatattgaaaatagccctttgcctgttctgaacttaaagtaaggtcttttctgattcctttcccactcttttctctgcaacctttgaaaactctggtgtaatgctgtccagtagaactttgacaatatgaaagccactagccaaactgaacacttgaaatgtgactaaggaactattttttttttttttgaggtgtagtcttgctgtgtcgcccaggttggagtgcagtggtgctatctcagctcactgcaagctccacctcctgggttcattccattctcctgcctcagcctcccgagtagctgggactacaggcgcccgccaccacacccagctaatatttttgtatttatagtagagacggagtttcactgtgttagccaggatggtctcgatctcctgacttcgtgatcagcctgcctcagccccccaaagtgctgggattacaggtgtgagccaccacacccagccggaactaagtttcaaatttaaattttaatttatttaaacacgaatagctattagaggccaccattattgatagcacagcatccagtagaaaagcataactttcttcttttaacactttatttctgtagggatcttggaaaatgaagcttctttatgtttctcataactcaagttctcaggactccatctaaggcatccactgactcattaccagaaagactaatacacattgtgtttttccctcctatggtttattttgcccaatcctctttgttagttatgatatccaaggaaatccttagatttcagtgtgggaactggttttcctaatatttaaatagaaaaacatggtttttgttaacatattgtttgattgtttttaattaataaattatatttctgtagatttgatttcattttcttgccactgtagacataattgaaaattatcgtttgcttttaaaagtacactgtgtgacactctactcaatatcacttaaaaaatcaattgtagttagctttctggaatggaaggcttagggaaaaattaatttacttcacttttaaatctcctaccctcacttctctgaatttttagtatcctattgatgtattatagttgtttgtttgcagtcagtataatctgtttacatctgaattttacatttttttatttccagggcttagtgaaagtaatgacactttgccccattgagacactggtatgtaaatatttggtgactaaagaataatgagttacagtgagaaaatttgacaaataatttaattttctttttaaaaattttaatttgtgaaatttttatttaggaggtacaagtgtggatgtattacatgcataaaatggatagtgatgaagtctgggtaagctttattcattttatataataatattgtttgttccattttagaggaaaaagagtttagctatgcttcagctgtatattaacaagttggattcacaaggcaaatatacattatttaggtatgtatcaagcatggctaattgctaagtgtgtggttgattaaaagtcatgttaatgccatgtaattgttttagggcatagtatgtcggtatgttttacatgtaattcaactctggttggaacccatattataaattctcagtgatggctagagaaagggttaatcaaatatttcagacatactatatatatgtctatattttgtatgactaatagtatatattgcagttcaatcaattggaatactctaaatttgaaatagacttaaaaataattaaactgagattgatgatgctcctgctggaactttatgtatgtcactaatctccattactcacagttcaaattgatggctctggaattacaactttgataggctatgcactatgttaatagtaagagcttactaatactgctctttgaggtggataagattctagcaactctctaagttaaagattggtaaactttctaattaattttctgtgaagagccaaatagtaaatataggttttatgggctatacagtctctgttgcaagtgctcaactttgactttgtattggggatgggtgtgttccagtaaaactttattgataaaattgggcatcaggctggatttgctaaaatgtcttacctgggattggccaatattagtactgttcttttttggcgggtgcagcagtgtgatcatggctcactgcagccttcacccttggccccccagcttcaggtgatcctcccgcttcagcctcccaggtagctgggactacaggtgcatgccatcatgcccagctaatttttttgtggagatggggttttgccatgttgcccaggctggtctcaaactcctgggctcaagcgattcacccacctcagcctcccaaagtgttgagatgacacgcatgagccatcatgcccagccaacactcttgattctatcttttcttgttttctattgatagtaagagcaagtttatgaaatctcaattcttaggtattataccggctttcctgttctgttctatgtgtatctctaccaataaatcccctttttttcttaagctagtcatatctagttttttttttttttttgcaattaagctactctagcactggactactttcacaggaaataatttggggattttttagaccattatgttagtgccctttcttgccatgttaaattattgtaactatgttcataaaaatattcaaattttggtttgatagaaatggcttgttggaagatccagttataaataagtatttaccggccgggtgtggtggctcatgcctgtaatcccagcactttgggaggctgaggcaggcggatcacgaggtcaggagtttgagacaagcctggccaacatggtgaaaccctgtttctactacaaatacaaaaaattagccaggcacggtggcgggcgcctgtaatcacagctactcaggaggctgaggcaggagaatcgcttgaacccgggaggcggaggttgcagtgagccaaaattgtgccactgcactccagcctgggcgacagggcgagactctgtctaaaaaagtaaaataaaataaataagaatttaccatttagtgagagcaataactattacaggtgactttgtaattggttgatgaccttgctaattaccattactgtggggtttttattcctagaagtaacacatggcctctttgaatttgtaaaacttttatcaccatttaattctaatgctgtccaggataatttcacatctattgtaattttgctttcaaggtgcttattgaatacaagtaatcactcaggtgtggaggcttttattattcaaaatatcaaaaatcaaattgacatgtcattaaaggtaagaacatagccaaagtgtcaattaccaatttatttcgtagggtatatttattcatatgtagaatacattaatgtgagttattgctctatctctagtattactattacttaaatattattaaggcatattttttcccctatttctactatgttttaaaaactctgaatttggaaatttagttaactataagtttaaattgtattctttgaggttttggtttttgtttttgttttttttgagacagggtttcacgcctgtcacccagcttggagtgcagtggcatgatctcagctcactgcagcctccacctcctgggctcaagcagttctcccaactcagcctcccgagtaattgggactacaggtgtccaccagtgcgcctggctgaattttgattttgtagagatggagtttcactgtgttgcccaggctcgtcttgaactcctgatctcaagtgatccacccaccttggcctcccaaaatgctgggattacaggtgtgagtcatcactctgggcctctttgagctgatattgtggcttatttttgctttgttatatgcttctcaaaaatgaatggaaacttaagtctcttctgtttctgagtgctcagtaattctaaatggaaaacagagtgaccagtgttctcaaactggcagggttcgttcctggtgtctggaaagtgaatgaaagtacggaaattaaagttaaaaactgtattttaaatgtgcaattcttcatttttgtagtgtcaaggtattagaaaaacacatgaattacatgaattataaagctttctcaatttttcgtttgcttttcagagaacacgtaacaacaaatggtttacaggaccacagttgatttcccttcttgatttggtactttttctcccagagggtgcagaaacagatttactgcaaaactcagataggtgaggtgaccattaccaaagttcacatagtaaattcagaataaaatgtgaaacatctgcttagggaacctaaagtaataaaatgtcttttcctgtgattttatgatctatggctaattcattaagttacataaagatttttcatatttaagtgatttgataatgtgtagaaacaaaattaaaacctcctctttctagatgaatgaccagcactatgatttgatagcttttatgtacccagcattccatagaaatttgcaatgacagcacttgtgacttaaaactaaaaatctgtgtatgtaatttatgtgtttaggttttgttgttttattgttttccaggtcattttttttttcatatagaacatataatttcagtttcagtatactggaatggatattgagaaatggtttaaagcatttaaaaagtaatcttaaaattcagaaagcaagagatgatgctctcaaatattaaagataacaaggctttctttaaacaaggatgataattttcacaattgtatgatttaaacaaatggaaaacagtgataagttattactactcaaaaagatattaatggaaatagtttctattggcaaacctaattataaaaatatgaccaaagttttagcttattgagattgctgttgactatataaaaccatactgtaagtaacatatatttttaattaacaggattatggcttcattaaatttattgaggtatttggttatcaaagataatgaaaatgacaatcaagtaagtgaagtatttgaaaagaaactgtgagtatattcaaaaggcataaggaatgtttcagatattcagtacctaaagccaatatttaatatcttacccagatataaaggccgggaagagtgccaacaattattctgaaacctgaagttaattcccaggagcatttaccaccccacatccagctttcctttccctttccatttcctattgtacgtctgctttcttgctgaaagcacttagtcctgttgggtggataagttgcaggtcctaagtcaactaaccttgtggagctcaacgtacatatggtgtcttgttcagtttcctccacctatagctcatgagctgtataaaatcatctgatattttaatattgcctcatcagacatgacaaattgaagcattttcagcactaaaacagaatttgttaacagcaccttttagatatgtttaggaagttggattttttaaaaatagcacatcattagaagtattcaataaatagagaagtattcaataaatagaaaactatttgagggagatttgtcatacagtaaaattatatttgctttttatcttctctttctaccctgttctgatcattgctttccctatatgtgtcacctctattagctagaactacctgaatcatgtgttgttaattggtttttttttagtaattcatttttatataaagatgccaaagaaaattttttttaaattaggtaaatcgtgatttgggatgaaggtttatgagaaaagtagcagtctctttccttcctgacagatctatagtagattcagtgatttgaacccccgttcatccctcttcagctgaaaatagctatttgccatcattgactagtgcttactctgtatcaggtgctatttttttttaacattttgttgtgaaacttttcaaatgtacagcaaagttgaaagaattttatagtgatcattggtttacccaccacctagagtctatgattctactgtactaacttcatcatgtatctatcactccaccctctgtctatcactccgtcagtctattttttgatgtatttcaaagtaaactgcagacgtcagcatactttctccgaaatatttcagcatgtatttcattacattgattaaatatttgtctgtagtttttctttgaagtaaaatttacataatgaaatgttcaaattttaagtgtatattcactgaattttaactaatacatagatctatattactcaaacccatatcaatatagaacatttccagcatcacaagaggttcctcataccccttcctagttaattctgacctcgttgtgctactcacccctgccagggacaaccactattctgcccaagtgctgtatatcattcattcttcagagagcgtctcgttctcttgcccaggctggattacagtggtacaatcatggctcactgcagcctcgacctcctgggctcaagagatcctcccacctcggcctcccaaagtgctggggtaacttccaggcatgggccaccatggaaaaccaagaaaagtactctttatttttcacttttcatagataatgtaggtgaaaaaagttcattaacttgcacaagggcaaacatctggaaagtggtagaaatagctatgaccccaggcagtggccagaactttctaaatcacaaactaaatcctgattcctgaaggagcttgtgataaaaattgaaaagctacaatataaaattcagcagcagtagaggccctgagacttcaggaaggtggccttagggtagggtatgagtttttatttttttagtaatcaagaaaggctgtacctacttgagagattatctgacttgcctgacaaaaagaaaaggaatcttgttgattaggattgataggtgtgttagatatggaacacagagtaatacaaaggcagcagattggtctctgcttagagagggaagacctgagagcagtttagcattgtgcaatgtctgctatactatccatagataattcctcacttttgtttgtcatgtacattttatggtgaagaaaaggatacagccagcctataggactgcctttttttttttttttttttttccatctcaaagagacagtgtctcactgtattgcccaggctggagtacagtggcagtcatggctcactgctgcctcaaactccccagctcaaacaatcctcccacgtcagcctcccaaagtgctgggattacaggcacttcttttttttcttgagatggagtctcactctgtcgcccaggctggagtgcagtggcacgatctctgctcactgcatcgtccacctcctgggttcaaatgattctcctgcctcagtctcccgagtagctgggactacagccaggcaccaccacaccagctaatttttgtatttttactagagatggggtttcatcatgttgcccaggctggtctcaaacttctgacctcaagtgatcctctctcctcagcctcccaaagtgctgggattacaggtgtgtgccaccacacccagccaacaggcatctctcatttaatggtttttaataatttttctaagggatcaaatattctaaattattgctttataagttaccataagaattataccagggaaattagcaaaaacccagtccaagctggcagcctcacatcttttaggcgcttaaaagcctgtctatcttgaaaacatttctcctgagtgcaatgacaataggtcgtgtcaataactgagaggcaaatatgtctactgtggttaataaaaaatgacacttcctgagtttttggaagattttggttaaagaaaaaacaaaatgggctgggcgtggtggctcacacctgtaatcccagctctttggaaggccaaggcgggcggttcatgaagtcaggagatcaagaccatcctggctaacacagtgaaaccccgtctctactaaaaatacaaacaaaattagccaggcatggtggcgggtgcctatagttccagctactcgggaggctgaggcaggagaatggcgtgaaccgggaggcggagcttgcagtgagccgagatcatgccactgcactccccactgggtgacagagcaagagtctgtctcaaaaaaaaaaaaaaaaaaaagaaagaaaaaaaagaaaaaacaaaatgatggtctggtgatgctgaaatatggggcattttattcaaaaggactcctaccagtacctatttttgagcacttaagtgtgctaagagggtaattagtcagatgaaaagcagacacacagtcagaaatatgaacaggaagattaagaagagaatcacattcaaatacaaagacaacaaagtgattcataattgagtaataatccatttcttttcttgctattttgggttactgtcaactgacttattctcttcgtaagccctccttcctcaccctactatttcatgcctcttgtatctccttggttaagtttcaggcaccttctcttactcttgaatttcatataacttttcttgaatattatagtacaaacatgctcccatctttactggtaaaaccaacttagtttttataccaaatattatctatttaatagatatttaatagagtatctttaaataattattagttgtttcgaattacaataatttattctaatacatatccaataatcatgttatcccttaccttctgtcctgtgtactcatatcctttcccatccatctgtttactcatctttttttctaaaaagtttgtaattatagtatgtagaatgaaagctgggacaagggaaacaatgagatggcaaaggccacaggtaaatatcaggaattttaaaattgaattgcttagtctgtgtgagtgtgcttttcatttaggaaaaaactgtatcttgtataataaatacacatacacaaaattctatataatccatattttgggtgctcatttaagttttggttttttttcaatacttttaagttctgggatacatgtgcagaacgtgcaggtttgttacataggtatacacgtgccatggtggtttgctgtacccatcaactcaccatctatattaggtatttctcctaatacccctcccctagcccccgaaccctgacaggccccggtgtgtgatgttccccatcctgtgtccatgtgttcaaattgttcaactcctacttatgagtgagaacatgtggtgtttggttttctgttcctgtgttagtttgctgagaatgatggtttccagcttcatccgtgtccctgcaaaggacatgaactcatccttttttatggctgcacagtattccatgatatatatgtgccacattttcttaatccagtctatcattgatgggcatttgggttggttccaagtctttgctattgtgaatagtgctgcagtaaacatacatgtgcatgtgtctttatagtagaatgatttataatcttttgggtatatacccagtaatgggattgctgggtcaaatggtatttctggttctagatccttgaggaatcgccacactgtcttccacaatggttgaactaatttagactcccaccaacagtgtaaaagcgttcctatttctccacatcctctccagcatctgttgtttcctgactttttaatgatcgccattctaactggcatgagatggtatctcattgtggttttgatttgcatttctctaatgaccagtgatgagctttttttcatgtttgttggctgcataaatatcttcttttgagaagtgtctgttcatatcctttgcccactttttgatgggtttttttttcttataaatttgtttaagttccttgtagattctggatattagccctttgtcagatggatagattgcaaaaattttctcccattctgtaggttgcctgtttactctgatgatagtttcttttgttgtgcagaagctctttagtttaattagatcccatttgtccattttggcttttgttgccatttcttttggtgttttagtcatgaagtctttgcccatgtctatgtcctgaatggtattgcctaggttttcttctagggtttttatggttttgggtttttatggttttagattttatgtttaagtctttaatccatgtcaagttaatttttgtatagggggtaaggaaggagtccaatttcagttttctgcatatggctagccagttttcccagcaccatttattaaatagggaatcctttccccatttcttgtttttgtcaggtttgtcaaagatcagatggttgtagatgtgtggcgttatttctgaggcctctgttctgttccattgatctatgtatctgttttggtaccagtaccatgctgtcttggttactttagccctgtagtatagtttgaagtcaggtagcatgatgcctccagctttgttctttttgcttaggattgtcctggctatccggacactttttggttctatatgaaatttaaagtagttttttctaattttgtgaagaaagtcagtggtagcttgatggggatagcattgaatctataaattactttgggcggtatggccattttcacaatattgattcttcctaccgatgagcatggaatgtttttccatttgtgtcctctcttatttctttgagtggtggtttgtagttctccttgaagaggtctttcacatcccttgcaagttggattcttaggtattttattctctttgtagcaattgtgaatgggagttcactcatgatttggctctctgtttattattggtgtataggaatgcttgtgatttttgcacattgattttgtatcctgagactttgccaaagttgcttatcagcttaaggagattttgcactgggatgatggggttttctaaatatacaatcacgttatctgcaaacagagacaatttgacctcctttcttcctatttgaatacgctttatttctttctcttgcctgattgccctgagcagaacttccaatactatgttgaataggagtggtgagagagggcatccctgtcttgtgccagttttcaaagggaatgcttccagtttttgcccattcagtatgatattggctgtgggtttgtcataaatagctcttattattttgagatacgttccatcaatacctagtttattgagagtttttagcatgaagggctgttgaattttatccaaggccttttctgcatctgttgagataatcatgtggtttttgtcattggttctgtttatggaatggattacgtttattgatttgtgtatgttgaaccagccttgaatcacagggatgaagccaacttgatcatggtggataagctttttgatgtgctgctatatttggtttgccagtattttattaaggatttttgcattgatgttcatcagggatattggcctgaaattttcttttttttgttgtgtctctgccaggttttggtatcaggatgatgctggcctcataaaatgagttagggaggagtccctctttttctattgtttggaaaagtttcagaaggaatggtaccacctcctctttgtacctctggtagaatgcggctgtgaatctgtctggtcctgggcttttttttttattgtaggctattaattactgcctcaatttcagaacttattattggtctattcagggattcgacttcttcctggtttagtcttgggagggtgtgtatgtccaggaatttatccattttttttctagattttctagttaatttgcatagaggtgtttatagtattctctgatggtagtttgtatttctgtgggatcagtggtgatataccctttatcaatttttattgtgtctatttgattcttctctctttattagtctggctagtggtctgttttgttagtcttttcaaaaaagcagcttctggattcactgattttttttgaagggttttttgcgtctctatctccagttgtgctctgatcttagttgtttcttgtcttctgctagcttttgaatttgtttgcttttgcctctctatttcttttaattgtgatgttaggtcgtcgattttagatctttcccactttctcctttgggcatttagtgctaaaaatttccctctaaacactgctttagctgtgtccaagagattctggtatgttgtgtctttgttcccattggttgcaaagaacttatttatttctgccttaatttcgttatttacccagtagtcattcaggagcaggttgttcagtttccatgtagttctgtggttttgagtgagtttcttaatcctgagttctactttgattgcactgtggtctaagagacagtttgttacaatttctgttcttttgcatttgctgaggagggagtgttttacttccaattatgtggtcaattttagaataagtgctgtgtggtgctgagaagaatgtatcttctgttgatttggggtggagagttctgtagatgtctgttaggtctgcttggtccagagctgagttgaaatcctgaatatcgttgttaattttctgtcttgttgatctgtctgatattgacagtggagtcttaaagtctcccactattattgtgtgggagtctaagtctctgtaggtctctaagagcttgctttatgaatctgggtgtttctgtattggctttatatatatttaagatagttagctcttcttgttgcattgatccctttaccattatgtaatgcccttctttgtcttttttgatctttgatggtttaaagtctgttttatcagacactaggactgcaacctctgctttttttttttctttccgtttgcttggtaaataatccttcatccctttattttgagcctatgtgtgtcttttcacatgagatgggtctcctgaatacagcacactgatgggtcttgactctttattcaatttgccagtctgtgctttttaattggggcatttagcccatttacatttaaagttaatatcgttatctgtgaatttgatcctgtcattatgctagctggttattttgccaattagttatgcagtttcttcatagtgtcgatggtctttacattttgggttgttcttgcagtagctggtactggtttttcctttccatatttagtgcttccttcaggagctcttgtaaggcaggcctggtggtgacaaaaatctctcagcatttccttgtctgtaaaggattttatttctccttcacttatgaagcttaatctggctggatatgaaattctgggttgaaaattcttttttttaagatattggcccccactgtcttctggcttctagggtttctgcagagagaaccgctgttagtctgatgggcttcccgttgtgggtaacccagcctttctctctggctgcacttaacattttttccttcatttcaaccttggtgaatctgatgattatgtgtcttggggttgctcttcccgaggagtatctttgtggtgttctctgtattttctgaatttgactgttggcctgtcttcctaggttgggaagttctcctggataataccctgaagtgtgttttccaccttggttccattgtccccatcactttcaggtacaccagtcaaacataggtttggtcttttcacatagtcccatatttcttggaagctttgttcattccttttcattctttttttctctaatcttgtcttcacactttatttcattaagttgatcttcaatctctgatattctttcttccacttgatcgattcagctattgatacttgcatatgcttcacgaagttcttgtgctgtgtttttcagctccatcaggtcatttatgttcttctctaaactgcttattctagttggcaattactctaaccttttatcaaggttcttagctccttgcattgggttagaacatgctcctttagcttggaggagtttgttattactcaacttctgaagcctacttctgtcagttcatcaaactcattctctgtccagttttgttcccttgctggcaaggagttgtgatcctttggagaagaggtgttcgtgtgcttggaattttcagcccttttccgctgctttttcctcgtcttcgtggatttctacctttggtctttgctgttggtgacctttgggtggagtttttgcttgggtcatcctttttgttgacgttaatgctattgctttgtgtttgttagttttccttctaacagtcaggcccctcttctgcaggtctgctgcagtttgctgggggtccactccagaccctgtttgcccgggtatcaccattggaggctgcagaacagcaaagattgctgcctgctccttcctctggaagcttcatcccagaggggcacccgccagatgccagccggagctctcctgtatgaggtggctgttgacccctgctgggaggtgtctccctatcaggaagcacgaggggtcagggacccatttgaggaagcagtctgtcccttagcagagctcaagcgctgtgctgagagatctgctgctctcttcagagctggcaggcaggaatgtttgtctgctgaagctgcacccacagccaccctttccccaaggtgctctgtcccagggagatggaagttttatctataagcccctgactggagctgctgcctttctttcagagatgccctgcccagagagaggaggaatctagagcttaagttttttttcaatttccatttctatttaagattcaggggtgcaggtttggtacaggggcatattgtgtaagttgtttctttctctaagataaaacatatccatgaaatatttgcagagccggatgacttctatatgaattagaagaaaggggaaacctgggtcttgttcatggctttttatttcttcattaccatcactgactgtattctttgcagggttcctgactgttctggcaataaatttcattgtagtgtagaactgcctagtcttccttttgtgagagagatatgctacagtgaattttgaaatgtatagttttaagccttagaactggaaatcagtaagcctccttgggtatgaaattaaaagcaggtatttgtgaacatttcaaatttttaattataactattttaaaactcttaatttactttttctagacactgaaagattttaagaaatcttaaaatgtgattttctttgtagtatttattatttctttaaaaacgatctggtaaccttgagagaaaaaatattcttattctcacagcttcttcactcctacatgcttctaaaaatattacagtttatcatctgaaaaatttgtggaattatgctgaacagaatatgtaaaaaatttctttaggctacttttggcatgtgtttttattacctgaagttttatgattatgggctattgccattgaaaacagctaaggttttaacattcaaagatctagatttgcactgtccaatacagtagacagtagacacatgtgactatttaaatttatattaatttttttttccttttgagttggggtctcactctatagcccaggctggagtgcagtggcgcaatcacggcacattgcaataacaacctcctgtactcaggtgatcctcccatctgggattacaggcatgagctactgcgctgggccagtactctttattaatatgtgattatttccatttgagaaatttgaaacattaaaagaaaacgtttggttagagatacatttgctttttaaagtcctgatttagtaatttggttaaaatttttggctgaagagaattagtgaagcttaattgtatatttgtaccaatgaatgattataaaactttatcactgtaatcccagcactttgggaggctgaggcgggcagatcacctgaggttaggagttagagaccagccagtccaacatggcgaaaccccatctctactaaaactacaaaaaaattagctgggcatggtggcagacgcttataatcccagctactctggaggctgaggcaggagaattgcttgaacccagtaggtggaggctgcagtgagctcagatcatgcctctgcactccagcctgggcaacagagcaagaagacaccatcttaaaaaaaaaaaaaaaagttttgggaatcagatttaaaagaatttccattacaaagtaaaactgaaaggatgaaagaaaaaaattttcaacttagaacttctacaagaggaaagtttttcatggatacaaattctttggttatatttttgcaaatattccagtctgtggcttgtgttttaatagtatttttcaaagaacagaaattttaatatttatggagtccaacttatcaattttattcttttatgattcattatttatgggttctaagaagtctttgttaacccagatcacaaaggtaatttcttgtagaaattgtatagttttaggttttacacttaggtcaatgaccccatttcaagtaaactttttatgatatgagatatgggttgagagatttttttttcttttattttgacctcaacactatttgtagaaaaggttatccttaatttactgaattatcttggcaactttatcaaaaatcattttataagtatgggtctatttttggactctattccatttacctgtatctattcttttaccaataccacactgtcttgattcctttataggaagaaattattctgttttattcctttataggaagtcttgacctcaagtaatgtgagtctgccaactttgttcttctttttcaaaattgtattggctatttttaaatcctttaccttttctgtataaattttagaattttgtcaatttctgccacaaagagttttaattccacttatggcattctggaaaaggcaaaaattaccttaacaaaaatcagattgctggttgctggaggtgggaggaaactgactacaaaggggcacaaagaaatttctgggtcatgggaatatctttacagcagcagtggttacatgactttatatcactatatatctttgtcaaagctcagaattgtatagctagaaggttatattttactgtatgtaaacaatatctcaacaaacctgactttgaaaaataataaaaagaaaagaactaggctcaatagtgaattagactgaaattacctcatgaacaggcaagcacactgattatgtaaaaatctttctgatgtttacttttgaattgtttattctccatttttctacattaaagtattaagattaaatgtgttatatggaaaggatttgagggaaaacttttatttcaactatataaataaacgtgtgagttgtgatgtaaaacctagtttttactgagagtcatggcaaaaataatttgaaaaacagtatcctagaaaaacttttaccccgtgtgaatgggaaaacatacagcaatgtaaatgctgcattattttgaaatactaaaaacttaggataaattccatataatggaatgcttatgcaccaattaaaattagagctacaacacaaataactctcaaaaacataagattgacaaagaaaaaggaagctgaagcaggttatatacagtataccatttatgtgcttttaaacatgaaaaattatattgtttaagtgatacattaggaatgcaaaacattcaagttttagataatggctacctcttgaataaaggggatttcagccatatctagtatttattttttaaaagtaaatatgataaaatgtttccttttgtcaaaggtttccttttgtcaaagctaggtgttttccctatactctttatgttcaaatgtgctttagtgggtaacagagagtcatcagtaacctagtcttgaaagccatcagttgcagtgggttctgcctataaacccagaggtgaatgcaaagtaaaaagaaaaaaaaaaagttggggggcagggaataaatggtgaagaaaaggctggacgtaaaaaggaataaaagcctgttatttgcagcaacgtggatggacctacatgtcattacattgaaatatgccaggcccagaaagacagtatcacatattctcacatgtgtgagctaacaaacttgatctcgtggatacagaatatagaatgattgattgataccagagtgtgagcatgggaggaggaaatgtagagcaactggtgaatgggtacaaaaagagttagataaaagacaagctgtattgcttgatagcacattacagtgactataattagcaacaatatattgtatatttcaatgtagctaggagagaggacaggaaatgttaccaacccatagaaatgatgaatactcaagaggatggataccccaaatactctgacattattatacattttatacgtgtaacaaatacatgtacccataaatatgtaaaatatcatgtatcagtaaaagaaaaaggctggatagagagaggtaaaaataggagaaatgagagcagtcagtgcacataagagtaatatgcttgttatactgtgtggctacactggttaaggaaattcctgctgcatataacccaaatttgccattagaggttaagaaaactttccacttaacaatttaaaaattatacaactaaaacatccattatttaaaaatcaacataaagaagcaaaaaaaaaaaaaaaagaatagtaatcaaaattacaccgttgttgatatactgtattcccttctaggttttgggttaatacgtctgtacattttttcttttttaaaaagaaaatgagatcatactaaaagaatcacactgttttataaccttttttcccattcaccaatatgtactgaaaaacagtattttaatggctgtatagtttttccattatgttaatatgtcataatttactatgaatctcctgttgagttattttaattctaatgtttcactaaacatttttaaaaaacatctgcagtagaatcataacatacatctttatttccccaagataagttgatagatgctaagtgaaaaggtatgcatatttttgagggttttagatcctctctagtattctacttttcctattagtataggataaataagacaagatgactgaaatgaaaaggataggtgtgagacattaatattatcaattattcagcatagacatgtgtagattttatttggaatgctgcaagtaacatgtactacttgggtcaaaataagctcattacaaaataggttatcaagtagttcattattctagttaagaataaattgggtccctacgtttccctttttgacctaagacattttcctttgtaaagagtacttggaaactggaagtaccaatggattttcttttctctattttttaaaataaagacttcatgagtcctctccattagtactgtaagagaaaatgctcttggaataaactctaagatacatgacaaaataagctgccctcaacagataaaatcttcacctactttggtcaccagggaggttcaaattagccgggtattagaaaagtttccatcagtaggaaagggaaagcatcctctagaactagatccgtggtgtggatatcaattgaaaggccatacttgggatgaaggcataaataaggtagagtcattgtggagatggctcatagaggaagagacgtctgtgaatttatcctcaaataattttctcataaataaaacttaacaagttaatagatctcaaaacctggagctatccaaatggtgcagtgataagcgtagtgccccaagtacatttttcttttaattggtattcacataactagctatagtaataattattaaatagtgaagtccattgtgaaaagcaagggccatgtttcatttatttttgttttttgagcttttatcgcgtttaatagtaggcaatcaatcattgttgaactaaataactcattctttcattcttaacagactggattatggacagaacttggaaatattgagaataatttcttaaagccacttcatataggacttaatatgtcaaaagcacattatgaagcagaaattaaaaatagccaaggttggtaatgtgcaattttgttttcaattaggtctaaaaagtagtctaattttggaactgtcatattcaaatttaagaactttttaaaaatcttgtactttagagaccataacagctaagccattttatttatagttaaaattcttagcagatctataagctaatttacctaaaatcgggttaatgaagacttaaaccaaatattacattgtaaagcctcaaggtctgattaagaatctgtattacagctatttccgtttgggtaccattcctttggtattgctgggtccactctccatctcactctcaagtaaatccatacaaattatgaaaagaatcttagatccagaatttttttaagtcaataattctataataatcgtgtgatctcttccgtatatctgtggtggtgcttttataggcattaccggaaattttgtttttagtataatggctataattctgattatatactgaagaaaacagtttcatgaatcctatacatgccaaaataatgctatttatctaaagaagcattaatttacatgttgcagaattttgatatttcattctgtttgcttatagcttaagtataccctgagctgttaaacaatggacttaataatttatacaaataactgacatgttttaagttagtgaatgaaagtagcttatacctttgttattgaaatctgagagttaagtgtcacacatgatttttcttctcttacagaggcccagaaatctaaagatctttgttctataactgtaagtggagaagagatccctaatatgcctcctgaaatgcagcttaaggtgatctgaaattttcttttctttcctttttcttctttagaaacggggtcttgctatcttgcccaagctggagtgcagtggcatgattgtggctcactgcagcttcaactccctgggctcaagtgatccacccacctcagattcctgattagccaggactgcaggtgcacaccaccatgcctggctaatttttagtagagatagggtctcactatgttgctcaggctggtctccaactcctggcctctagtaatcctctcagctcagcctcccaaagcacaggaattacaggtgcaaaccactgtacctggtcttaaatattcctaagctacctccagctgaaatcttttctgtgttttgctttgttttgctttaaaggcagcattaataacattactttttcttggcattgcaggtcctgcattcagctcttttcacatttgatttgattgaaagtgttctagctcgagtggaagaactcattgaaataaaaacaaagtctacctctgaagaaaatattgggataaagtgaaagttccatttcctaaataaaaactaataaaatatagtac

SEQ ID NO: 15593 - DNA, 106964 bp, Homo sapiens
tggcgcatagtgttaggcgcatgctccttgatgcactgcggcgcggcgctccgaggctcggggacgcgcacgcaattcgctgttgttggctgacttccggtggtgccaaagccgtttccgtggaatcaggccggctggtgagggtacaggtttgtgtgtggtggggtgggaagaggcaggtgggagctgggacacctggacgaacgatgtccaggttgagaaggtcgggtctgagggtgggcgctgggtgcgtggcggaagttaagggcgtgaagtccagtgtctagttgggaatggggactggagccagccctgggcaccgaggtggaagcgcggttaggaccccttttgaaaatgttttcctaggagagggccgtgccggggctgcctccacattggcattcattcaccctgctggtccgacttgggttcccaaaaaagtggattctgtcgagctactgctgtgtttgaggtgcctggagctgaagtagctgtctttctttccttctttttctttctttctttttctttttttcccctttttttgatctcagtaattatctgtgaaataaaagagctgccctggctactcccattctatttcttataaggtcaccaccatctctcacaggaatcaacgaaatcttcatgttttattgagctttagttactgagttttaattacatcagttgattgaggggatggagaatctcccctaatgtcttggagaaacagaagggaggtttaaaactaactgtaggtcgggcgcggtggctcacgcctctaatcctagcactttgggaggctggggcgggaggatcgcttgaggccaggagtttgagaccagcctgggtaacaaatcgagaccccgtctctacaaaaaaaaaaaaagaaaaaaagtcgttgagggtggtggcaagtgccttgtagtcctagctactcgggaggccgaggccagagggtcactggagcccaggagtctgaggctgcagtgaactaggatcttgccactgcactccggtctgggcaacagagcgagaccttgtctctggaaagaaagagagagagagagaaagaaagaaaagaagaaagagaaatctaaccttagacgcttagagttacaaataacttttatttttcagttctctagttcaggctttcatctagtactctgataagtggacattcaggcttcgcttgaacattgccagtgatctaacacaaggcggcttattctattattggatctatttatgacagtaaagttttcctgggtaataagatgccttttttttttttttttttttttttttttgacagagtctccctctgttgcccagggtggagtgcagtggcatgatcttggcccactgcaacctccacctcccgggttcaagcgattctcctgcctcagcctcccaagaagctgggactacaggtgcccaccaccatgcccggctaatttttgtattttttagtagagacagcgtttcaccatattgaccaggctggtctcgaactcctgaccttgttatccgcccgccttggcctcccagagtgttgggattacaggcgtgagccactgcaccaagccactatcagtttttatataatgcttaacatttggcccaaatgctgcacagaataagttgtttaacctctgtttcatttattattcagggagcattcattgagtatctacaatattcagtgacacattgagtatcaatactcagtgatacattgagtatctacaatacccaaatactgaactggtgcagtggcttggatgggaccgtaatcccaatgacttgggaggctgaggtgggagcattgcttgagcccaggaggtcgaggctgcagcgaactatgttcgtgccactgcagtgcagcctgggtgacagagcaagaccttgtttcaaaaaaaaaaacccagatactgctggatattagggatatgagttgaaataatcccatttctcgaaaagctgatagttttggaggaaggagatgagaaagagaaagatgagagaccattacaaaactgataagtaccgtaaaagaggtttacaaacagatactaaaagaacatagaggataccctctggtttaggtcagtaatgcccttaaaatgtgataactagaattgaagcaaaaagccaagaagtaacatagcgcagaggatagtaggactcttatcttccttgtttcgacacaaagtttgttgttaatgtagcctaacctttttttttttttttgagatggagtttcgctcttgttgcccaggctggagtgcaatggggagtgatctcggctcactgcaacctctgtctccgggttcaagtgattgtcctgcctcagcctctggagtagctgggatcacaggcgtgtgccaccacgcccggctaattttgtatttttagtagagacagggtttctccatgttgatcaggctggtctcgaactcctgacctcaggtaatctgcccaccttggcctcccaaagtgttgggattacggacgtgagccatctcgtgcccagccaacatagcctaaccttttaaacaatcacactttgcttttgatttgtttctattaatggaaatacctgtttatgaaaacagcaatagcaaacatgtattgatcatttaccatctaatgaagtagatgctattatattccattttatagctgaagacactgagattcaggttgagtaacttccacaaggtcataaagctggagagaaggtgacttgggaaacatccagacagtctgattccacagtttactctcagcatcatgctagtctaccaccctgatggtaataataacaatgtttgctggacgcggtggctcacgcctgtaatcccagcactttgggaggccgaggcgggtggatctcaaggtcaggagttcgagaccatcctggctaacacggtgaaaccccatctctactaaaaatacaaaaaaaattagccaggcgtaggtggtgcacgcctgtagtcccagctattcaggaggctgaggcaggagaatggcgtaaaacgcgagaggcggaggttgcagtgaaccgagattgcgccactgtactccagcctgggagacagagtgagactctgtctcaaaaacaaaaacaaaaacaaaaaaacacaaaaataaacccacagtgtttattaatcacttactctttaattgtaacaattctatgaagtaagagcaattattttttactgttgagggtactgaagacttgcgaggttaaatcacttggcctaggtaacagtagtccatcagtagtaatcagtagagttgagatttgaactcagtcacttaaccactgtctctcaacttccacctaaagggaaattgtgcatttggtgtgaagtattgtgttcatgatcgaacatgaataaatgaaaagataattgagtaaatgttattacttttaattaatatgaaggcagtaagaactttttattctttcagaatggaacaaaagtgggacttttaaaatgttgccctgtaagaagagaagaactacagtgacagagtccctacagcataaaggcaatcaagaggaaaacaacgtagacctagaatcagccgttaaaccagaatctgaccaggttaaggacttgagttcggtgtcactatcctgggatccaagtcatggcagagtagctggcttcgaagtacagtctttgcaggatgcaggaaatcagcttggtatggaggatacatctctgagctctggaatgctcacccagaacacaaatgtaccaattctagaaggtgttgatgtggccatctctcagggaatcaccctaccttccttggagtcttttcacccccttaatatacacattggtaaaggaaaactccacgctactggctcaaagagagggaaaaaaatgacactcaggcctgggccagttacccaagaagacagatgtgatcatcttaccctaaaggagcctttttcaggagagcctagtgaagaagtcaaggaagaaggaggtaaggtatacaaggtctctaggttacattcttgtcaataccactttgccattgctatttctggatacctttacagagtagtatttctgaaaggggatattgatttggtacggaattggaactgctgtgttgctaagggtcaacagtgaactttttttttttcttgagacggagtcttgccatgtcaccagactagagtgcaatggtgggatcttgactcactgcagcctccacctcctgggttcaagcgattctcctgcctcagtctctcaagtatctaggattacaggcatgcgccaccacgccaggctaattttgtatttttaccagagacggggtttcaccatgttggtcaagctggtctcgaactcctgacctcaggtgatacgtttgccttggcctcccaaagtgctgggattacaggtgtgagccaccgtgcctggccagcagtgaactttatgaatggatatagactttcttttcccctcccattcgctatatccacttctgtacccctttcttctttcttttttgagacggagtctcgctctgtcacccaggccagggtgcagtggcgtggtctcggctcactgcaagctccgcctcccaggttcacgccattctcctgcctcagcctcccgagtagctgggactacaggcacccaccaccatgcccggccaattttttttgtatttttagtagaggcggggtttcactgtgttagccaggatggtctcagtctcctgacctcgtgatccgcccgccttggcctcccaaagtgctggattacaagcgtgagccactgcacccagccattgtatccctttcattccattctctcatcctttatttggtgtgtctggagatgtgtatggtcttttgtgattgggcagcagcttaaagggggagactactgcctgggacactgggaaaggctctactgagatgaatgacccttccaatttgaaagatgaattgcggtttaacagaaagtggtatgggcacataggccaagaacagtgcacagagatagactggcagaaaaggatggtgacatggttgcttggaacaggtggtgggagatgacttcttttttttttttttttttttttgtgacagtctcgctctgttgcccaggctggagtgcagtggtgtgatcttggctcactgcaacctccacctcccatgttcaagtgattcccctgcttcagcctcgcgagtagctgggattacaggtgcctgccaccacgtccagctaatttttttatttttattagagaggaggtttccccatgttggccaggctggtctcaaactcctgacctcaggtgatccacgtaccttggcctcccaaagtgctgggattacaggcgtgagccaccacgccctgccaagatgactttagagtagtagattgtactaaggttgtgaaaggttttgtttttcataccaaggcatttgagcttttcctgtaggtaggtgatagtcatttaaacgtctaagtagaacacatttatgctttagaaaagataccaacttctcttattcattttttttttgatacggagtctcgctttgtcgcccaggctggagtacagtggcgtgatctcagctcactgcaacctccacctcccctgttcaagtgattctcctgcctcagcctcctgagtagctggtattacaggcgcccgccaccgtgctcagctaatttttgtatttttagtggagatggggtttcaccaggttagccagcttggtcctgaactcctgacctcaggtaacccacctgcctcagcctcccaaagtgctgggattacaggcgtgagccactgcgcccggcctagattgtgaaggtttttgtttttcatactaaggcatttgagcttttcctgtaggtaggtgatagtcattttttttttttgagacgtagtctggctctgtcgcccaggctggagtgcagtggcgcagtcttggctcactgcaagctctgcctcctgggttcatgccattctcctgcctcagcctcccgagtagctgggactacaggtgtctgccaccatgcccagctaattttttgtatttttagtagagacggggttttaccgtgttagccaggatagtgtcaatttcatgacctcgtgatccacctgcctcgtcctcccaaagtgctgggattacaggcgtgtgccaccgcgcccggccctttttttttttttttttttgaggtggagtctcgctctgttgccaggctggagtgcagtggcacgatctcatctcactgcaacctccgcctcccaggttcaagcaattctgcctcagcctcccaagtagctaggactacaggcacacgctgccacgctcagctaattttttttttttttgtattttagttgagacagggtttcaccatgctggccacgctggtctcgaactcctgacctcgtgatccaccgacctcggcctcccaaagtgctaggattacaggcgtgaaccactgcacccggcctattcattcattttgactgttaagatgttttcttttttgccgcattttaagtccacttgttcttattttgtcctactggtacattctcagtatgtggttttttattgtgtcttgtgtgtgtttatattgaagaatttcatgtttctgactctgctgtatttgaaaactgatggagtgcccaagatgagggagtttagcaataatcttgatggtatactgtgttggtcacgccctctctggcatgagctgcctgaagcacattgtcaaagatgaaagctcttttggggaaaagtgctctcctgtggaatcatcccttgtcatagcatgtggctctaaattttcagcctcattcacagtagcttgcattgttgtattgcttttgggacacctgtgttttatctggaaatgtagacaggaatagcggttttttttgtatgtgtattatatattgtttcactgctaatcttctacacaattttttagaataaaaaagggtaaatagcttgtgccattttgctaattacatagatttgacttttgatcacataaataaaaaataaaacaaggcaggacattgtcctgcacatagttgatgtggacaaatactttttattactttgaaattcttattttgatagttttccacttaatgaggcaagtgcttaagcctcagtctttttgagttctcattatttagacataaggaaaggagaaatgaaggtttttctttattctccccatgcctttcctttttttctcttttattctttttttttttttttaagagcagaatatactagatcaggacaaattaaggtgatactggaatttaggtgtttttactggaaaaaaggcatttcctttgagatagtttaaagaaaatagtaaggagataagaatcagttcaactactaattcaggaagccgggagagatgtacattcaaagcataggacagaatcaagttttctttcttttttttttttttttttttttgagacggagtctcgttctgttgcccaggctggagggcagtggtgcgatcttgactcactgcaacctccgcctcatgggttcaagcaattctcctgccgtagcctcccgagtagctgggattacaggcacccaccaccacacccggctaatttttgtatttttagtagagacggggtttcaccatgttggtcaggctggttttgaactaccttttttttttttttttttttgagacagagtctttctctgtcagccaggttggagtgcagtggcacaatctcggctcattgcaagcttcacctcctgggttcacgccattctcctgcctcagcctcccgagtagctgggactacaggcgcccgccaccacgcttggctaattttttgtatttttagtagaggcagggtttcaccatgttagtcaggatggtctcgatctcctaacgtcgtgatctgcctgcctcggcctcccaagtgctgggattacaggtgtgagccaccgtgcccagccctgctggttttgaatttctgacctcaaatgaccacccgcctcagcctcccaaagtgctgggattacaggcgtgagccacagtgcccagccccttttttttttttttttttttttttttttgagatggagtctctgttgtttaggctggagggcagtggcatgattttggctcactgcaacctctgcttcccgggttcaagcgattctcctgcctcagcctcccaagtagctgggattacaggtgtgcatcaccaggcctagctaattttttgtatcttagtagagatgggatctcatcaggttggccagcctggtctcgaactcctgacttcaggtgatccgcctgcctcggcctcccaaagtgctgggattacaggcgtgagccaccgcgcccgacctacaattccgtagttttagtaaaccattgcagtaacctacaaaacacattttgatgtttaacttttatctctcagatttttttttgtctgaaaatgacaaagaaatcctttgttctgagttttggtttaaaacataatctctatctgtgtgacatttaaaagaagcagaagacatagttctaacctcaggaagtttagaatcttaattgggaaaacaaccataaatatatactttttggaattggagcttgaaggattcacaggatttgatagattgtgagggaagaagtggaagtagaataacatattctgcaaacatgtagaaatgctgtgtttgtgtgggaaagtactaaggcttcaggtagaaagagtagatccagattatggagagccttgaagctttccccttaagaccttaagatttagaataggatgctggcagtaagggtagagaagaatgggtacaccatagacacattacaaagaaatgattaacactgctcagagactgacatgtaagatatctggggtaggggatggtgatgcatgccttcatagggaaggtatttgagagtttgaatatgagttcagatttgggtatgagttatgcaggtgaaccccaaaattggggctcagcccaggggggttcttggctttgtgcaagattcatttgcaagccaatagagaaaaaggaaagcaagtttattagagcagcagagtacaggaaatggctgccccatagacacagcaatagcagcagcccttgtgaatagatagctattccttgattatatactaaataagggcaggttattcatcaattttctagaaaaggggcagggagttcccagaaccaagagatcctcccattttaaaccatataaggtaacttctaggggttgccatggcatttgtaaactgtcatggcagtggtgggacttttcttctttgtatgtatgtatgtatatatttatttattgtttatttattttgagacagagtctcactctgttccccaggctggagtgtagtggcacgatcttggctcaccgcaacccccgcctcctgggttcaagggattctcctaccccagcctttcgagtacctgggactacaggcatgcaccaccacactcagctaattttttttgttttttgttgttttgagatggagtctcgctctgttgcccaggctggagtgcagtggcgccatctcagttcactgcaaccaccacctcctgggttcaagcgattctcctgccccagcttcctgagtagctggggttataggtacccgctaccatgcctggctaatttttgtatttttagtagagacggggtttcaccatgttggtcaggctggtctcaaactcctgacctcatgatctgccctcctcagcctcttaaagtgctggaattacaggcttgagtcactgcacctggctttttttgtatttttaattgagatgcgtttttgccatgttggccaggctggtcttgaactcctgacctcaggtgatcatctgcccgcctcagcctcccaaagtgctgggattacaggcatgagccaccatgcccagcctgtttttattttttaaaaccaatccatttaattgtgtctttcaaggtaaacaatttatggagcctggatcccaagcctgagagtgctagagctatgggtccaaaacttgtggtattctgagttcagaagggttcgaactcacggtgttcaactcacggagtcagagaacatgcggaatttgtgtattccatttagcaattttgtaaattaccagaaacagactgaaagagtctttcaagatggggaaaattcaactcctgtgttttttttgtttttttgtttttgagacagagtttcactcttgtttcccaggccgtagtgcaatggcacaacctcaatggcccctgctcggttgaagcgattcttctgcctcagcctcctgagtagctgggactacagccgtgtgccaccatgccaagctaatttttgtatttttagtagagatggggtttcaccatgttggccaggctgtctcgaactcctgacctcaagtcatccacccacctcggcctcccaaagtactgggattacaggcgtgagctaccgtgcctggcccaggacagctttttaacaagcagttaaagtggaaaagaaccccccagtagcacgctggtttagtttataagattttagtttacaaattaaaaaatctatatgttttacattttctctttatatcacttttttcctttatctttctctttgtcgtcttttgtatccttttttgctctcttctttttcctatctttttttttttttttggtgacagagtcttgctctgtcacccaggctggagtgcagtggcgcgatctcggctccctgcaagctccgcctcccgggttcacgccattctcctgcctcagcctcccgagtagctaggaatacaggtgcccgccaccacacccggctaatttttttgtatttttagtagagacggggtttcactgtgttagacaggctggtctcgatctcctgaccttgtgatccgcccgcctcggcctcccaaagtgctgagattacaggcgtgagccaccgcgcctggccggtttctttttcctgtctttcttctctgcatcccagttggcaatcttgttgatgaggttgtgtagggtgatcacagaatggatcagcgaggccaagtacactgctaccatttggttattggtcttcaggtaaaaggccttgacaaactcctataggctaatgactggcagcagcttgaagacctgcagctgatagatgaattggtggttggtggacagtttgcctgtggcaactttttccaggtagcttctggtacccagaagcttggagttcagtcccttcaaatccaggacctggtttgtgatacactgggaaagagtgcccactgtagtgtctttgatgtcttgtaacaagtgtttaactccaatttccttagcttcctctgctgcagtttcactggtcacatgctcaaatgttttcaaggctgaagttccatcttcatagacttctactgaaatatatgcttctgtaggcagccctaagtcctttggcttcatgtcactagtgaccaatactgagttacggcagtatcttttcatgatttcattgaaggcagtgtcattcttgtgtagtttagggcctatgtggtaccactcaactattctttccctggcattcaccctcttaaacattctgtatgtgtttttcaaataatcgtgggctaaaaaacaattatctttgtcatcttcattaaaagggactgtaaaactgctggatacatcaagtactttcatttgccatgaccgcaaaagcacatgaagaatgcatttctggtttccaaccttgctgattctgttgaaatgatccaccacattgagcagtacctgggggtggactaccaccttctgcaccaccaggtccagcctcatgatacactctggccaccaggcctggctccctgtgacccactggagtttcttttagcatgcaaattcattataattagtgtataataagcagtgagagcaaccgaatgtcacttttgttgccatcttggttgtaactggttttggctgctttctttgctgcatcctgttttgatcagggttttgttcttgttttgttcagcaggctctctggccagtgcttggaaaacaaatcctgcttctctcctacctcactccccccacagagattatatactccccttcaatcttacagggttttagaagggtggaagtccatcttctgtgactgcttcctgttgattttatgggcattggccctgcctagcactggaggagtaaaaatctcttgatgcctcatctaaggggtcagaacaaggatgtgttggaagccacttgctagcattatcttcacatggaaattgttgcaatctagaagacacacactacaaggaggctaaaagaggcagggccaaagattcatagttacaagatagctgctagaggtcctaaaaagagtagaaaccaggtgagacttgggagggttttttttgttgttgttattttttgggttttttgagacaggatctcgctctgtcacccaggctggagtgcagtggtgtgatcatggcccactgcagctttaacctcccaggctcaagtgatcctcctgccttagcctcctgagtagctgggaccacatgtgtttgccagcaacacccagctgatttttaaatgtttttatagagacacagtctcactatgttgcccgggctggtcttgactcctgagctcaagtgatcctcccactttagcctcccaaagtactggtattacaggcgtgagccactctgcctggccaggagggtgttttttatggtcaaccagatatagttggggtcagttccctggttatatatatgtaaccaggtggcttgctcttagaacttttgaatgttaacctcagcctgtccagagttgttaatatatgtgcagtcggtcttattgataacagtgcagactctacctttttcagtcagtaaacaatccaagactagtctgttgtcagggctacaattgccaaagagtccagagattcctgaatttttcttaatgtctgactagtgttggtggccagagattctagggcctgagttatgtttcttagcattgacttgtggtatgcaaagcccctgccaaggggccaccacccctattgctgccccaattcctgtaaaaattaatcctattgctcttttacttcttgtttttctagattttatggggttatgaatggataccccctgaagggataatggtggccaaaatacattcactggtgtttcaagtttttgataagcaaaatggaaagctattcctagaagaataaatggttccctacagggttgggagtgggtatggggtaggatttcttcccctaaaggtgagcccagatgggtcacaaattgaatccttgcaagttatgccgtccattttttattgccaaactgggtctatagagataccttttccaggttccaatgggggtgattgagtagccctcgttttccaccagagggtggtacctccatcttcccaaattaagcagtcgtttctcccttgcatgtattggtcctggaggaggcaccatgtatagtctccttgtttaccagtgggatcccgtttgccctcccatggccttgggaatttggctactagggttgggtcagagcatcgtggggaatttctgtctctgtgtcattgtcacaacaatttgtgcaaaagatagtatcattagtacactggagctgtagatacccaacatcctaggtccaggtaatagtagggggtaggagggtggttggagaggagtcaggtcaatctgttaagtgtgggagagagctgttttataagtaggggcctaggtaccaaaggaacactatggccaattaggaggtttggggagatggctgtgaggtttgcagggtgcaccagaaggtgatgctctctatcctgagggtgctgatgacagattctgcaatcatgcaggctatttcctgatgctataattctagaaatgtttactatggagttttgttcccattccacagcgagttagattgattaggagcagggagcaagaagaacagggacaactgagtatcacactgggctttagggtggtccctatactcaataaggacaagtaaggtgtttctcaggaggaggtggttgctacttatctgtcttgtgaaatagcaactttaagtcttccagaggtttgcaggtgtaggtcatggtgtcctcctcttgtgcctgtagggattcaccaaaaacaggtttgtttaatccgggacaggtgtacctagctagtgattccccgaagtttaacagcagtgggagtgcttaacaatacctaatggggagtgggtgcccttccatattggttatattataattgatcttcaaggaatccttctttccaagttttttttttttgagatgaagtcttgctctgttgcctaggctggagtgcagtggtgctatcttggctcactgcaacctccgcctcccgggttcaagtgattcccctgcctcagccttctgagtagctgggactacaggcatgtgccactatgcccagctaaattttttgtattttactagacacagggtttcaccatgttggccaggatggtcttgattccctgacctcgtgatccacccacctcggcctcccaaagtgctgggattatgggtatgagccactggcccggccctttccaagttttttttttttttttttttttttgagatggagtctcgctctgtcgcccaggctggagtgcagtggcacgatctcggctcactgcaacctccacctcccgggttcacaccattctcctgcctcagcctcctgagtagctgggactacaggtgcctgccaccatgcccggctaattttttgtatttttagtagagacgaggtttcaccatgttagccagtaaggtctccatctcctgatctcgtaatccactcgccttggcctcccaaagtgctgggattacaggcgtgagccaccacccctgccccaagtttttaataggactaggtgtcctggttaaacagggaacaatcttttcctttgtgggaaagggcaatactttattttcatattcttagagtgccttttgaacctggtctcttaagttccaaaggggagcggggggaaggtatagtgaggcttgtccaaccccttgtttcttgtcatggcctgaattagtttttcaagtttctttttttttttgagacggagtcttgctctgtcactcaggctgtagtgcagtggcacgatctcagctcactgcaacagccgccttccaggttcaagtgattctcctgcctcaggctcccaggtagttgagattacaggcgttcgccaccacgcccagctactttttgtatttttagtagagatggggtttcaccatgttggacaggttagtctccaactcctaacctcaggtgatctgtctgccttggcttcccaaagtgctgggattacaggtgtgagccactgcatccagctgccagaggcaatattgctggccaagcttttattttgttccataccaatgctgaggtggtgtgctacctgccccaggtccctcatgtcccttggtgggacgctgatggccaagggacttagattcaagtgacttatagccaattaaacattgtaggccagatggaagtggaggtaggcaggcactcattattatctcttaaaaccccttttaagcaatataagagccaaaaccagaagccaaaaaataaggttataaaactgacttatctataaattctgtgcattgagctattgtaatcttggcttgcagcaattaggtttacaaaacacaaacattttgttcagctatttaggtatctgtgtgcctgtccttgatttggaaggtctgaattaattatatccctcaaaacccagcccctataatctctcatgcccacctcttcagtagtccttgggcctggaggaattgaatagttttaaattctgtagataaaacaacacataaagaattagcaatgtttcaaacaaaaaagtcataagccctgccctagttttgagaatgacaggaaaggaatcttacaggtacctaaacatttaaattatttagtatcaaggcatagaataagttatattaattcatatagaggcaaaattattaaatgaatacaagcttgtccctgtgtctcattaaagcagtttactttttttttgagactgagtttcactcttgttgcccaggccggagtgccatggcatgatcttggctcaccgcaacctccgcctcccgggttcaagcgattcccctgcctcagcctcccgagtagctgggattacaggcatgtactaccacgcccagctaatttttgtgtatttttgatagggacggggtttctccatgttggtcaggctgatcttgaactcccgacctcaggtgatccacccacctcagcctcccagagtgctgggattacaggcgtgatcaactgcgcccgtcctaaagcagtttactttgccccttttgcccaggtctaaagacaaggctttggttaacttgagtttggtgttagatcctggcaagagttggtgccttctctagatgagctgtctgtacccaggagtcaaagccctgtaactcaaaagcacattgattagttaatagcacccgataaggaactttttaaagggctggcagtggtaatgctggagtccacaacctgtcaggaggctgtaaaaatatatcacaaccttgcagtgattagtttttatagctttgataaagcccagcaacaagccagacaatcaagctaggattcgattctgggggcatttgtaaaagatgttaaaaagcccaaaatactgtattgacacagaaccacaggttactgtaagtaatagttacttatttacccaaagtggtaatctctctgcagtgtaattgtctctccttatgggaagcccacttaactaatcttgaagttaaatttgatgaagagaaaaataatacttgaatttaatcggacaaagtatgttcaaggttttgaatatagcaggtgaacatgaaaagttttctggttactctgaaaatttagacatgtcaagaaaaaccaagagtatagaatcaagttatactggaggaaaacattgcttttatagacctctaagctaaaatatttcagcatctgactgtaaaaacagaactggaagagaaaaagttacagcaactgatgaaaaggttgaaggagagactaatgtctcaggctttctcaaggggagaaaaagctgaaagcagtgagatagaacaattgaacttatgagatatgaatctgagaaattttcaaaagaaacaagttatagaattgaaaagcaaattttcttgtaatttcattaagagcaaatcaataccttgaaacccttactttaacataggagaccattctttagaaagattccacttttaattatagctaacttaatcacataaacaattctttttataaattctcctttataaatcttatgacctgcacagaccatgtatgatatggttgaatgaactttctgacttgtccaatactacctttttttttttttttttgagacagagtctcattctgttgcccagactggtgtgcagtggtgtaatcttggctcactgcaacctccgcctcccgggttcaagcaattctcctgcctcagcctcaaaagtagctggaattaacaggcgtgtgccaccacacccagctaatttttgtattttttagtagagacaaggtttcaccatcttggccaggctggtctcaaactcctaacctcaagtgatccacccaccttggcctcccaaagtgctgggattacaggcataagccactgtgcctggcctatactacttttcctaaataactagtcattctactactctagaacaataccatataagatccttttttttttcccactgagatctgcaggattctttcttatgtagaattattctcttttatttataacctttcttaccaaaaatacctctgaacatccataactttctttacctatctctcccctacttactggttcctttctacctggttatataaataaccttttcaagtccataatttgaatcaacctttagataacttttgaattagacacaattattctttttctcaataaaaacacatcttctttggtaagttttatataaacctaagaaggaagaaatcctgaactatcagatattagcattttatagatgagaaccattccacagtttttaaaattttttattttattgtaaaatgtttccctatataatattcctttcttaattggaaatgacccaggcatccaataagcatccaaaacgattttaagattttaaattatacaaaaagttcacttataagcatttatctcattatatttacctaatttattattattatttataattttttttctttttttttttttgagacagagtctcactctgtcacccaggttggagtgcaatggcataatcttagcttactgtaacctctgcctcccggattcaagagcttcttgggcctcagcctcccaagtagctgggatgcatgcaccaccacgcctggctaatttttgtatttttagtagccatggggttttgccatgttggccaggctggtctcaaactcctgacctcaagtgatccacctgccttggccacccaaagtgctgggattacaggtgagagcccctgtgcctagctggaactatattagacaaaattggtcattattcaaagttatttcctggttaaccatttttaaactctgaacattaggtgaacccctaagtaagaatcttaaacacatgggcattttgccagtaactgagaagattcagctattttcattgagccaacaatcttaaattcgtcttatttatacaattctgaagacatttctatttccatcaattatttaatttaattaattaattttttgagacaaggtttctgttgcccaggctggagtgcagtggcatgatcacagctcactgcagcttccgcctcttggggtcaagtgatcttccacctcagcctcctgagtagctgggactataagtgtgtgctgtcacacctggctaattttttttgttttgttttagagatggagtctcactatgttgcccaggctggtcctgaactcctgggctcaagcagtcctcccaccttagcctcccaaaaggttgggaggtgtgagcgacagcacccagtctttattaataatttgaaaacaagttttatttaccaaaggattcatgtgaacttgaaaagcctttggactttattaaagatagctggatttaaatatttctgacaattttgaaacctgttcacatggctaaactttttttttctaataggtaatccaaggaaactgtagactagaatttgggtaaggtagttttcataacagttttaattttaaaaccctcttttatccttttttcccccttcagcttcagaggaggaggagatgatttaaaagggcaggaaagaaaaagagggaaaggagggagagtagggggatgaggggtacctttccctttgtttctctggtgggggagagagagagagagagatacagcaagccagaacactcattgatggatgaagggtcaccttaccatgacaacttcaatatcagatatcttggacccaagaccttgggactgtcccagggacccacaatcctagagagacatgaaccagtagaagtataataaaagaagactgaaaaggcagaaagggaaaggaagctaggaaaaacaggctcccgtagcagcaaatgtgaattggggaagagaggggttgttgttcagggcgtgtccttggagtccctgagacagtggagaactcacccatcagtggagacaccaaaaaaagtgttcaggcggctgcttttctgccattgcagggagtcgtcattaggtcaggggttcagggcctccagaaaaatgggcttgaacaaggcagctcatttgggaccctcattttgagcagaaagaaagacaggaagagacctgttgcagaaaagaaaatttatgattttaggagggactagaagaagttgctgaagtggatggaatgacagagtaaggaaaaaaatgaaacggcaccaaatgctgaaaaacctggagtatctagacattggccagtgagggtccccataccaaatgctgaaaacctgggggtggccaacagtgaggcccaaaggcatgagacctaacacagttggggccatagaataatgtgactctgacatcccagagtcagcacaaaggaatacctctcaaaataacaaaagcctgccttacatggaatagaaacaactgcccaaattgccaaaacagggactacaaacatgacaactggataaacataagtgtgcatttaggcactaagagcagaaaagtaaaatgactggtcattagaagctaaagagaaaaggtctgagagagaaggtgacaaagtaaattacaaaggacgtggatgtccaggtgtgcttctgtctggggcacccagatgatgggggacaacgaactgactaacaacccagagacactattccccatttcctgattgatttgaaaaggtaaagggagaggagagtgaaagagaaagtaaatcagttaaagaacaccacatcggccaggcgtggtggctcacgcctataatcccagcagtctgggaggccgaggcggggggatcacgaggtcaggagttcaagaccaacctggccaatgtggtgaaaccctgtctctactaaaaatacaaaaattagctgggtgtggtggcaggcacctgtcatcccagctactcgggaggctgaaagcaggagaatcgcttgaacccgggaggcgaggttgcagtgagccgagattgtgccactgcactccaccctgggtgacagagcaagatgtcgtctcaaaaaaaaaaaaaaaaaacgaaaacaaaacacacattgagggggaacaaaggggacactcatcttttcgtggaggccaaatggtgccagtcagtctttgggttcaagcaattctcatgcctcagcctcccaagtacctgggactacaggcgtgcaccaccatggctggctaattttttgtatttttagtagagccggggttttgctctgttgcccaggctagtatcgaactcctgagctcaggcaatccacctgccttggcctcccaaagtgctaggattacaggcgtgagccacggtgctcaacccaatcagtcttaatttagggtctggctaaaggtctccctcagttccttttggcttattattggtctcttcatggtcaccaaggaatgacgcaggtgaaccccaaattggggctcagcccaggagcattcttggcttcgcactggaaggaatcatgaatgggccaacagtgaattgaaagtaagtttattagagcaacagaggaagggaaatggctgctctgtaagagaagcagccgcagcagcagacctgcggattgctggctagctgtatgtatacaaagacaacatggaaaaaaaatgaaacggtgccaaatgccaaaatacccagagtatccaggcatcagcccatgagggtccccataccaaatgacgaaaatcccagagcacctagggggtggccaacagtgaccctcaaaagcatgagacctgtatagccatatatatatgggtatactttgattatatgctaaaataaggggcagatttttttttttttttaattgatcattcttgggtgtttctcgcagagggggatttggcagggtcataggacaatagtggagggaaggtcagcagataaacaagtgaacaaaggtctctggttttcctaggcagaggaccctgcggccttccgcagtgtttgtgtccctgggtccttgagattagggagtggtgatgacttaacgagcatgctgccttcaagcatctgtttaacaaagcacatcttgcaccgcccttaatccatttaaccctgagtggacacagcacatgtttcagagagcacagggttgggggtaaggtcacagatcaacaggataagaatttttcttagtacagaacaaaatgaaaagtctcccatgtctacctatttctacacagacacggcaaccatccaatttctcaatcttttccccacctttcccccctttgtattacacaaaaccgccattgtcatcatggcccgttctcaatgagctgttgggtacacctcccagacggggtggtggccgggcagaggggctcctcacttcccagtaggggcggctgggcagaggcgcccctcacctcccggacggggcggctggctgggcagaggggctcctcacttcccagtaggggcagctgggcagaggcgaaggggcggatttttaatggattttctggaaaaggggcgaggacttcccggaactgagagtccctccccttttaaaccatataaggtaacatctgggggttgccatggcatttgtaaactgtcatggtgctggtaggaggttcttttagcatgcagataaaaggagggcaacaggaggtggctttcatcaccatcttgcttttagctggttttggccagtttctttgatcagctcctgttttgttcagcggggtctttcgaacagtgcttggaaaacaagtcctgctgatctcctacctcaaatggaatgtgaggtgacaatagggccagcaagcaaaaatagaaatctgagattgaagtttagtaagaggcaaggactagaaatgttcagtgttagtcatggttcttctccatggaaacagacatggagggggaagagcagtggattgaagacaaccttgccttgaggaagaagataacagagaaggaacaactggagaagtaatagtaaaagtgaaaagaggaaggagagctttaagaacaaggtactttaaaatgtaaatttaaaatttagtagcaaaggagggataaggataatacctgagaaaaaggttacatttgaagattgatgatcttggagagtagattcaggagtttgttggggaaaggacattatatgaagcagttaaagaggaaggaatggggctgggaacagtggctcacacctgtaatcccaacactttggaaggccaaggtgtgaggatcttgtggccaggagttcaagaacagcctgggcaagatagctaggttccatctctacagaaaattttaaaaattagccaagtgtggtagtgcatccctgtagtcctagctactcaggagtagctagggggatagcttgagcccaggagttcaaggttgcagtgagctctgatcgcaccactgcattgcaacctgggtgacagagcaagaccttgtctgtaaaaaaaagaaaaaggaggaggaatgaaaccccagagatttttctttctttcctctcccccatccccctcctcccctcctcccttcctcccctcctcctctcctcccctctcctccccactctcctcttccctcttatccccttccctcacctcccctccccttccttccctttttttttttttttttttttttttttggagacagagtctcgctttgttgaccaggctggagtgcagtggtgtgatctcggctcactgcaagctccacctcccgggttcacgccattcttctgcctcagcctcccgagtagctgggactacaggcacctgccatcatgcctggctaattttttgtatttttagtagagatggggtttccccgtagccaggatggtcttgatctcctgaccttgtgatctgcccgcctcggcctcccaaaatgctgggatcacaggtgtgagccaccatgcctggccttccttcctttttttgcagtgggagaatgggtgagaaatagctagagaaggcagcgagattattgcatattttttcaagataagttgtcagaaggaactggaggaaattataagattaaaatgctagagaaggaatggataaataactatgggttcatagtcactcagttattgataagtgtaattaagagattttaaaaatcagttcacagatatccggatttaaataaacatttattgtttagtattatctgtgatatcactccccttcattaatctggagaactgaaaattgattatactactttgcactttaattagttgtatatacaagtaatagcaataaaagtacactatgagtgtctctccagaatttttcttcaagtaactttttttttttttttttttgccaatcagataatgtaacacaaaacagagaggaagaaagaaagattgacaattcacatatatctactttggaaaatattgaaaactttaaaggagaaaataaaaatcacccgtagccctgctgtttagtatgtgtttttgttgttttactttcttttaagtaacattttagttttctgattatgaaagcagcagcatcatatacactgtagaaaaaatgaaaatacatagaaagatagttggattattttcaagtattgacattttgttacaattgatacctttttgttgttgttattgtttgtttgtttgtttgtttttgagacagagtctcgctctgtcacccaggctggagtgcagtggcatgatcttggctcaccacaacctccacttcctaggttcaagcaattctcctgcctcagcctcccgagtagctgggattacaggcgcctgccaccacacctggctaatttttgtattttcagtagaggtggggtttccccatgttggtcaggctggtcttgaactcctgaccttgtgatccacctgcctcggcctcccaaagtgctgggattacggtgtgagccactgcgctaggcgcaccttgccgggcaatacattgttaaatcatgtttcttttttctttttttttctttctttttttttttttttttttttttgagacggagtcttgctttgttgcccaggttggagtggagtgtagtggcgtgatcttagctcactgcaacctccacctcccgggctcaggtgattctcttgcctcagcctcccgagtagctgggattacaggcatgtgccactgcgcctggctaagttttgtatttttagtagagatagggtttcgccatgttggccaggctggtcttgaactcctgatctcaagtgatccacccacctcggccttccaaagtgttgggattacaggctggagtgcagtggtgtgatttcggctcactgcaagctccgcctcctgggtttgcattgtccagcctaaatcatgtttcttgactgcaggtattagtgtttaaaccttttctttatttattttttttaaagagatgaggtctcaccctgtcatccaggctatagtccagtggtacgatcatagctcactgcagcttctaactcctgggctgaactgatcctaccaagtaactggcactataggcaggagccacatcatccagctaaaaaaagctgcgactacagacctgcaccaccacacccagctttttttttttttgactttttgcagacacaaggtctctataagttgcccagcatagaaatgttttttgtttgtttgtttgtttaacaggtgaggtctcataattcactgcaacctacaattcctggccttaaatgatcctgctgcttcagccttctaaagtgctgggcttacaggtatgagccactgggctcaactagaaataactttttatttatttatttatttatttatttatttatttatttatttatttttaacgagacagagtcttactctgtagcccacgctagagtgcagtagcacaataatggctcactacaacctctaactcttggcttcaagtaatctttctgccttggcctcccaaaacgctggaattacaggcatgaagccacacataacttttttttagacagggtcccaccgtgttacctaggctggagtacagcagtgcaattacggctcactgctgccttgacctcctaggctcaagtgattctcccaccttagcctcccaagtagctgggactacaggtgtgcaccaccatgcctggctaatttttgtattttttgtcgagatagcgtttcaccacattaaccaggctggtatcaaactcctgagctcaagtgacctgtccacctcagcctcccaaagtgctgggattacagccatgagccaccatgcccagcccacaaattactttttaaacaagcataccagaacttttaaatctaagcaagtattgcccttcaaaacacagagattcactttggtaggcagagcctcttccactgacatttttactacttaaaaaatatttggggtcaggcatggtggttcacacctatccctgtacattgggaggctgaggtgagaggattgcttaaggccaggagttcaagaccagacttggcaacatagtgagaccccatctctacaaaaataaaataaaattagctgggcatggtggcaggaacctgtagtctcagctacttgggatgctgaggtggaaggatcacttgagcccaggaggttgaggccgcagtgagctgagatcgtaccactgcacttcagcctaggggacagagcgagaccctgtctcagcaacaacaaaaaaattggaactacttggccaagtgcggtggctcgtgcctgtaatcccagcactttgggaggcagaggtgggcggatcacctgaggtcaggagttcgagaccagcctgaccaacatggagaaaccccatctctactaaaaatacaaaattagctgggcgtggtggtgcatgcctataatcccagccactcgggaggctgagccaggagaatctcttgaacccgggaggcggaggttgcggtgagctgagatcgtgccattgcactccagcttaggcaacaagaatggaactccgtctcaagaaaaaaaaaaaattggaactgctttttaaaactgtccctgcagggctgggtgcgtggctcatgcctgtaattccagcactttgggaggcctagagggacagattacctgaggtcaggagttagagaccagcctggccaacatggtaaaaccccatctctactaaaaataaaaaattagctgggcgtggtgacacacgcctgtaatcccagctactcggaaggctgaggcaggagaattgcttgagcctaggatacggaggttgcagtgagctgagatcatgccaccgtactccagcctggcccacagagcgagactctgtctggaaaaaaaaaaaacaaaaaaactgtccctgcaagcacattatcagctgcaccacaaaatcatttttcatactctagaggaaatgttccttttttctacaacctttttttcccctctgactccacaatgcttttcaatttatttccccttcctagagccctttaggaccccaccttcctttatagatatgctggatgctaaaagacctcagaaagagaagctgagcagaataagagaaatagagaaagcaaaccttattcagagcatatctgtaacttatgtactgccagcctgagaactgtatgttgataacatcaaaattattattttttaatttatattgtttattttttggagacagtgcctcgctctgtcgcccaggctggaatgcagtggtgcaaccttggctcactgcaaccttggctcactgcaacctctgcctccccggttcaggtgattctcgtgcctgttgaatagctgggattacaggcacctgccaccacggctggctaattttttgtattttagtagagacgaggttttaccatgttacccagcatggtctcaaactcctgagctcaggcagtccgcccaccttggcctcccaaagtgctaggactacaggtgtgaaccaccatgcctggctgatcataacatcaaaattagctgagaacagtacaaatcaactaattataagctaaaatcatgctactcacttttaggaggcaaagaaaggagaagcataagtggaaattagggtatgtaagtcaaattcagaagaacaagtaaaattctattagaataaacaccattaaagcagaagatttagctggatggtgtgatggaagtaagctataacaatgctactgcactccaggctaggcgacagagtgagacccaagtataaagactggccatgtgttttgaaagaaaatgttcaactaagtaatacacaaactagggaaaaaattcagaaatataaaaagtacacagtgaaaatttaggcatcctttcactttgtactcttgctccccaagtcctcttcccaggtaactgttaaacaattttttgtgtatagtccagggattttctgtatatatgcaagctatttccttgatagcctgatttctgatgtttaccatttttttttttttttttttttgagacagagtctctctctgtcgcccaggctggagttcagtggcgcgatctcggcacactgcaacctccgcctcctgggttcaagcagttctcctacctcagcatcctaagtagctgagattacaggtgcccgccaccatgcctggctaattttttgtatttttagtagagacggggttttgccgtgttggccaagctggtctcaaactcctgacctcaagtgatccacccatctcagcctcccaaagtgctgagattacaggcgtgagccactgtgcccagcattcttttttggtttgtttgtttgttttgtttgagatggagtttcgctctgttgccctggctggagtgaagtggcactactatcttggctcactgcaacctctgcctgccaggttcaagcgattctcctgcctcagcctcccaagtaactgggattacaggtgcctgccaccatgcctggcttatttttgtattctttttttacagccgaggtttcatcatgttggccaggctggtctccaactcctgacctcaagtgatctgcctgcctcagccttccatagtgctgagattacagatgtgagccactgcgcccagcctacttttaatactacatgaatatttctttgcgtgtgtgtgtgtgtgtgtgtgacagtgtcttgctctgacacccaggctggagtgcaatggcatgatcacagctcactgcagccttgaactccagggtccaagtgattctcccaccacaccctcctaagtagctgggaccacaggtgtgtaccaacacacccagctaattttagagctctatatttttgtagagacaaggtatctccaaatgttgctcaggctggtcccgaactcctggatcctggctaaagcgatcttcctgccctggcctcccaaagtaatgggattacaggtgtgagccacctggcctagcctaattttttatttttatttttagtagagacaaagcctcgatatgttgctcagactggtctcaaactcctgggttcaagtgatcctcctgcctcagcctcccaaagtgctgggatgatagtcatgagccacctcatgactataagcacctggcttttttttttgtgtgtgtgtgtgtgtgacggggtcttgctgcgttgtccagtctggagtgcagtggtggaatcgtatctccctgtaacctcaaaatcctggcctcaagccatcctcccagctcagcccccccaagtaactaggactacaagcatgcaccatcaccccttttttctctgtctttttaatgctagcctcacctactcccctcacaaagggagtgtttatgaagtgttgaggtgagaaagttgtctaatgaactgtagaaccatatatttacaattttatggtgacagttactcttctgctctgccaaattgatttacaaagtcagggcattttatgattatatttatagttgatgaaatatggtgttaatggtcatctatataaaatgtcatcaggaatttcctttacaagtctgatttttcataggaaaaaatgcaaaactgaaagcatattagaaataaaaagacctcagcaattacctagtttaactccctgagtttacagatgagtaaattggatctgagctttgatttaagagaggaaaattcctatatagtatatgcttaattcatgaagttgtctacctaaaaacactataataagatgctaaattctacaacagagtatgactgagaatggtcaaagtgtggagcaatatttgtgattcttccagggaaacctcaaatgaattctgaaggggagataccttccctgccatcaggcagccaatctgcaaaaccagtaagccagcccaggaaatcaacccagccagatgtttgtgcctctcctcaagaaaagccactcaggactctgtttcaccaacctgaggaagagatagaagatggtggactcttcattccaatgggtaggctttctttttctttttaattaaatgaaacctctttattgaagtataatatgtagaaaactgcacatgtcctaagatatcctgaattcactatatttttacaaatttaatacacccttgtaagcaggacccagatcaagatagagaatgttatcaatacccagaagtccatcttgtcttccctttcaattaccctctacccataggttaaccactatcctgatgtctagcatcatatattggttcaatttttttttttttttttttgagacggagttttgttcttgtcgcccaggctgaagtacaggggcgtgatctcggctcacggcaaccgctgcctcctgggttcaagtgattcttctgcctcagcctccggagtagctgggattacaggtgcctgccaccacacccggcttaatttttgtatttttagtagagacagggttttgctatgttggccaggctggtctcgaactcctgacttcagatgatccacccaccttggcttcacaaagtgctgggattacaggtgtgagccactgcgcctagccagttgttctgtctttttgtcttttatttgaatggaatcgtgtgtacattttataactgcctttttttttttaaagacagggtctcactctgtcactcagactggagtgtagtggtgccatcacggcttactgtggccttgacctcctgggttaaagtgatctttttgtctcagccctaagtagctgggactataagcgcgtgccgtcacagccagctaattttttttctttttttttgagacacagtcttgctttgttgcccaggctgctggaatgcaatggcttgatctcaggtcactgcaacctccgcctcccaggttcaagcgattctcccgcctcagcatccctagtagctgggattacaggcacctgccatcatgcccagctaatttttgtattttttgtagagacggggtttcaccgtgttggccaggctggtcttgaactcctgacctcaggtgatctgcctgccttggctttccaaagtgctgggattacaggcatgagccaccgcacccggcccagccagctaattaaaaaattttttttgtagagacggagccccactatattgcccaggctggtctcaaactgctgtgctcaattgatcctcttgcctcagcctcccaaagtgttgggatgacaggtgtgagccaccgtgcctggcattgtgactgcgtttattctctcaattttttttttttttgttttgagacagagtcttgctctgtcacccagactggagtgcagtagcgcaatctcggctcactgcagtgtctgccttccgggttccagcgattctcctgcctcagcctcctgggtagctgggattactggcacggccaccatgcagggctagtttttttatttttagtagagacgggctttcaccatgttggccaggctggtctcgatctcctgacctcaggtgatctgcccgcctcggcctcccaaggtgctaggattacaggcgtgagccaccgtgcccggcctcaacattgttttatgaaattcatccatattcttggatgtacttgtagattgttcatttttattgctgtatatcattctgttgtttgaatagtttatgtatgttttcttttctttaattttttttttagagataggtactgctctgtcacccaggctggaagttcagtgccatgatcatagctcactgcaatttgaactcctaggttcaagtgatcttcccacttcagcctccccagcaactcggactctaggtgcacgccacaatgcctggctaattttcatttttattttattattattatttttttagagacggttttcactatgttgcccaggctggttttgtatttctgggctcgagcagtccctccttgatctctcaaagtgctgggattacaggcatgagcctcctcacctggtttgctttacgttttctttatccattcaactctttgttttttctttttgcttccttgtgcccattgttacccattcaattcttcttcttcttttttttttttttttttgcgacagagtctttgttttgaaccagagtctcactctgtcgcccaggctggagtgcaatggtgtgatcttggctcactgcaacctccgcctcccaggttcaggtgattctcctgcctcagcctcctgagtagctgggattacaggtgcgctccaccactcctctgctaatttttgtatttttagtagagatggggtttcatcatgttggtctggctggtctcgaagtcctgacctcatgatccgcctgcctcagcctcccaaagtgctgggattacaggcatgagccaccgtgcctagccttttttttttttttttttttttttttttgatgtggagttttgctctcgtcacccaggctggagtgcaatggtgcaatctcggctcactgcaaccgcttcctcctgggttcaagcaattctcctgcctcagcttcccaagtagctgggactacaggcacgtgccaccatggccggctaatttttgtattatttttttttttttagtagagacagggtttcaccatgttggtcaggctggtcttgaactcctgacctcaaatgatctgcccgccttggcttcccaaagtgctgggtcacaggtgcaaaccactgcacctggccccattcaattcttgatgagcatttggatacttttcagttgtgggctactgtgagtggtgctgctgtgaacattctatagattttttgctgaacatgtgtacttctttttcgttgggtggaaatgctagcttataagtttgggcatccttaaaattcttttgaaatactaaattttttattgtgaaacataacacagacacatgactaaagacttctttatttgatttagcaaatggtttttttgtgtgtgtgtgtgaatcttgctccgtcgcccaggcttgagtgcagtggtgtgatctcggctcactgcaacctccgtctcctgggttcaagtgattctcctgtctcagcctcatgagtaattgggattacagggacacaccaccatgcccggctaatttgtattttcagtagagacgaggtttcaccatgttggccaggctggtcttgaactcgtgacctcaggtgatccacctgccttgggctcccaaggggctggaattataggtgtgagccactgcgtccagcctcactttggcaaatgcttttaaaatggacacgtaatttttcttattgcatattctagaccttcattgctatgtaggttgtaagtagtagtggtagtcgacatctgtgtcttatttctggacaaaacaggaaaatgttcagtattccttcattatatatgaggatagttataggcttttcatagaaatattttttaggttaaggaaataattttcctaagttttctgagttttttcatatattgaatttcatcaaatgctttttcctatctctattaagatcatgtttttttctctttcattttgttaatgtggtaagtttcattaggtttattgagatataaaataaaatgtatctgatgagttttgaaaaatatgtacagttgggccaggtacggtggctcacacctgtaatcccagagctttgggaggctgaggcgagtggatcacctgaggtcaggagttcaagaccatcgtgagcaacatggagaaaccccatctctactaaaaatacaaaattagccgggcgtggtggcacatgcctgtaatcccagcactttgggaggctgaggcaggtggatcacctgaggtcgggagttcaataccagcctgaccaacatggagaaaccctatctctactaaaaatacaaaattagccgggcatggtggcacatgcctgtaatcccagctactcgggaggctgaggcaggagaatcacttgaacccaggaggcggaggttgcgctgagccgagattgcaccattgcactccagcctgggcaacaaagagcgaaaactccgtctcaaaaaaacaaaagaaagaaaaatatatacagttgtgttaactgctaccacaaccaacgtggaacatttctgtcaccccaaaagttgcctaattcccctttgctatccccctttctcaaacattggcaagcactgatttctatttccatagttttgcatcttctatgcaaatgttctatacttgttataccgtcatataatatgtgtccttttacatctggtttctttcacagcataatgcttttgagatttatccactttactgttggctttctgggctaagttcctggagcagctattttggaattctgatgatgttcttggtttatttgcagaagaacaagacaatgaagaaagtgagaaaaggagaaaaaagaaaaagggtaccaagaggaaacgagatggaaggggtcaagaagggaccttggcatatgacctgaaactggatgacatgcttgaccgtaccttggaggatggtgccaagcagcacaatctaacagcagtcaatgtccgaaacatccttcatgtgagtaagactggggcagttatgtaaatggaagggaactttttcatggaaagcatataaaaatgttcagcaaattcttgactcttgatacgtgaattaccgattttgtgggttacccgtgacagaacattttacatttttacatatttaagatagctttctccttgcactcagtacaagtttgaaatatgaacacatgttaaagaagaatttaattggaaagataaactgttcctgtttccttccactgattttcatatttactgtattgtttagtagattcaatgttgataatgttcatagtgggtttactcttgtgggtcgatatgtctaaaaagatgcctggttaatagtttattgcactttgtacatatgtaaatacttttcttgatatgtagcaacacagctatttgcagagcctttgctcttgttactctttctcttaagcatatagttacttacctcaggatctccttttatgtgagccattcctgttcctagtagcagctaatgagattggttcatttgctgctacattgtttgaaactgtgtggttctggccaaaacttacttctgccttctttgctttcagttgccttgctttaccccagtctgatgctattcgagtatatggttctcatttgtcctgtacataggtctgacagttacatggagagatgagtattgtctaggtgacaaacccttgttgcataaagtgaaatttcatctttctccaggaagtaatcacaaatgaacacgtggtagctatgatgaaagcagccatcagtgagacggaagatatgccaatgtttgtgagtagttgattatcactcttttaatgtcttggaacagagttatctctaaactggctaagggtaggaggtcacttaggagtttgtaaacagtttggcagctggggttaaagttagcatttcaaaacataagaattacttggtaatttttacttattttatttgttattttattattattattattttattattattatttttttttgagacggagtcttactctgtcacccaggctggagcgcagtggcgcgatcttggctcattgcaagctccgcctcccgggttcaggccattgtcctgcctcagcctcctgagtagctgggactacaggggcctgcaaccacgcccggctaattttttgtatttttaatagagacggggtttcaccacgttagccaggacggtctcgatctcctgaccttgtgatccgcccgcctcggcctcccaaagtgctgggattacaggcgtgagccaccgcgcccggccttgttattttattattattatttttttagagacagggtcttgctctgtcaccaaggctggactcaaactcctaagctggactcagcgatcctcccagttcagcctcttgagtagctgggactacaggaacatgcgactatgcccagctaatttaaaacaatttttttgtagggagggtgtctcactctgttgctcaggctggtctcaaactccttgcctcaagccatcctcccaccttggcccctaaagtgctaggattataggcatgagccacctcactgagctgtgatttttattgaggatttcctttctgtttttttctccttaggagcctaaaatgacacgctctaaactgaaggaagtagtggaaaaaggagtggtaagtattctgtttttttgttgttggtttttttttagcttggtgaataggatctaattcacccatagggaaaaatataggaaagattgtggtctgaatttgcctctttaaagaaatatttataaaagacagtagaattgtttctacatgatcataagctatgataatcatagtttattttagtagatatgaagcattgctttttggaattgctagatagataaccatttggaatagttgaaatcaataggtgagaccagtttttctatttatgttacaacacatgttgcaaagtgtttagtatttttcatagtgtgttccaggggccagttgcataaaaatcactttggtgtgggatccctcaggcatgcttattaaaaatgcatacttttggctgggtgtagtggctcatgcctgtaatcccagcactttgggaggccgaggcagatggatcacttgaagtcaggagttcgagaccagcctggccaacatagtgaaactctgtctctactaaaaatacaaaaattagctgggtgtggtggtgtgcgcctataatcccagctgcttgggaggctgaggcacaagaatcacttgaacccgggggcggaggttgcagtgagtggagattgcaccactgcactacagcctgggcaacggagtgaaactgtctcaaaaaaacaaaaacaaacaaaaaaatctccatacttttgagcccaccccagacctgagaatcaggacccatgggcagggccttggaatatgcattggcaaaaacacaacagttaattcttttgaatactaaagtgttgagaaccacttgaagacatctgaagtattctgtgcagcaagctctttggtgcttggagctgtgctatatccttcttaataagcacttgactagtttgtgcttacaaggcaggtaatagtcatgagggagttcattatatttctgatagtaaggaagatttgccttacagaccgaaaatatgtatcataggttttatctgtcctggttttattccttggagactgatagaagaaacaggtctaggctgggcttggtggctcatgcctgtaatcccagcactttgggaggtggaggtaggaagattgcttgaagccaggagttcaagaccagcctgggcaacgtaatgagaccgagaccttgtctagaaaaaaaagcaagaaaaggaattggtgtattcttccacattacttttcctacagttgaagaaaactagtatgttatttcataacattcttttcttggctatacatcccccaatttctccccccctttttattttgggagtcttgcttcatcgtccaggctggagtgcagtggcacaattctggctcactgcaacctctgcctcccaagctcaagtgattctcctgcctcagcctcctgagtagctgggattacaggtgcgtgccaccatgcccggctaatttttttgtattttttaaaatttttattagagatggggttgcaccatgtttggccagcctggtttcaaactcctgacctcaaatcatctgcccgccttggcctcccaaagtactgggattacaggcatgagccactgtgcctggcctttttgttttgagatggagtctcactctgtcacctaggctggagtgcagtggtgcgatctcagctcactgcaacctctggctcccaggttcaagcgattctcatgcctcagcctgctgagtagctgggattataggcatgcaccaccacacgcatctaatttttgtagttttagtagagatggggtttcaccatgttggccaggctggtttccaattgacccatgtgatcgcccgccttgtcctcccaatgtgctaggattacaggcgtgagccactgtgcccgtcccatatccttttaaaagtatgccaaaagaagactctactgaaccagatatggtttgactagtagttagattatctccacagtgttccagattacatatttctcctaatgtagcctaaggtcaaattgacctttgtttttggcaatcacatcactttttttggtctggttgactaactcttgttgcataaattgaaatttcatctttctctaggatgtgttcacaaatgaataggtggtagctatgatgaaagcagccatcagtgaggaagttctatgaagtctacttgacatatagaatataattaacatggctgggcacggtggctcatgcctgtaatcccagcactttgggaggccgaggcagctggatcacctgaggtcaggagtttgagaccagcctggccaacatggcgaaaccccgtctctactaaaaatacaacagttagctgggcgtgtggtgggcgcctgtaatcccagctacagagacgagaggatcgcttgaactcaggagggagaggttgcagtgagcggagaccatgccactgcactccagcctgggtgatagagcaagactctgtcttaaaaaaaaaaaagaatataattaacattaattctttatttgatttggggaaaaaaaatccaaggagatcaaattaggctctgaattatgtttattggccatgaatatagatgtggagaagttgggccatccaagacggtatagtttacgtaggagagcaagtattaaaatgtaggtctcttgcttcttaattctttctttttttttttttttttttcagtgacttgctctgttgctcaggctagagtacagtggcctaatcatagctcactgcagccttgaactccttcctgtgctcaagggatcttcctgccttagcctcgcagacagctaggcctataggcatgtgccaccatgtccagctaattggtttttttgaaacattcttttgtagaaatagggtcttaatgtgttgcccaggctgaactcaaactcctgggctcaagtgatccttctgccttgatctcccaacatggggggattacaggcatgagccgctatacttggccttcttaattcttactagactgactccaacacacttctgaatgctggcttgcctttctaatggatttggcagtaggtaggaaagggaaatgggcctgaatcacatcattccctttaccctatattggtcccacctacacagcactagataaatggtcagaacatagcagggctgatttgatttgagaagctaagactccttttagagacagaacctaatggccagttggcttttgttcataaggtgcttttggttgggttacaattaaatggtcaagaaattatacatcctcaatggcattttatcagcagtatataagaactttaaaaaagttctttaggctagatgtggtggctcacacctataatcccagtgctttgagaggctaaggtgggaggattgtttgagcccaggattttgagaccagcctgggaaacctaatgagactccatctctacaaaaaatttaaaaaattagtgaggcctggtgaggaggcatgcctgtagtcctagctaattagtaggctgaggcaggaggatcgcttgagctcaggaatttgaggctgcagtgagctctgattgtgctgctgctctagcctaggcaacagggcaagatcctgtctcaaaacaaaaacaaaaacaagaaaaactttccccctagctcttataaaaattttcaaacattcaaaaagttgaaagattgttacaatgaatctaaattccaagagtaatattttgccatatttgctttatatctctctgtgttgttttttcctgtactattggaaaaataagtgtggacaacatgaaactttgccctaaatgccctggtaaaagcttttttttttttttttttttttaagaaaaaaaaaagcccataggcagagcagggctaccccataggcagaatagtccataaaagcttttcatggctggctttttggagttgtacttatggtggattcatgtaactgattacaaaaatatattgctgttaaaagactactgtaaccaaaatatcttaggtttgtgtagtttaatagtttataaatagttgtcacatctgttgttccatgtaaaccgcagctgtgatatgaacaaggtagacattgttttcttcatttatagaaagaagtgaggcttaccaggtgtaaggcagaaatgctaatgacagtaatagattctttcctggtttcttctttctaactctgacaaataattgagagtataccctcagggataatcaacacctctagatcactgcagttacttgttaagtatatggctgttagtgatggtacagaggaagtaaacatgaaaaacaattatttcagttaagataacttaattatttatattctttgttggtaggtaattccaacatggaatatttcaccaattaagaaggccaatgaaattaaggtaaacttggaagaaataattgttattcttttccagaaagacttcatcggttttgaaacttaagtacttcctctttaacttttcttgatcaatctttgttttaattccagctttgtttttttccattctattactcttaggtttgtatctcatggaattcactttaacctctgcctcgtgttatttgctttagctgtacattatgctcttaggattttttttttttctgccctgcttcttccccttattttccaaatacgtatgatttgtgtttcccattacttcatttctttctaattgtactaatgtagcctcctcagtttgtggatatccaccttgaagaagatgattcctcagatgaagaataccagccggatgatgaagaagaagatgaaactgctgaagaggtcagtgaatgttagttggtaatatttgtcttaatagagcagggtatactttgcttccttagtaatgtcacttgtagagaggattgagacatggttcttttttcagctcatttctgtgctttaagctgtttttctgccctttatactcccttaattttagaatttgttgtattatgaaatacagcatagaaacgtgcatagaataaaaatgtatagctttggttattataatgcaaatcctcatgaaactcatagcaaagtcaagaaatatatcattactaggacaacccctgtataccctccccagtcacaatcacctccctccccctaaaaataaccactaccctgccttttagtaattatttctttgcttttctttatagttgtatcacctcaatatgtatctctacacactgtagttcaattgttactgttttgaactttatataaatggacccatgtttatatgttttgttcctagctttttaaaattcaacattaagcttttgagattcatttatactattggttttagctatacttcgttccctttcattgctgtgttaatatgttctttgacttgtttcttaatgtgttctttgaattgttttgtaaaaggattttagaccaaggccttacactttgtaatgcagattaggatagtgatctgatccctgtccccacctttaggattttttttttgagtctcctctgttgcccatggagtgcagtgtgcgatgttggctcactgccatctccatctcccgggttcaggcaagtctcctgcctcagcctcctgagtagctggaattaacaggcgtgcgctaccatgcctggctaatttttgtatttttagtagagatggggtttcgccatgttggccaggctggtctcggacttctgacctcaagtgatccacccgcctcggccttccaaagtgctgggattacaggcataagacactgactgcacctggcctttaagtttctatttaaattttattttctgttactgtaactagttgagtgatggattttatttatttatttatttatttttgagacagagtctcgctctgccacccaggctggagtgcagtggcgtgatctcggctcactgcaacctccatctcctggattcaagtgatactcctgcctcagcctcccgagtagctgggattacaggtgcacgccaccgcgcctggcttatttttgtatttttagcagagacgggtgttcaccatgttggccaggctgagtgattgatattttatgattccttctcttgagatacttcagactttgtggaatgaggtaggggcataaatattaaggcgaactggatttattttgtagagcttattggaaagtgatgttgaaagcactgcttcatctccacgtggggcaaagaaatccagattgaggcagtcttctgagatgactgaaacagatgaggagagtggcatattatcagaggtaaatcggcatcatacaaaagagatgttagacataactgtctaagtagattttttaactgtataagtagattatttatccatggtgattctgggctgtcaccctttttcaaagtttcttaagttagtaaacagttcagagaaggctagaactcagtgatagccaaagaacttttctgagttctcattaaggggccaaaaatgtgcaactagcagagtttcttttctcctacccttctcttctttcatatctgtgctttttaatattgtcctaaagccattgttattaatttcccacattttggtaaactaagtagcattctgttgacttctctagaaataggatgaaaactaattagatcaatacacttggtgtctttgtttttatgtaactctaactagagaagagaaaggacaatggtgtatggaaagtctgcctctttttccctctctttttttcctttttttgctttctctttctttcttacctccttccttttttgatgcagtcacctcttttaatcaggctgagaaagtcaccacaccagccatcaggcacatcagtgctgaggtagtgcccatggggcccccgccccctccaaagccgaaacagaccagagatagtactttcatggagaagttacatgcggtagatgaggagctggcttccagtccagtctgcatggattctttccaggtaaatattaaaactgtacttaactgagaaagtcaagtggagtaatgtagttgttgctcaggctgggaagggagaggaaaagataactacaattttatataagtaagagttagtctttgatactttgtatttggctagtgctattttctgctcaaagtgacaatggcagtttggggttttttttgtttgtttgtttgtttttgagacagggtatcaccctgtcacccaggcttgagtgcagtggtgtgatcttggcccactgcaacctccgcctcccagactcaagtgatcttcccacctcagcctcccgaataggtgggacaggtatatgccaccacacctggctaatattttagttttttgtagagatgaggtctccctatatttttgctcaggctggtattgaactcctgggctcaagtgatcctcccaccttagcctctcaaagtggtaggactactggtgtgaaccaccgtgcctggctgagaatggcagtttctaaggaagaaatgaactatgtagcagagagcattttaaaatgtagaacataggaaaaagcttcacccaaattcccccaaattaaccttttaccacaattgcttgatggttctcttcctctttctctgtatatacacatagtgttttctaaatcattttagagtgtgatgcaggcatgatgccattttacctctgcatgcttttgtgtatattttctaaaaatgagtttattatcttgtattaacacagtataatagtgttaatcaaaatcaggatacaggctgtgcgctgtggctcatgcctgtaatcctagcactttgagaggccaaggttggtggatcacttgaggtcaggagttcgagaccagcctggccaacatggtgaaacccccatctcgactgaaaatacaaaaatttgccaggtgtcgtggcgcatgcctgtaatcccagctacttgggaagctgaggcaggagaatcgcttgaacccgggaggcagaggttgcagtgagctgagattgcgccactgcactccagcctgggcaatggagagagactctgtcccaaaaaaaaaaaaaaatcaggatacagtaatattacataatatattaaagtgcttattctggttttatctgttgtcccaacaatgccctttatgttggaggaaaaaaatttttttttccctattcagcattcaaccctggattaaatatctatttaattatcttgttctttagtctcctttaatctggaacagtttctcagtctttgtcttttataaccttgacagttttgaggagtatgcaccatttattttgtagaatgttcttcaatttttatttttctaatatttcctcttagattcaggttttgcacttttgttacaaatactggaagagtgatgtgtgtttctcattgcatcatatcagaaggcacgtgatccctgtaatgttaactttcatcacttggttaaggtggtgtgtgcttggttttcccattgtaaagttattattttccatttttaattagtatatatcatgtggggatatacttcaaagccgaattcctttctttctgtttttttttcctagatggagtctcactctcttgcccaggctggagtgcagtggcgcgacctcagctcactgcacctctgcttcctgggttcaagtgattctcctgcgttagcctcctgagtagctgggattacaggtgcccaccaccacgcctggctaatttttgtattttttagtagaaatggagtttcactgtgttagccaggatgatcttgatctcctgacccgcctcagcctcccaaagtgctgagatgacatgcgtcagccaccgcgcccagccttctttttttttttttttttttttttttgagacagagtcttgcctgtctcccaggctggagtgcagtggtgccatcttgggtcactgcaacctccacttcggggttcaagcgattctcctgcctcagcctcctgagtagctgggattacaggtgactgacaccacacccagctaattttttgtatttttagtagagatggggtttcaccacattggccaggctggtctcgaactcctgacctcaagtgatctgcccaccttagcctcccagagtgctgggattacagacgtgagccaatgcacccagcccaatcaatcaaattatttttctcacactaatattagcatccattgattattctttcttttttttttttttttttttttttttgagacggagtcttgctctgtcctctaggctggagtgcagtggtgcgatctcggctcactgcaagctccgcctcccaggttcacatcattctactgcctcagcctcccgagtagctgggactacaggcgcccgcaccatgcgcggctaattttttgtatttttagtagagatgggggtttcaccgtgttagccaggatggtcttgatctcctgacctcatgatccacttgcctcggcctcccaaaatgctgggattacgggcgtgaaccaccacgcttggcctgattttctttcttgaaacagtctttactatggtcgttgtcaaatgatgactttgtaattctaacatttagtgagtaattttttattttttggatatggagtcacagtctgtcacgcaggctggagttcggtggtgtgatctcagctgactgcaacatctgatctgcctcccgggttcaagcagttctcgtgcctcagcctcctgagtagctgggaccagaggcacacaccactacgccagctaattttttgtattttttagtagagacagggttttattgttggccaggctggttttgaactggccttaggtgatccacccttgtcaacctcctaagtgctgggattataggcatgagccactgcgcctggccttagccagtaaattttttttttttttttttgagacggagtctcactctgtcgcccaggctggagtgtgatggcgtgatctcggctcactgcaagctctgcctcccaggttcatgtcattctactgcctcagcctcccgagtagctgggactacaggcgtgcacaccatgcccggctaattttttgtattttttggtagagacggggtttcactgtgttagccaggatggtctcgatctcctgacctcatgatccgcctgccttggcctcccaaagtgctaggattacaggcgtgagccaccatgcctggccttagccagtaaattttaatgttccaagtttcccctatcattcttgcaggtcaatgaaaaatgtctgtcctaaaattttaaagtatgatataataatttaaaaagaaatcctaaaattaaaaaatataattaaggctgggtgtggtggctcacacctgtaatcccagcactttgagaggcccaggcgggtggatcacccgaggtcaggtttgagaccagcctggtcaacatggtgaaaccccgtctccactaaaaatacaaaaattagctgggcattgtggcaagtgcctgtaatcccagctactcgggaggctgcggcacgaaaatcgctttaacccaggaagcggaggttgcagtgagccgagatggcgccagtgcactccagcctgggtgacagagcaagactacatttcaaaaatatatatatatatataattatatatatatataatttataattatatatgtatataatttataattatatatgtatataatttataattatatatgtatataatttataattatatatatgtatataatttataattatatataagtatataatttataattatatataagtatataatttataattatatataagtatataatttataattatatataagtatataatttataattatatataagtatataatttataagtatatataagtatataatttataagtatatataagtatataatttataagtatatataagtatataatttataagtatatataagtatataatttataagtatatataagtatataatttataagtatatataagtatataatttataagtatatataagtatataatttataagtatatataagtatataatttataagtatataatttataattatatataagtatataattaaaaatagaatattgaatggaatagctctgagtcatttaatcaccatgctttggagtatgtagtagtaggagcagtaatagttttttatgtaatcatttatttaccaaacacatactgaatggttgaagttgagaaacaacagtgtagaagacagaaaaaattgttcttcatggaacttagtctgttgaggagagatagactataaacatataaacaagtaaattcggatgtggttaagtgctatgaactaaattaaaatgaggaaatatgaaacttcctgtcagagaactttagataggctgatcaaaaaagacctccttggctgtaattccatcactttgggagtcctaggctagaagattgcttgaggctaggagtttgagaccagcctaggcaatatagtgagactccatctctccaaaaactcagaaaaattatataggtgtggtggcgcatgcctgtattcttagctgcttggtggctgaagcaggaggattgattaagcctgggagcttgagactacagtgagccatgactgcacccctatactccagcatgggtaatagtatgagaacttttttaaaaaaaattttaaaaaacagggtccggtttggtggcttatgtccataatcccaacactttaggaggccaaggagagtggatcacttgagcccaggaggtcaagacaagcctgggtaacctagtgagaccttgtccctaccaaaaaaaacacaaaacttagctgggcatcctgttacacacctgtagcctcagctacttgggaggctgagcctaggagatcgaggctgcagtgagctgtgatcatgctacagcactctagcctgggccacagagcaagactgtcaaaaaaacaaaaaacaaaaagaaaaaaggcctctttgaggagatggcatttaaactgagatccgaatgagaggaagccaggcatgtaaaagatctggggagaaaaagtgctccatatggaagaaacagcacattctaagtcgctaagatagaaacaaccttggcatggttaaggaacagaaactacatgaagggtgggatcgtgaaaaagaggtagaaatgaggtcagagagcaaggcaagagctagatcatgaaggtcttaggaaaccatgataaggggtgtagattttattttaaacattagaacagatgcccagtgtggtggctcatgcctgtaatcccagcactttgggaggccgaggcgggtggatcacctgaggtcaggagttctagaccagcctggccaacatggtaaaaccccatctctaacaaaaaatacaaaaaatgtcctgggtgtggtggcgcacacctgtaatcccagttacttaggaggctgaggcaggagaatcgcttgaatgtggggagtggaggttgcagtgagctgagatcatgcccctgcactccagtctaggaaagagtgagactccatctcaaaaaaaaaaaaaaataaataaataagaaaagatttttgtgatatttttggattaatgttaaaaattccttttggttaacgtgtgggaaatggactagagtaaagcaagagggtaaacagaaacccattagcaggttgatgcagtgtagtctagggagagcttcccaaattgatctacagattcaatgcagtccctatccaaatcccagctaccatttttgtggaaattaacagtctaatcctaaaattcatgtggaattgcacaggcccagaatagccaaaacagtctttaaaaagtacaaagatggaggtctcacactttctgattttcttttttttttttttttttttttgagacggagtctggctctgtcacccagactggagtgcagtagtgcgatctcggctcactgcaagctctgcctcccgggttcatgccattgtcctgcctcagcctcctgagtagctgggactacaggcgcctgccaccatgcccagctaattttttgtattttttatagagacggggtttcactgttagccaggaagttcttgatcttctgacctcgtgatccgcccaccttgtcctcccaaagtctgggattacaggtgtgagccactgcacccagcctcatttttttaaaataaatattttaaataagagtcttgctctgttgcccaggctggagtgcagtggtatgatctcagcttgctgcagcctcaacctcctcctgtgttcaagtgatcctcccacgttggctcttgcatagctggaactacaggcatatgccaccactcccatctaactttttattttttgtagagatgggggtcttgctgtgttgcccagctggtcttgaactcctagactcaagcgatcttgtcaccacagcctatcaaggtgctgggtttacagatgtacaaatgtgagcctctgtgcctggccctgttttttttttttttttgagatgtctctcttgcttaggttggagtacaatggtgcaatcatggctcactacagccttgatctcctagtctcaagagatccttctctttcagcctcctaagtagctgggactacaattggtgccaccacacgcaactaatttgtttgtttgtggcagagatgaggtctcactgtgttacccaggctggtctcaaactcctagcttcaagcagttcttcctgggcctcccacagtgttgggattgcaggtgtgagccaatgcattcagccagcggtattatacttaattgccccacagtggaaacaatctgaattccatcaacagataattggataaacaaaagtggtatatctatacaatgggatattattgggtgaaaaaaggaattcggggccaggcatggtgactggagtgcagtggtacgtgtctcactgtcaccttgaactcctaaacccaagcaattctcctgactcagcctcttgagtagctggtaccacaggcacataccaccatgcctttaatcccagcagttaggaaggccaaggcaggaggattacttgagcccagtccaggagtttgaaacttgcctgggcaacatagggagtccccccacccccatctctacaaaaaatgaaaaaaattagctgagtatggatccagtggctcacacgtgtaatcccaacactttgggaggctgagcaggtaggtcacctgaggtcaggaattcaagacaagcctggccaaccccatttctactaaaaatacaaaaatttgccaggtgtggtggcacacgcctgtagtcccaactatttgggaggctgaggcaggagaatcacccgaacccgggagatggaggttgcagtgatccgagatcgtaccactgcactccagaatgggtgacagagcaagactccatctaaaaaaaaaaaaaaaaattagccgagcatggtagagcatgccgatagtcccagctacttgggaggctgaggcaggagaattgcttgagcccaggagttcgaagctgcagtcagctctgattgtgccagtgctgtagcctgggtgagagattgagactctatctcttaaaaaaaaaaaaaaaaacaccaggcatggtggctcacagctgtaatccgaacactttgggaggctgaggtgggcagatacctgaggtcaggacttcgagaccagcgtgcccaacatggtgaagctccgtttctagtaaaaatacaaaaattagtcagatgtcgtggctggtgcctgtaatcccagctccctgggaggctgaggcaggagaatcacttgaacccaagaggcagaggttgcagtgagccgagatggcaccactgcattctagcctgggcaacaaagcaagactatgtctcaaaaaaaaaaaaaaagtattgatagatattacaacagggtgggatttaaatgcattatgctaactgaaagcggccagagacaggccacacattttatgattccatctaagtgaaatgtccagcagaaacaaatccatagagacagaaaatagattaatgcttaacaggggctgggaggagggggaaagggaagcgactactaatgggtatgggatttctttttgggttaatggaatgttctgaaattagataatggtgatggttgtataactctgtgaatatatgaaaatcctttcaattatacactttaaaagggtaaattttatggtatgtgaattgtatatcaataaagctgttataaattttcctaaaatgttggtttcaaactgatgtcatttattttatttcttttttatgtcgtgtttcttaaagtttctcaaacaataataaatccaaattgtttagaggaaggatcctgttacttaagctaagatgagaagaaaaggagtgatgatgaggtttggaaacatcactcactcagtgacttttctttctccattgtccagcccatggatgacagtctcattgcatttcgaacgcgttctaagatgcccctgaaagatgttcccctgggccaattagaggcagagctccaagctccagacatcactccagatatgtatgaccccaatacggcagatgatgaggactggaagatgtggctggggggacttatgaatgatgatgtggggaatgaaggtaagttttggtttgtgatttattatgtatactgtccattatctgttgtaaaatttttagtatttggaagggtatagaatggaatggtttgggttaattgatttaatttgtatttaactgataatttatcttaaatcagtagttaatttttctttttttttttttcctgagacagggtctcactctgtcacccaggctgagtgcagtgttgcagtcacggttcattgcagccttgacctcctgggctcaagcaatcctaccccttatcccactgagtagctgggactacaggcacatgccactgtgcccgactaattttttattttttgtagaaacgagatgtcactatgttgcccaggctgttcccaaactcctggcctcaaacaatcctcctaccttggcctcctgaatgctagaattataggcatgagccaccgtgcctgggccaattcttaacatttctttttctgggtaaggaatcttttgaatcctaagattgttgaatgctaagatttgaatcccttgaaacatacatgcacatgtagttttgttgttgtcttttgtttttgagacactgtcccaaaacagggtgttgcccagggtggatcacagtggggtgatcatagctcactgtagccttaaactcctgggctcaagagatcgtcctcaggtctcagcctcccaagtagctgagattataggcacgcaccaccttgcctggctaattttttaaaaatttctgtagagaaatgttgctcaggctggtcttaaactcctgcctcaagtgatcctcccaccttggcctcccagagagctaggattacaggcatgagccactgtgcctggcccactcaaaattttatgtatgatttcattagggttcagtgatttaccaaaagaacactgtgttagttaagggtcttcatgatgcaagtgaaagaatcctaactctatcttgctggggtgaaatgaaaccagactttgggaagtgtagtaaatcagcagtggaactgaggcactgttaggatccccctttcctctctattttacttccttttgtcactcagctccattctcacatttatttttctacaaggttagagctctgttcataaacactccgtgattactttttgctttgtctacacttcaggactctcccctgcaagctccagttataaaatccaggggaacaagtcagatcgacttggtttgatctcatgcccagtctcttggtactacatgggattgatagggagactgttcagcatggagtctggtgattgatagcacctcatagaacagtgtggttgaagtatgtggtgaccctaaagaagtaatggtattatcagaaatggggaagaaatattgatcagataaaagtttggatggaaacagactaagtaggctgggcgtggtggctcacacctattatcccagctctttgggaggccgaggcgggcggatcacaaggtcaagagattgagaccatcctggccaacagggtgaaaccctgtctctactaaaaataaaaaaatttgctgggcgtggtggtgcacgcctgtagtcccagctactcaggaggctgaggcaggagaatcacttgaacctggcaggcgaaggttgtagcgagccgagattgcgccactgcgctccagcctggcaacagagcgagactccatctcaaaaaaaaaaaaaaaagaaaaagaaatagactgagtaaatggctgggtaggtaatgctaggagtaagtcaggataagtgaatgaaagaaaataacaggtccttgaatgtaccttatgatactattaatagttatatagtatatcatttggcaaatgtttgagtactttctttatacaaggcattgtgctagaatctgtgagggataaaggagcataatcatttggtcatggaataaaagctttatgaatgacagggtgcctggcccattgttaggttcacaatacattgtacttttttgtgtgtgtgtgagacagggtctcactctgtcacccaggctggagtgcagtggtgagatcttagctcactgcagccttgacctccttggcgcaagcaattctcccacctcagccttctaaatagctgggaatacaggtttgtgccatcatgcccggccaatttttgtattttttgtagagttggggttttgccatgttgcccaggctggtctcgaactcctgcgctcaagcgatcctcctgcctctgctttccaaagtgctgagattacaggagtgagccatcgcgctcagccagtatattgtaaatgaatgaagttgttgaataaactcagatatgccatcaaagtggcataaatgctgttgtaagattttagaagaggacagggtaacttttgtttaggatgatcagagacagctacatgaaagagctggtaattgaaatggaccttggaaagatttttgaaaacagtgacagggaagagagaaggcatctgagtagaagtgacatgatatactctatatgctggattctgtaggatatattctttccagagttttctcttttttcactgtaaaactgtaagagtaatatatgcttggtataaagaaatcaaatattacagaaataaaacaattaaagccttccccccccccaaggaaaatgtacatatctacatacatgaaatttttcatatgatttttttggggtttatgtatctcttagagtttatttattggcacttcattttcctaccagtcatttccaaagcctttgacaccaaggttcaagtttggttccccagagggactactgataatactttggtatgcatctgtgagagttttcaatgtgtagttactttttagttttccacattaatgtggggataaaaataattaaattttagtcctaaatttaaatttaagacttttctcaaacatttagaaaagatagtccaggcgtggtggctcatgcctgtaatcccagtactatgggaagccaaggcatgaggattgcttgaggccaggaagtcaagaccagcctgggaaacacagtgagacctcatttctattttttttttcttcgacagagtctcgctctgtcgcccagactggagtgcagtggtgtgatctcggctcactgcaacctctgcctactgggttcaagcgattctcctgtctcagcctccccagtagttgggattacatgcgcctgccaccttgcctggctaatctttgtatttttagtagagacagggtttcaccatattggtcagactggtctcaaactcctgacctcaggtgatccaccctccttggcctcccaaaatgctgggattacaggcatgagccaccgcacctggcatttctatttttaaaataaaataaaattttaaaaaagagagagaaaataacaagaagcaaattgttttaaatcttatcatatttcttttttttacccaccctctgtagtagaggggctaacaagccacaaaatgaaaaaaattgtgtaaggagaaaaagatggagtttgaagctgagtcattaacatgcaaagtatagaatcagttccttcataattagcaactgatatattatcccattagtcattctgataggagtctaagcttctgagttttccattactcacccctttgacaatctgatgaaaactatgcagccttcccccagaaaaaaatgtacatatccaaatacatgaaatttttatatgatttttgggagatacatatcttttaaagtttattgacacttcctgtttctaccaggttcagaaatctccacaaaaaggaatagacaggacagagagttctttttttttttttttttttttttgagcagcagcaagatttattgtgaagagttaaagaacaaagtttccacaacgtggtaggggacccgagtgggttgcccaaggacagatagttctaaccactttgtaggcagtgaaatctcagagaaattcattgtcttgctcaaagttacagaatcaatttgttatactcctaggagtagaacccagtttaatattctaggaacatgtctcaatcagacaggtttcacggtaagttaaacctttttttttttttttttttttctgagacagagtctggctctgttgcccaagctagagtgcagtggcacaatccctgctcactgcaacctccacccgggttcaagcgactcttctgcctcagcctccagagtagctgggactacaggtacgcgctaccatgcccagctaatttttgtgtttttagtagagatggggtttcaccatattggccaggcttgtctcgaactcctgaccttctgttccactcgcctcagcctcccaaagtgctgggattacaggcttgagccaccgcacctggcctaaaccatttttttttgagagagtttcactcttgtcccccaggctggagtgcagtggcgcgatctcggctcaccgcaacctccgcctctcaggttcaagcgattctcctgtctcagcctcccaagtagctgggtttacaggcatgtgccaccatgcctggctaattttgtatttttagtagagtcagggtttcaccatgttggtcaggctgttcttaaactcctgatctcaagtggtccacccaccttggcctcccaaagtgctgggattacaggtgtgagccaccacgcccggcctaaaccattttttaaaagtatatgacttttcataatgagctgtgttttttgttttgttttgttttgttttgtttttgagatggagttttgctcttgttgcccaggctggagtgcaatggcacgatctcagctcaccgcaacctctgcctcccaggttcaagcgattttcctgcctcagcctcccaagtaactggattacaggcatgtgccaccacgcctggctaattttgtatttttagtagagatggggtttctccatgttggtcacgctggtctcgaacttccaacctcaggtgatccgccctcctcggcctcccaaagttctgggactacaggcatgagccactgctcctagccttcataataagctgtgctttttatctttggcacaggctaatacaaaataattacagtaagaaagtcaggttctcctagcgttattggtagcagcagctttggtgctcattttcatcactttggttcaaaggcctaagatggtagctattgggaaggaaaggccaggcagaactgactttcaggattttgtttctcataatttggttccgagaacttgaatcagaattgaagagtgtatggatatgtagggtgatgtttattaaagatacagatttcagggcttcaccccttacctactgaatcagaatctaatgagtatggtctagggatctaattctgatatatctaaaggattggaaactactggtctgggaaaggtaagagtgcatgataaaggttgattggggaattggactaatggttagggggagggtgaaaatcctcttttcttaaaataaaacttcagtttgttttgttttgttttgagacagggtctcactcttgtcacccaggctggagtacaatggtgtgatcttggctcactgccacctccacctctcaggttcaagcacttcttctgcctccacctccctagtagctaggattacaggcacatgccaccatacccagctaattttgtatttttagtagagacggggtttcaccatattggtcaggctggtcttgaactcctaacctcaggtgatccgcccgccttggcctcctaaagtgctgggattacaggcgtgagccaccacgcccagcaacttcagtatttttgtatgtgcctattcggacagatttttaaaagagcacacaaagccaatgattaggatgggtgtggcctccagatctaccagttgagttaaaagacaatacaggaggggtatatcagctgggtaaatactgacattgttaataagtcaaaaaagtgattaagctcagaggacatattccacaatcagggtactaaaagctaagcagaactcagaagaatccccctaaatgatttttcagcatctttgttaaatgagtgctctgagaataatattcgctgacccatttgtgtggtgtgggcagaactatctattgcagttcttgcatccaaacagatggagtccaaacctgtgcacactactcattattatgggctcttccagaactttcgttattcagcaatgtttgttaagaactttttgatcaggcgcagtgtctctcacacttctaatccctgcgctttgggaggctgaggcaggcagatcatgaggtcgggagatcgagaccatcctggctaacacagtgaaaccccgtctctactaaaaaaaaaaaaaaaaaaaaaaaattagcctgacgtggtggcgggtgcctgtagtcccagctacttgggaggctgaggcaggagaatggcgtgaacccgggaggcagagcttgcagcgagccgagatcgcccctctgtgctccagcctgggcgacagagtgagactccatctcaaaaaaaaaaaaaaaaaaagaacttgctgtgaagagacttatatagaaagtactatagagattatgaattatgaagacagtattctattcctaaagaaataaagaatctgtactgataagttaaacccacaaatagatgaaaaagatttgataattagttatgtgtaaagaatgcaaattaatatattataagctgagtataaatgttgagtaaagaattatcaagttagattagggtttaatcagcacagatttttcagtgattgtgaattttaaatgtgtgtctgtataagtatatatatatttatatatatttatatttatataaaaaatatatatttgtttttgagacagggtctcactctgtcaccctcgctggagtgcagtggcgtgatcatgactcactgcagcctcaaactcctgggctcaagcagtccttccagctcagccttctgagtagctgggactataggcacacaccacgacacttggctaatttttaaaaagtcatttgtagagattggttcccactgtgttgcccaggatatatatatgtgtttttttttttttttcttgttagatggagtctcactctcgcccaggctggagtgcagtggcatgatcccagctcactgcaacctctgtctcctgggttcaagtgattctcctgcctcagcctcccaagtagctggaattacaggcacgcaccattactcttggctaatttttgtatttttggtagagacgggagggggggggtctcaccatgttggccaggctggtctcgaacccctgacctcaagtgatcttcccacctcggcctcccaaagttctgggattacaggcgtgagccaccatgcttggccccaggctgtatatgtctgtttataacaaaagatgtttatttatggccaggcacggtatccagtctgggcaacaagagcgaaactccctctcgaaaaaaaaaaaagatgctcatttattatgaaaagttaaaacattatggaagaggcgccagactctgtggctcacgcctgtaatcccagcactttttaggggccgaggcaggtggatcacctgaggtcaggagtttgagaccagcctgaccaacatggtgaaacgccgtctctactaaaaatataaaaattagctgggcatggtggtgcacatctgtagtcccagctactcgggatgctgaggcaggagaatcgcttgaacccagcaggtggaggttgcagtgagctgagatcgagccactgcactccagcctgggcgacagagcgagactccaccttaaaaaaagaaagaaaaaaaaaatattgtgggagggtacacagagaaatctttgttaatagttttatgtgtttctttctagatactctgtgggtgttcagtcaagcatgtatttatctcaaacaagaatttttttccacaaaaagaatcatactatacatattggtcttcatctgcaacttgcttctttcacttagcagtataacatatatttttccattataatacatagagatcacctcttctatttaatggatacatgatagtaagaaatttaggtattctctttttggtctttttttttttaaatcagttcctcagtcacactagctgcatttctcaagtcacatgtggctaatggctactgtatgatacaatacaatacatgtatagatcatttccatcatcacagaaagttctgttagacaacactgatctaaaattatctggagaaaaatattaccttaatatataataattccataatttaatgactccttcataatttttacttagtaattgaaaagacagtttagcattaacattaaagaaaattaggctgggccctgtggttcactcctgtaatcctagcactttcggaggccaatgcaggcggatcacctgaggtcaggagttcgagaccagcttggccaacatggtgaaaccttgtctctactaaaaatagaaaaattagccgggcgtggtggtgggcatctgtaatctcagttacttggtaggctgaggcaggagaattgcttgaagctgggaggcagagtttgcagtgagccaagatcatgccactgcactccaacctgggtgacaaagtgagactccatgtcaaaaaaaaaaaagaaaaaagaaaattaaaagggagaagaacatccatatttctattattctaacctaacaaatgtttattatttttgtatatttttagttatttatgattcttattgtaaggatataatttttcatgcttatgattattatgtatatattgtacttttgtcatacatgtattgaacttttatagaatggttacatattcacattttatatgtgtacgtgttgagtatccccttcatccaaaatgctcaggaccggaagtattttggatttcagattttttcagatattagaatatatgtattattatacttaacagataagcatactaaatttgaaaatttgaaatctgggcagggtgcaatggctcacactgtaatctcagcactttgggaggccgaggcattcagatcgcttgagcccaggagttcaagaccagtctgggcaacataccaaaaccctgtctctactaaaaatacaaaaattagttgggcatggtggcatgtgcctaatcccagctacttgggaggctgaggtgtgacaatcgcctgatcctgggcagtcaaggctgcagtgagccatgatcgtgccactgcacttcagcctgggtgacagagtgagaccctgtctcaaaaaaaaggaaaaagaaaatttgaaatctgaaatgctccaatggctattccctttgagagtcatgtttgcactcacagagtttcagattttggagttttggatttggaatgctcaacctgtactattttatactaagaaattataattatatagtcattctctaattgttgggaatttgggccactccttttttcactgtcagcttcactgtacaagtagcttttacagaaagtattattttcatggaatatactacacaaaattagctgggtgtggtggcgtatgcctgtggtcccagctactcaggaggctaaggtgggaggatcacttgagcccgggaggtggaggttgcagtgagctgaggctgtaccactgcactccagcctgggcgacagagtgagaccctgtctcaaaaaaataaagaataaatgtgctttattggaacagattcttagaagtttgagaacagagttaatgagcatctgaaacacttttttttcctagatgaagcagatgatgatgatgatccagaatataatttcctggaagacctcgatgaaccagacacagaggatttccggactgaccgggcagtgagaatcaccagtgagtctgtgtttattctaagtcctgctcttgactgctttgcagctgtctttgtttactttgtagatttttaggggtgaagtttgcagctcatccatgttaagacatttaggtttcctttacccatttattgatctgattctttaaatttaggtacatattcagaaagcccatcagttattcatttgtatatcccacagtcgtgtattcagtccttactgtttggcagggattgtgcaagatgaataagacatggcatctgtgctgtaggagttcagcctagtagggtgatagaaacagaaaaagttacaatacaaagtgataaatgctgtaacaggttttacataaggtataataatgacctaaaagagagtgtcatctcctagtgtatgatatggactaggataggagaacttaggaaagaatttgcagaatgaaatggctttttatcttagttttgaaggaggaataagaaatttggtgaatagggacagagaggaatattgcaaatagaagagcatctgcaaaccacagaattgtaaaacatcaaaaaagtatgtttggaaaatactaagtactttggtggtggtgtatgagtgaaaagacagagaagtggtagataagattaggtagtgtttacatcatggaggatttttaagctctcaaaatgaggtttaagggcgggcatggtggctcacgcctgtaatcccagcactttgggaggtggaggcaggcagatcacctgaggttaggagttcaagaccagcctggccaacatggcgaaaccctgtctctactaaaaatacaaaaattagccaggcgtggtagtaggcacctgtaatcccagctactccggaggctgaggcagaaaaattgcttgaactcaggcgggagaggttgcagtgagccgagatcacgccaatgcactccagcctgggcgacagagcaaggctccgcctgaaaaaaaaaagaggtttaagcagtaaatcagtaggaactgatttggattttagaaagatcactttgatttaataccagtttaatgtattaatttgttaggtaaagtgaacaagactggaggtatggaaaacaattatgataacttagcttgagttatttctataaaaaattatatcattgagctaggagtggtggcttacacctgtaatcccagcactttgggaggctggggcaggaagattgcttgagcttaggagttcgagaccggcataggcaacatagagaaactttgtctgtactaaaaatttaagaaattagcctaatgtattggcacgtacctgtagtcctagctactcaggaggctgaggcaggaggattgcttcagcccaggaggtcaaggattcagcaaactatgatagtgccactgcactccagccttggtggcagagggagatcctgactcaaaaaaaaattatatcattggctagtgtgtcaagcatagaaaacatacatttcatcctgaagaaattctacctatggggagaaagaaaaataaaaaatatatttcataagccattgatttttattgcatgtatgcatgaccctgtactggaataatatacacgacatggagaaggtaagatgctggctcttgaccaggttatgcagagagctttataaacatccaagatatacctaattaatgcagttctttgtgtaaagagaattatgtaaatacaatcctttagaacttacattttattttattgctttattgtgcctttcaccttgcttttaagattagaataccatttcctttgtgaagatctttcatttattttgatatactatgacagggatagtggaagcattgaaaggaaagcaccaggaattagagaaaatgtagaatgaaaaggtttgaggatttaggctttgagaaaactgaaaggagaatctaggaaggtacaagaaaaacctagaaaatctagtgtcgtagaaaccaaaggaagagtcttttggctggggcacagtggctcatggctataatcccggcacttgggaggctgaggcagaggcagaaggatcgcatgagcccaggagttcaagaccagcctgggcaagatagtgagacattgtctctacaaaaacattttaaaaataaaatgaaaattagttgtcgtggtgcatgcccgtagtcccagctacttgggaagctgaggtgggaggatcacttgagcccaggaggtggaggctgtagcgagcagagatcccaacactgtactccagcctgggtcagagcaagaccctgtttcaaaaaaagagtctttcaagaaggacagaatggtcaacagtaaagaaacaagtaaagaaacatctgcttaaagcacaaaagcagatcttaagttcagctatcatcctggaatatatttgccttccctttttgattgttactttcttcagtttacgtataatttctcagggagatcctccttcgttaggattgatcttcttgctttgcattcccgtaccactctttttgtccttttatatactgatcacctcataattgcttatttaatatctgtcttctcccctagactgtgaacttctcaagagctttgttttgtttattgctgtaaagctggtggcaatatttgccagtcgaatagagatgggtaaatgaagggcagtctttctagtcatacagttctgtaatgatagtgaaagctggagtagaatttttaatttttttttctgcctcttgtcctcttgtgtctcattgtcatatttgattataatctctttaaaaggacttatccttatatggataactaaaataaaaaaattaaaaagcatagaatcacagagtttgaaaagctccatgtggtcacatgttttttgcccgcttgagaatttgtttacacctcctctgaggtggcctttttagtcctgtttgtataccttcagtgacagggagctcaacaattctgcagatagtgtattgtaaacttgaacacctcctcaattaatactttccttattgaacccaaatctgaatgcaaattcagatactttccttattgaacccaaatttgaatgcaaagcaggaagatcaatccttttatattcctcctatttgtctttatgttatgttatgttatgtgatgttatgttatgttatgttatgttatgttatgttatgttatgttatgttatttttgagatggagtttcgctgttgtcgcccaggctggagtgcaatggtgcaatctcagctcactgcaaactctgcctcctgggttcaagcgattctcctgcctcagcctccagaatagctgggattacaggtgcccgccaccacgcccagctaatttttgtatttttagtagagacggggtttcaccaggttggccaggctggtcttgaactcttgacctcaggtgatccacctgcctcggcttcccaaagtgttgggattacagtcatgagccgcactgtgcccggcctcctatttgtcttttgttgttaagaaaaaaaaaagcaatttattcccaagtgtacatattaaaagatgtttcttaagtttttttttttttttccctatgcaaaacataggaaagtttcaagtttcttctgccaggtttcttcttctccaaagccttggtgtccagacctctcaccatgcacattactcttctctggattctagcatttattttctttaaacttttcccctgttacatcttattatgaaatttaaaaatatatatagaaaaattgaaaaattatacagctaacattcatatactcaccacctacttttttttgagacgaagtctcactcttgttccccaggctagagtgcaatggtgtgatctcggctcactgcagcctccgcctcccaggttcaagcggttctcctgcctcagcctcctgagtagctgggattacaggcgcctgccaccatgcccggctactttttgtatttttagtagagaagaggtttcaccatgttggccaggctcatctcgaactcctgacctcaggtgatctgcccgcctcagcctcccaaagtgctgggattacaagcgcgagccactgcgcccagcctcaccacctactttctatagtttgttggtttttttttgagaaggagtctcgctctgtctccaggctggagtgccgtggcgccatctcagctcactgcaacctccgactccctggttcaagtgaatctcctgcctcagcctcccgagtagctgggattatagtcacgcgccaccatgcccagctaatttttgtatttttagtagagacagggtttcaccatgttggccaggatggtctcgatctcctgaccttgtgatccgcccacctcggcctcccaaagtgctgggattacaggcgtgagccactgtgcccggccaaactttcagtagtgttaatataaactgtgcgcctttcatatgtgcgggtttcacagctgcagattcaaccaaccttgaaaatattctgagaaaaaaaaatgcaacagcaaaaaataatactaactgggcgtagtggctaacatctgtaatcccagcactttgggaggctgaggcaggaggatcgcttgagcacaggagtttgagatcggctgggcgacatactgagattccatctctacaaaaaactttaaaattatctgggtgcagccgggcatggtggctcacgcctgtaatcccagcactttgggaggccagggtgggcagatcacgaggtcaggagttcgagaccagcctggccaatatggtgaaaccccatctctactataaatacaaaaattagccgggtgtggtggctcacgcctgtagtcccagctactaaggaggctgaggcaggagaatcgcttgaacctgggaggcggaggctgcagtgagccgagatcgcgccactgcactctagccagggcaacagagtgagacgctgtctcaaaaaaaaaaaattatctgggtgcattggtgtgtgcttgtagtcccagctactctggagacagagtcaggaggatcccttgagcccagaagttcaaggttgcagtgagctgtgatcataccactaccactgcactccagcctgggtgacagagtgagagcttgtctcaaataaataaataaaaaataataaggtataacaagcatttacattgtattaggtgataagtaatctagagataaggtatacaggaggatgtgtgtagattatatgcaaatactacatcatttttatataagggacttgagcatcctcagattttggtatccatggatacgaaatggttccaggagattggctcctggaaccaacctccacagatactgagggatgactttatttgccttatcatgcagctgtccatctccctgtccgtctgtggatgcatcttagttttcaaatgcatttcagagtaaattatacttcacttttttttctttttttttttaaattcagacaaggtctatgttgcatgggttggtcttgaactcttgcggtcaagcgatcttcccacctcagcctcctgaccagctgagattacaagtgtgcacaatggcacctggctatatgtcactttttttttgtatttttagtagagacggggtttcaccatcttggccaggctggtctcgaattcctgacctcgtgatcctcccacctctgcctcccaaagtggtgggtttacaggcatgagcctatacttcacttttaaccacttcagcacgcatataatgaactagagctccatatttgtttatgatttctttttataggtaattttacacacagtgtatcacacacatctcaagtgtaccatttaatgaattttgacatgtgtgtacctatgtgacacaaatccctgtcaggatatagaatcctcaccccaggaagtttcctcatgccccttccaagtcaatccccacaccatcccttcagaggcaaccactgttctgatttttttttttttttttttccgagacggagtctcgctctgtcacccaggctggagtgcagtggtgcggctcactgcaagctccgcctaccaggttcacgccattctcctgcctcagactcccgagtagctgggactacaggtgcctgctaccatgcccggctaattttttgtatttttagtagagacggggtttcaccgtgttagccagggcgatctcgatctcctgaccttgtgatccacctgccctggactcccaaagtgctgggattacaggcgtgagccactgcgcccggctttttttttcttaatcacaggttatgtttgccagttttagaacctcacataaatggaatcatataggatgtgctttgtgtgtaaggcttctttcactcagcataatatttttgagattcatttgtgttgcatgggtcgttagtttgttcccttatattgttgagtagaatttcgttgtgtatatatactacagattatctatttttgtgttgatcacctgggctatttttaattttgggtaacgaataaagctgcgctgaacttttttgtgcaagtctttgtggaaatgcttcatttctctctctctttcatttgttcccacctatgagttagaaaagccgtatttcatttatcttgggtcagctgtataggagacaaatcactgggtcacagggtatgtttagttttataagaaattgccagaccattttccaaagtggctttccattttacattcttatcagagttctggttgctctacatcctcagtaacatttggattttaattttttttgttggctgggcatggtggcgcacacctgtaatcccagcactttgggatactgaggcaggcagatcacttgaggtcaggagttcaagaccagcctgggcaacatggtgaaacaccgtcgctactaaaactacaaaaaattagccaggcgtggtggcgcatgcctgtagtcccagctacttatgaggctgaggcatgagaattgcttgaagccggaaggtggaggttgcagtgagctgagaccgcgccaccgcgctccagcctgggcaacagagtgagactcagtctcaaaaaaataaaataaaaaataattaaattacttaaatgattttgtttttgtttttgttttgtgtttgagacagagtctcactctgtctctcaggctggagtgcagtggtactatctctggtcagcgtagcctctgcctcccgggtttaagagattcttgtgcctcagcctcccaagtagctgggattacaggcatgtgctaccatgactggctaatttatttatttatttatttttgagatggagtcctcgccctgttgcccaggctggagtgcattggtgctgtattggctcagtgcaacctccacctcctgggttcaagtgattctcctgcttcagcctcccgagtagctgggattccaggtgcatgccaccatgcctggctaatttttgtatttttagtagagacggggtttcaccatgttggtcagactggtctcgaactcctgaccgcagatgatctgcctgcctcggcctcctaaagtgctggaattacaggcgtaagccactgcccgtggcctggatcttaatttttttaatgtcctcttaagaagggcctttatagaattgttcacagtcctccagacatagtgttagactctgctctagttcagtgatatgtttgccttgttggttatgagccccgttttggagcaactgtgtcttattgaacttgatatcaaccaaaacttttttttttcctcagattcttgtaacaaccaaaactttcaggtcttgttcacattatttttaagccacgtcaccttttcatgcagttaataaactgatctttaaaactcttgctgggcgcggtagctcacgcctgtaatcccagcattttgggaggctgaggcgggtggatcacgaggtcaggagatcgagaccatggtgaaaccccgtctctactaaaaaatacaaaaaattagccaggcacggtggcaggcgcctgtagtcccagctactcaggaggctgaggcaggagaatggcgtgaacctgggagatggagcttgcagtgagctgagatcgcgccactgcactccagcctgggcgacagagcaagactccgtctcaaaaaaaaaaacgaaaaaactcttaactgtaggactgggcaccgtggctcacacctgtaatcccaacacttagggaggccaaggtgggaggatcgctggagcccaggagtttgagaccagcctgggcaacatagcaacatgctgcctctattaaaaaaaaaaattcttaaacatagaactttaaatttatccgtatatgttgcatccagttgatttgagaaaatataattttgaattttccgtctgttggattggcagtccctttcagctttacatcatctacagatgtgttaggtatgttctctgggtcttctaagtcaccgatggagttcttgaatagttcagatccaaagacagcgtcctgtgaaaccctgctggaaacttgtctttctctctctcttttttttttaagacaatatcttgctctgtcgcccaggctggaatgcagtggcatgatcttggcacactgcagcctctgcctcctggactcaagagatttctctcacctcagcctcttgagtagctgggactgcaggtgtgcgtcaccaagcccagctaaatttttttgtagagatatggtttcaacattttgcccaggctaggagactcatctcttgattccattcagtactgtgtggatttggataggtcatctaattataaaatcatctagctcacattttctcctgtcttcttccttttagaatttaagcttcatgagaatagaactctctctctctatctctctttcattctctcatatatcccaagcatctaaaacatggattgaagcatagtgctcaataaatgtgttttgttgttgttgttgttgttgttgttttttgagacagagtctcgctctgttgcccaggctggagtgcagtggcgcagtcttggctcactgcaagccctgcctcccgggttcacgccattctcctgcctcagcctcccgagtagctgggactacaggcgcccaccaccacggctggctaattttttatatttttaatagagacggggtttcaccatgttagctaggatggtctcaatctcctgactttgtgatccatctgtcttggcctcccaaagtgctgagattacaggcatgagccaccgctcccggcctcaataaatgtttttgaataaatgaatgaaggatagccagtcatggtggctcacacctgtaatcccaccattttgggaggccgagttgggctgatcacttgagctcaggagttcgagaccagcctggtgaaccctcatctctacaaaatatacaaaaattagccaggcatggtggcatgcgtctgtggtcccagctacttggggagctgaggtgggaggagcgattggaccagggaggggatgcggaggttgcagtgagctgagatcgtgccactgcgctccagcctgagtgacatagtgagacccatctcaaaaaaagaaggatagatatgaagaatttgtcatgccttgttgaaaacattatacattgtcttcatggaattcctccttattgtaaaatctaatttataccaacaatatactgtctggctttcttgcagaaaaggaagtaaatgagctgatggaagagctgtttgaaactgtgagtaatgatcctcgagtgagaacacgggattttaagtcagttctccagcaagatgtgtcatttggtctctgtgatgctccctctaggagagggggtctgactgaaccaattctccttttagtctacctgggaaagaatataatgacaagggaattttgctaactactagactcttgattatatacatgtatgttgttcttattaacattttccttgaaacttctttttgtttgagggggttcttgctccatcacccaagccagagtgcagtggtgaaattacagctcacagcagccttgaccttctaggctcaagcagtccttcgtctaagcctcctgagtagctgggacataccaacacacccagctaattattttatttgtagagacagggtcttaccacattgctcaggttgttctggaacttctgggctcaagcaattttcctgccttgggcctcccagtgctggaattataggtgtgagccagcatgcctggcccctggaaaacttttgatgacttcccctactgtcatttggtgtgtccttaaagattgtcaactagttttaaactactttgtgtacaaataattacctttttcataaatttgtttcaaaagatttttcattttaagagattgatcattttgaggctgggtgcagtggctcacgcttgtaatcccagcactttgggaggccacggcaggtggatcatctgaggtcaggagtttgagaccagcctggccaacatgatgaaaccctgtctctattaaaaatacaaaaattaggcatggtggcgggcacctgtagtcacggttactgcagaggctgaggcaggaaaattgcttgaacctgggaggcggaggttgcagtaagcccagattgtgccactgcactccagcctgggcaatagagcaagactgcaagactctgtctcaaaaaaaaaaaaaaaaaaaaaaaaaaaaaaaaaaaaaggagagagagattgataattttgagttatccacgctctgtccttactgttacaagttgactggttgaatgacttctttcttggcataatagccatcccaagtgtgggtttgtgggaatcctgaagtgagaaagttctgacattggctctttctgggtgccagcattattatagtcttgtaatctatagttttcactcttccttcccaatactggagcaacattcagaggcccattccccaggaaaaccctccctttcctttgcccacagttccaagatgagatgggattctccaacatggaagatgatggcccagaagaggaggagtgtgtagctgagcctcgtcctaactttaacacccctcaagctctacggtaggctagttgaagaccttgagatttggaatagaggaaaagtttatttctgaaaaggttttcagaagttgcaattgataatttttcatcccaaaccagcttctgttactgatgtaaggatgcagagccctgtcaggagttaggtgtcaagtgaagtctccttgttatggggcagtgcagctgtaggccaagctatatccgtttgggaagggagaaaaaacagtagctggcatccatatccacttctccgggtgagtggtgctggagaggtatgtaggactcaatgtggccagccacacaaactaccccatattgtaatatcctgtctgtcccttttgttctttttatgtgccattaatatctgctaaatgtgactgaaaatttgttagtcacctaggcattagtggagcaaaccctgaagcacctgcagtaaggagtctgaaacatacgtgctgacctttttgcctaaagttggcacttgtgttacagcatccagaaagtagaggctttaattttttcctcattttgtggtggatttgcatctgcactttattgtattgttatccattgcgagtagcagcatgtagtcattagatggatggctagatgtcaggatgcagtttgtgccataagtggaacaaagcaaagagaatagtccctgtaattcgtcctgggtttgaacctaacagcattactaagcagagagcttgggatccatctgaaagctagacctttagagatttttcaatttagtgaaaaaagataagatatgccaaccaatgtctaaaaactagaaataccagtaattctccattacaacaaatatcacaatacaactacatcaaaaacctcaagattgctaagtcagtatttgacccattattttaagttacagctcatacaacaaaattctgttatagcagaatggaaccattcatcctgggaacatataatgggatttgatctataaacgtgttttggttctgctgattgactctttgtaacttcttaaaatttgggaagtgtaggctgggcgcagtggctcatgcctgtaatccctgcactttgggaggcggaggcagggggatcacctcaggttaggagtcgagaccagcctggccaacatggtgaaaccccatctctactaaaaatacaaaaattagccaggcatggtggcgggtgtgtgtaatcccagctactcaggaggctgaggcaggatactcacttgaacccggaaagcggaggttgcagtgagctgagatgacagcctgcttgacagagagagactctgtctcaaaaaaataaaataaaataaaataaataaaatttgtaaagtatagaaataatttaaaactcttgttagaattcagttaccttctggtattcagtagaatacagtcatatatcatctcatggtgatacattctgtgaaatgttatcattaaacgatttcatcattgtgtagaaagcacttggataaacctagatggtttagcctactgcatacctaggctatacggtataacatattgctcccaggccacaaacctgtatagcatgttattctgctgaatattgtaggcagttgtaacacaatggtaagtacatatgtatgtaaacatagaaaaggtacagtaatcttatggagccatctctgaatatgtggttcattattgactgaaacattatgtggcacatgactgtacttgggcagctgctgcttctctttcagttgcaaatgcaaacctgttataatctttgactaaataaagcatcctggattctgtaagtccatagatagtaaaaacttcttaaaacacaataaagaagagagaggaaaaaaaagaacaaaacaaaaaccctgggaaagtgagttatctgtgcttcccttgtcagttatccaagtaatacttattaaaactaggtgcaaggccacgtgtggtgactcacacctgtaatctcagcactttgggaggctaaggcaggcagatcactttaggtcaggagttcagaccagcctggtcaacatggtgaaaccccatctctactaaaaatacaaaaattagctgggtgtggtggcacacgcctgtaatcccagctacttgggaggctgaggcaggagaaacacttgaaccctggaggcggaggttgcactgagctgagattgtgccactgtactccagcctgggcaacagagtgaaactgtctctcaaaaaataataataggccgggtgcggtggctcacgccagtaatcccagcattttgggaggccaaggcaggcggatcacaaggtcaggagtttgagaccagcctgaccaacatggtgaaaccccgtctctactaaaaataaaaaaattagccaggcatggtagcactcgcctgtaatcccagctactcaggaggctgaggcaggagaatcgcttgaacccaggacgcagaagttgcaatgagccaagatcatgccactgcactccatcctgagagagagaaaaagactccatctcaaaaaataataataataataataataataattatagatcaggcgtggtggctggcacctgtaatcccagcactttgggatgccgaagcaggcatatcacctgaggtcaggagttcgagaccagcttggccaacatggcgaaaccttgtctctactaaaaatgcaaaaaaaattagtcggacgtgttggcaggtgcctgtaatccccgctacttgggaggctgaggaaggagaattgcttgaacctgggaggcagaggttgcagtgagccgagaccactccattgcactccagcctgggcaataggaacgaaactccatctcaaaaaaaaataatagtaataataataataataataaaaaatacaactacgtgcaggctatgttttcattacctacttttttatgcttctggtcttctgttccttcagtggtagtagtgcaggtgatcaggttttcagttctcagaagattgcataagacagtcccacaggctttaggtttttaccctgtgctgcccaaacccacagtaaatactataaaagaaagaatgatttttatccccaatagataaatgataacttttaaaaattaactattgaaaacacttatttatctattgctgtaatattggagattacttgaaatatgataacctgcttgttgtaactacatcagcaggtcttatcctgattgcatagggtatcagcacgtgcttaatcacttaagtatctttttctccttttacttcagaactgtcatgctgggtttttcagtttttgcttcagccctggaaacagtctctcaggagggtaggggtgggaagttagggttaggaaccttagaagaggaatttattttatttatttatttattttattttatttttttgaaatggagtcttgctctatcgcccaggctggagtgcagtggcgcgatctcggctcactgcaacctctgcctcccgggttcaagtgattctcctgcctcagcctcccaagtagctgggattacaggcacgcatcaccacggccagctaattttcgtattttttcatagagacagggtttcgccatgttagccaggctagtctcgaaccactgacctaaagtgatccacctgccttggcctcccaaattgctggcattactggcttgagccaccacgcccgactgtttcttgaccttttaataattgtcattctgactggcaaggcttgctttcttaacaagtcaaaaatcttctagcatgaagcaggaaaaggatatactaaaataactaaagtaatgatagtttacctgaacagaactgagtggttggttcaaatattaccctactgctctccatgaaggtattttattttagccctttaaattcctcttcctggctgggtgcagtggctcacgcctgtaatcccagcaatttgggaggccaaggcaggtggatcactttaggtcagtggttcgagactagcctggctaacgtggcgaaaccctgtctctacaaaaaaatacaaaaattagctggccgtggtgatgcgtgcctgtaataccagctactctggaggctgaggcaggagaatcacttgaacccaggagacagaggttgcagtgagccgagatcatgccactgcagtccagcctgggcgacagagcaagactccatttcaataaataaataaataaataaataaattcctcttctaaggttcccaaccctaacttcccacccctaccctcctgggagactttttccagggctgaagcaaaaattcaaaaacccagcatgtcagttctgaagtaaaaggagaataagatagctaagtgattaagcatgtgctgataccctatgcagtcagggtaagatctgttggccaggcctggtggcttacgcctgattccagcactttgggaggccgaggcaggtggatcatgaggtcaagagatcgagaccatcctggccaacatgatgaaaccccgtctctactaaaaatacaaaaattagctgggtgtgatggcgtgtgtctgtagtcccagctactcaggaggctgaggcaggagaatcacttgaacctgggaggcggaggttgcagtgagccgagatcatgccactgcattccagcttggcgtcagagcgagactccgtctcaaaagaaaaaaaaatctgtttatgtagctacaacaagcaggttatctttctttcttttttctttttttttttttttttttttgagacagagtcttgctctgtcgcccaggctggagtgcagtggcgggatctcggctcactgcaagctccaccttctgggttcacgccattctcctgcctcagcctcctgagtagctgggactacaggcccccacgactgcgcccagctaattttttgtattttcagtagagacggggtttcaccatggtcttgatctcctgacctcgtgatccgcccacctctgcctcccaaagtgctgggattacaggcgtgagccaccgcgtccggccaacaagcaggttatcatatttcaaggaatccccgatattacagcagtagataaataagaaaatgtagtatcccaccagggaatactatacagccataaaaaggtatgatatcatgtccgtttcagggacatggatggaggtgaagccatcagcaagctaacgtaagaacagaaaaacaacactgcatgttctcacttataagtaggagctgaacaatgagaacacatgggcacagggtggggaacaacacacactggggcctgttgggggagcgggggaagggagaggatcaggataaactgctaatgcagctgcacttaataccaaggtgatgggttgataggtgcagcaaaccaccaaggtgcacgtttacctgtgtaacaaacctccatgtcctgcacatgtattctgaaacttaaaattaaaattttgagggctaggcatggtggcttacgcctgtaatcccagcactttgggaagccgagatgggtggatcatgaggtcaggagatggagaccgtcctggctaacacagtgaaatcccatctctactaaaaatacaaaaaattagctgggcgtggtggcacgtgcctatagtcccagctacttgggagggtgaggcaggagaattgcttgaaccctggaggcggaggttgcagtgagctgagatcgtgccactgcactccagcctgggcgacagagcgagactgtgtctcaaaaaatatttaaattttgaaaaaaaaatgcaaggcagtgcagcctgagtggatagggaaatgggacaagctgaacctgggatgggagtaacaagtaaatgagagaagaaatgagaatgatgagttcccaccagctccttggctgctttcttatccagatatttctctgttcctagcattttaattttttctttatttgtatattatttagaagaggaattttagaggaatgggatagagtgtaatatagaatcatcatatttgatgcatgctaactactttggcaaaagatttgtaaaaggctgagagtttgactgttggctaaagtgagatgggggattagtagggaatgaaaattgttcaggctctttgctcatcattggaacgaattggatgtgttgtggacctacggaaacactcaaattcagtcatctccctgttgggaataggtttgaggaaccactggccaacctgttaaatgaacaacatcggacagtgaaggagctatttgaacagctgaagatgaagaaatcttcagccaaacagctgcaggaagtagagaaggttaaaccccagagtgagaaagttcatcagactctgattctggacccagcacagaggaagagactccagcagcagatgcagcaggtaggacttttcttggtcatgttaacattggatttttttttttgagacagagtctggctctgtctcccagcctggagtgcagtggcccgatatcggctcacttcaacctctgctttctgggctcaagcatttctcctgcctcagcctcccaagtagctgggattacaggcatccaccaccacacccagctaatttttgtatttttagtagagacagggtttcaccatattggccaggctggtctcgaactcctgaccttgtgatccgcccgcctcggcctcctaaagtgctgggattacaggcgtgagccactgcgccctgctgttaatactggattataccaaggcctaactctgaggccagaaattaacagctttgtaaaagtcagagatagttaccttaccacctcctaaaaccatagtatcttcacatcattaggagctcgagaagtcatcatgttcatgccttatggctcaaggaagagagcacacaaggacactaatggtattcagaaatatagatttcaaagagtccttagtaatctattctgaaatttaacaaccttcactgtgagaagtaggtttgtttttcctttttctaacctcagtccctctggattgaggttaagcttcctctggttctgtcattttgttcaagggaacatgtctgagagatttatgccaagatcctatgttattttcatactcctttcagaaagcaaaatatatgtgataaagttgcaaacatcttggttattgtctctctgggggctgggttacggtggctcacacctgtaatcccagcactttgggaggctgaggtgggaggattgcttgagccagggagttcgagagcaacctgagcaacatagtgagaccctgtctctgcaaaaaataaaaataaattagccaggcatggtgccatgcatctgtggtcccagctactcaggaggctgaggtgggaggattgcttgagcacaggaagttgagagggcgtggagccatgattgcatcactgcacatcagcctgagtgacagagagagatcctttctccaagaagaaaaaaaaaaaagatctctctggattcctgaaatgacaatgtggtaacatgtcacttcatcattttctttccatccccagcacgttcagctcttgacccaaatccaccttcttgccacctgcaaccccaacctcaatccggaggccactaccaccaggatatttcttgtaagtttccaaatatccataactctaaagactagagtatgaaattagcttggcaggttatttctcagttattcactgatcataatctatatttattcttctctcgggtatttttgattgttttgcctgctttctgttaaggcttcctgtgtttgctgagagaacgtaagccactgattcccatgaaaggacaaggagtgtattcaattttcttaatactgtctttctgatatttttattgaatcctcctcatctttagatccaacctaacttcttaggtttttggtaccactgttcgttttatagatgttgagactgggcacggtggctatgcctgtaatcccagcactttgagaagccaaagcaggcagattatatgaccccagtagttccagactagctggggcaacatgccgaaagcccgtctctacaaaatacaaaaattaaccagatgtggtggtgcgtacctgtagtctcagctacttgggaggcagaggtggaaggatagcttgagcctaggaggtgagggttacagtgagctgagatcgcgccactgcactcaagcctgggcagcagagtgagacccagtctcaaaataaataaataaataaaataaaagtaatagtcctaattcttggctgggtgcggtgacttgtgcctgtaatctcagcactttggtaggctgaggtggctggatcacttgaggtcaggagttcgagaacagcttgaccaacatggtgaaatccagtctctacttaaaatacaaaaaatagccgggcgtggtagcgggcgcctgtaattaatcccagctactcgggaggtagatggagaagaatcgcttgagcccaggaagtggagacttcagtgagtcaagatcgcaccactacgctccagcctgggcgacagagcgaaactccgtctcgaaaaaaaaaaaaaaaatgagtcctcattcttcataatcttacttctagttcaggagctagaccatatattccttagtgtttctcactaagtctaaaagtaaaacaagaatacaatccctgaatatctgggaactcaggcataatcttaacagagtagtttattgtgaaagactttatgatgatttttacctgtttttatcctgtagtaggaaggtcagcttctcatttagattctgaaggctactggtattaattgtctggaattgtcttaaatctttcttgtgtcctgttttcccagaaagagctgggaacctttgctcaaagctccatcgcccttcaccatcagtacaaccccaagtttcagaccctgttccaaccctgtaacttgatgggagctatgcagctgattgaagacttcagcacacatgtcagcattgactgcagccctcataaaactgtcaagaagactggtaggagacagatgtgtcagctttaagtttttacttgcggtgagaggtggtgggaatcttatcccatagataactaaggatacttgcctaggaatggaggacacaggacatttgtaatttcttccttctctcttttatcctccctttgtactcattatccaagttctagaattacatgataatctctgggcctgggtaaagtgtggaggcagtggacagtataggaatatgggaggtagagatctgaggctcagtgctaagaattggactacagcaatatgaggggtaagtattaggagtcagatcgagataaactggggcctggtaaagatgaaagtcaggtggtaaagtttggtcatgtttagctttttactgtcttcattaagatcaactaaggccaggcgcggtggctcacgcctgtaatcccagtactttgggaggccgaggcacggggaacacaatgtcaggagatggagaccatcctggcgaacacagtgaaaccccgtctctactaaaaatacagaaattagccaggcatgggggcacgcgcctgtagtcccagctactcgggaggctgaggcaggagaatcgcttgaacccaggaggcagagtttgcagtgagccaagatagcatcattgcactccagcctgggcgacagagcgagactcagtctcaaaaaaaaaaaaaaaaaaatcaactaactttatttaccatactgactgcagcataagtgatatctccattctgaatgaaatattgacttgcaagttaggcataagttagagattatacatttgccatgttcagtattttaaagaaatttgcaagtttagattctaccttgcattagtttagtattttttagaaaatacttgctatttacttaagccaaatatttgcttctgatttgtttcttgatttagcaaattagttgtggtttgttctggatttgggtttgtctttggattctattttaaatccctgagtcttatcgttaagttgaaaatagttgtatttaagtgtattatatcatagacacggatcccaaactgctttaacagctatattaaatgatatgaaatggtaatgaaaacttgatttaacaccaaattataataatatcttacacatctgttgacctgttgctttcttctggggatataaaaataacacttatggaaggagaaatatggatatagtagttttgtctctagaaatgcagaggtgcctgaaagtgagaggctgagagagggagagagaaatgaatgagactgaattgtctccttccttttatggttcttttgttcccagcctcaggaggaatctgggagaacttaagtaagaatcaaataaaagtaaaatttggaataccagatttgtgagggagattaaagaagttggaatcttattctggaagaaagaaagcattgttgaaggtctcttatccttcaagtatttaaggggggaaggaggtaaaacatttttgagcatacgctattgttagcaccttattttactaggtgctttttaagtgtttgttttacttagtgaataaagtgttccacataagaaagaatgagtcaacttttattgccattgaatgggactccctttagatataatgttagcttaagaaagactggaaacttttggggggatggtgggcagatgggagggaatcaagttaggtaaggatagctcctacctaaatgcaaaaatgcattcacaggcttttatgaagccctcttttgtcctagaagttgatttatccgagatttattttcttatagcgaatgaatttccctgtttgccaaagcaagtggcttggattctggccacaagcaaggttttcatgtatccagagttacttccagtgtgttccctgaaggcaaagaatccccaggataagatcgtcttcaccaaggctgaggacaagtaagtgtttactctgggggatcaaaacagcagaacatcccaaggagaagatgtagttcctttgaggagtttaggggaagtaagacttgtataataagacacggacacaaaagacaaaaggaaaagcaatatagatgagcagagccctctaggacgtgcttgttctagcagtgccaaatactgctttttgggagatgtcacacacatttttaaagcattttagaccggacatggtggctcacacctgtaatcccagcactttgaaaggccaaggcaggaggttcgcttttattttattttatgttatttatttatttatttagaggcagaatcttactgtgtcacccaggcagtcacagctcactgcagccttgaactcctgacatcaagcgatccttgcacctcagcctccacggagcagctgagaccacaggcgtgtgccaccatacatggctaaatttttttttttttttttgtagagatgagggtctctctgtgttatccaggcatctctcaaactcctggactcaaggcatcctcccaccttggcctcccaaagtgctgggattacaggcatgagccaccacacccaccagattatgaacatttttatggccctttgtgtgtattgccacactgttatcagcacatatgtgtatatgtaaccacgatcatatatgttgttagagggtagtattggtgccggtttaagttgtctgacagggtacctattcattttgtattagttttattagaattattctccttcctttctattctctttgaacttcctttgtattgttagtatacagctcgtcatgatacagctcatcatgatctcacgtttattaatgatttatgcctagtttcttatgttcccacataattgtgaagtatttgattttttttttttaaacagagtttcacttttgtcacccaggctggagtgcaatggtgcgatctcggctcactgcaaccttcgcccccggtttcaagtgattctcctgaccaagtagctggcattacaggcacctaccactacacctggctattttttgtatttttagtagagacgaggtttcaccatgttggccaggctggtctcgaactcctgactcaggtgatctgcctgcttcggcatcccaaaatgctgggattacaggcgtgagccattgcgcctggccttattcttattcataatacttaatcagtactcactaagtatctgaaattttctgttgagtagtcaccaacttgtacaagaattagatttacaaaaagtagattgaccaggcatggtgggcttacaactgtaataccagcactttgagaggctgaggcaggaggatcgcttgaggccaggagtttaagattagcccaggcaacatagtgagaactggtctctacaaataatggaagaaaaaaattagcccggcatggtggtgaacgtctgtggtcacagatacttgggaggatgaagtacgggaatcgcttgagcccaggcattcaaggctgcagtgcgctgtaatcatgccacccgctctccaacccgggcaacagagcaagaccctgtctgaaaaaaaatgaaaaggtagattgggccacacaccatggctcatgcctgtaatcccagcactttgggaggctgagactggagaattgcttcagcctaggaagtagaggttgcagtgagctgcgatggtgccactgcactccagcctgggtgacagcgtgagaccttgtctcaagaaaaaaatgaaagagtagattgtaaaatgtgttagtctggggagaccctttagaaggaaggactgtgaagtgagatttagtgttattctcctttctcagtttgttagctttaggactgaagcattttgaaggaactgagtttcctaatcctctaatcagcaagtaccttctaacctgcaaaactgcccaccaactgacagtgagaatcaagaacctcaacatgaacagagctcctgacaacatcattaaagtgagtgtttcctgcatgcgccatccgggcacctcaccaatatgtacccattcttttatcttgttattctcaaagaaaagaggaaccttcttttatctaaagctaatttctcccactttacactagattaattcccctattgccttttgggcaatattccgctggcagtattccacttatttgctttttgttgttgttgttgttagacagactcttgctctgtcactcaggcttgagtagagtggcgcaatcttggctcactgcagtctttacctcccaggttcaagcgattctcctgcctcggtgtctcctgcctcagcgtcccaagtagcttggattacaggcatgcaccaccacacctggctaatttttgtattttcagtagagatgaggtttcaccatgttggccaggctggtcttgaacctctgacctcaagtgatccacccgccttggcctcccaaggtgctgggattacaggcatgagccaccgcacctggtttcttcttttttatttagatatttatgttgtgtttttagagacgggttcttgctctatcatcctgtttggagtgcattggctcagtcataggtcactgtagcctcaaactcctgggttcaagtgatccttccactttagccttccaagtatcctggactacaggcgtgttccaccaaggctagctcattattttattttgtgtggagatgctgtgtcactttgttgcccagactggtcttgaagttttgacatgtgtcagtccgcctgcctcagcttggcctcccaaagtgttgggattacaggcgtgagccactatgcccagccttttgttttgttttgtttttgtttttttcttgagaaagggtcttactctgctacccaggctggagtacagtggtacagtcatagctcactgtaagctccagctactgggctcaagcattcctcccacctcagcctcccaaggagctggggattatatgcatgagccaccatgcttgcctattaatttttttttttttttttttttttttttttttttttaagaaatggagtgtccctatattgcccaggctggtctcgaatttttggccttaggcattctcctgtctcagcctctaattgctacttcctggtatattggatttaggccttatttattaaccattaaccataagccaaggaagctgaggatttacctgtctcctcactcccttactcccaccacaaacatgcacattttctgctctccaatctcctcgctagtaattatgtcacaattttggttaggttgtattcagggtttacactataagattttaaggactgtataaatactcttcacagctatgttattgtgataccttgcctttcctgctgaacattttgtttttcttggagtaaataatcgcatttttagggggatggggctggacttgattttattatgtaattattcccaggtcaacagtaaaggttacttaaattttcttaatctcctttcagcgtgtctggccttctagatattccgtcactttcatcttgaaggaattgctccttgagccctctgacactattccactctaagcgtgttgctctctgggcttgctgcactgatgttttgggctttttcctccccatcatcctgggaattctttttgcctcttactgtgttggatcttcttatttcctgaattctacatctgtgtttttgttttacttccttcctttagtgaaacacattctagtagcattttttattttaatttttttctaaatttttaaaaattgaggccgtacacggtggctcaggcctgtaatcccaggtctttgggaggctgaggcaggcagatgacctgaggccaggagttcaagaccagcctgggcaatatggtgaaaccccgtctctactaaaaatacaaaaattgaccaggtatggtgccactcacctgtaatcccagccactcgggaggctgaggcacaaaactcacttgaactagggagacagaggttcagtaagcgtggatcactcccctgcactccagcctgggcgacagaggagtctctgtctcaaagatcaagaagcagagaaacaaacaaaaagtacaaagatgtgcacagaaaatgacacacaactcaaacgtgaaggaaaaagatttttctgcagcagaatacggtttatcaagtgccttagcaccacggatgaaactagacaaattctaagccatattatcatgaattttcaaaacattggagccaaaggaaaaatcttacatgctatcagaggttgggagaaacaggtgttacatgaatattcaagagttaaatggggccgtggctcacgcctataatcccagcactttgggaggccaaggtgggagaattacttgagcccaggagttcaagaccagcctgggcaaaaaagtgagacctgtctcaatttttttttttttttttgagatggagtcttgctgtgtcatccaggctggagtgcagtggtgtgatctcggctcactgcaagctccgcctcccaggttcatgccattctcctgcctgagcctcctgagtagctgggactacaggcaccagccaccacgcctggctaattttttgtattttttagtagagacggggtttcaccatgttagccaggatggtctcaatctcctgacctcgtgatctgcccacctcaacctcccaaagtgctgggattacaaggtgagccactgcgcctggcctattctttttttttttttttgagacggagtctcactgtgtcacccaggctggagtgcagtggcactgtctctgatctcagctcacctcaacctccacctcccaggttcaagcaattctcctgcctcagcccgctgagtagctgggattacaggtgcgtgccaccatgcctggctaatttttgtatttttgtaggaataggggttttgccatgttggccagtctggtcttgaactcctgaccttaggtaatctgcccacctccgaaagtgctgggattataggcatgaaccaccacgcccaaccttcatttactcttaaaattgaactttctcaggctctttttttccccccttctcttctaatgcctttcacaccaccatttgcttaaaaggaagctttcatgtgtccaaggtatagattacgatgttgtctttgcagctgttgatcaagaacaaatcttacataagattgctctgagcatctgcttccttttctctctgtgacctaaactctccccttcctggcaaccagaatggagatcatcagttagaaaatattgaataattgtgaaatatttaaatagagattagtttaatttgaaatgtacaagtattcagcatatgctatttatatatgtgcgttcatggatgtttgtgtatgtggtcttgtgtgtgtgtgtgtgtgtgtgtgtgtgtttctcttgatccaccaccaccccattcaccagcctgacaggggacagtgtttccagaaggaatgtaattcatgcgcatttttttcatgttaagttttataagaagaccaaacagctgccagtcctaggaaaatgctgtgaagagatccagccacatcagtggaagccacctatagagagagaagaacaccggctcccattctggttaaaggtacagccctcttcctcgaagtctgtaggaggcagaaggtcactgaaagttctgagagaatatcaagggcttccttaatcgtctaatgctttagttgtagaactaggactttagaaatcttcctgattcacctttcttcccttacttttctgcccttctctgggtgattctacagcattttcaaaataataggtaaaataataatttgctaaaggaaattcacagaagtttctaaagtgtataattagaatgtggtctttgtagatttgatatgcagagagacccttcttggaaagatgccttgagactgtctaaggtctctaaaacctagaaagccctattgtttttcccaaattctttttttgttgttgttttgttttgtttttgagacagagtcttgctctgtccacccaggctaaggtgcgatctcggcttctcgcaacctctgcctcccaggttcaagtgattctcctgcctccgcctcctgagtagctgggattacaggcacatgccaccacacccaactaatttttgtatttttagtagagacggggtttcaccgtgttggtcaggctcatcctgaactcctgacctcaagtgatctgcccacttcagcctcccaaagtgctgggattacaggcgtgagccactgtgccaagcctctttttcccaaattctgacatatgctggatcagagtgttcttgtttccaataggccagtctgccatccatccaggaagaactgcggcacatggctgatggtgctagagaggtaggaaatatgactggaaccactgagatcaactcagatcgaagcctagaaaaagacaatttggagttggggagtgaatctcggtacccactgctattgcctaagggtgtagtcctgaaactgaagccagttgccacccgtttccccaggaaggcttggagacagaagcgttcatcagtcctgaagcccctccttatccaacccagcccctctctccagcccagcttcaaccctgggaaaacaccagcccgatcaactcattcagaagcccctccgagcaaaatggtgctccggattcctcacccaatacagccagccactgttttacagacagttccaggtgtccctccactgggggtcagtggaggtgagagttttgagtctcctgcagcactgcctgctgtgccccctgaggccaggacaagcttccctctgtctgagtcccagactttgctctcttctgcccctgtgcccaaggtaatgctgccctcccttgccccttctaagtttcgaaagccatatgtgagacggagaccctcaaagagaagaggagtcaaggcctctccctgtatgaaacctgcccctgttatccaccaccctgcatctgttatcttcactgttcctgctaccactgtgaagattgtgagccttggcggtggctgtaacatgatccagcctgtcaatgcggctgtggcccagagtccccagactattcccatcactaccctcttggttaaccctacttccttcccctgtccattgaaccagtcccttgtggcctcctctgtctcacccttaattgtttctggcaattctgtgaatcttcctataccatccacccctgaagataaggcccacgtgaatgtggacattgcttgtgctgtggctgatggggaaaatgcctttcagggcctagaacccaaattagagccccaggaactatctcctctctctgctactgttttcccgaaagtggaacatagcccagggcctccactagcagatgcagagtgccaagaaggattgtcagagaatagtgcctgtcgctggaccgttgtgaaaacagaggaggggaggcaagctctggagccgctccctcagggcatccaggagtctctaaacaaccctacccctggggatttagaggaaattgtcaagatggaacctgaagaagctagagaggaaatcagtggatcccctgagcgtgatatttgtgatgacatcaaagtggaacatgctgtggaattggacactggtgccccaagcgaggagttgagcagtgctggagaagtaacgaaacagacagtcttacagaaggaagaggagaggagtcagccaactaaaaccccttcatcttctcaagagccccctgatgaaggaacctcagggacagatgtgaacaaaggatcatcaaagaatgctttgtcctcaatggatcctgaagtgaggcttagtagccccccagggaagccagaagattcatccagtgttgatggtcagtcagtggggactccagttgggccagaaactggaggagagaagaatgggccagaagaagaggaagaagaggactttgatgacctcacccaagatgaggaagatgaaatgtcatcagcttctgaggaatctgtgctttctgtcccagaactccaggtgagagctggagaatattctcaagtatttcgtggactcagtaatatgtatcacttattgatatgccacctgcttgcttgctgcactatggatagtcctaaaatcatttgtatttgatttgtgaatgcattatgggacatgattgtggagttgaggtgaaatgagatggaaaggatgaaattttacttattatattaaactcgtttacacattaaattgaatcacctgaccatactttaaatgccttaaaaaatagtaataggctgggcttggtggctcactcctgtagtcccagcactttgggaggctgaggtgggtggatcacaaggccaggagtttcagactggcctggccgacgtggtaaaaccccatctatattaaaaataacaaaaattagccaggcatggtggcggacacctgtaatccctgctgcttgggaggcagaggcaggagaattgcttgagcccgagagacagaggttgcagtgagccgagatcacgtcattgctctccagcctgggcaacagagcaaggctctgtctcaaaaaaaaaaaaaaaaaaaaaaaaaaaaaaatagtaaataactgggcacggtggctcacgcctataaatcccagcactttgggaggccaaggcgggcagatcacctgaggtcgggagttcaaaaccagcctgaccaacatgaagaaactccatccctactaaaaatacaaaattagctgggcgtagtggcacatgcctgtaatcccagctactcaggaagttgaggcaggagaattgcttgaaccggggaggcagaggttgcggtgagccacgattgcaccatctcactccagcctgaaaactatcttcaggttacagaagtttgtaaaagggaacttcttcccctctcctgctgtcaggccgaatgtcagctatcactgggatttcttttttttgtcttgttttgtgtgtggttttttctgtgttttttttttgtttgtttttgtttttgttttgagatggagtcttactctgtctcccggattggagtgcagtggcataatttcagctcactgcaacctccacctcccgggttcaagcaattctcatgcctcaacctcccaagtagctgggattacaggcatgtaccaccatgcctgactaatttctgtatttttagtagagacgtggtttcatcatgttggcgaggctggtcctgaactcctggcctcaagtgatccacccacctcggcctcccaaagtgtcaggattacaggcgtgagccactgtacctggcccattgctgggatttcataactcaaggaattcccctcaggacagctgtagtgggctccccattgtttaacttcagattatcctgatatagctttgtgttgtttgcaattcatgagccactaagagccattataagtactctttggagggttttacaggaaacaatggagaaactgacttggctggcatctgaaaggcgcatgagtcaggagggtgagtctgaagaagagaattctcaggaggagaactctgagccagaagaagaggaggaagaagaagcagaaggaatggaaagcctgcagaaagaggatgaaatgacggatgaagcagttggagactctgctgagaagcctcctacttttgcttcacctgagactgctccagaagtggagaccagcagaactccaccaggtgagctaggcaaacctatactgaaggaccattctcacttaacctcattgtctagaggacagtgtgcagggtgggtagcttataaaccaggtggaggatttccagaggaaaccctctggatctcttctgcaacacccctcccccaaaacatgtttaatgtggtatctttgtggagaacagatactcagaaatttttaattcaattctcatccgttgctagatttatattagcttcgttcactttctttcttttttttatttttttattttttttttgagacggagtcttgctctgtcgcccaggctggagtgcagtggtgcgatcttggctcactgcaacctctgcctcccaggttcaagcgattctcctgcctcaccctcctgagtagctgggattacaggcatctgcccccacacccagctaatttttgtatttttagtagagatggggttttaccatgttggtcaggctggtatcgaactcctaaccttatgatccacccgcctcggcctcccagagtgctgggattacaggcgtgagccactgtgcctggcagttcactttgttaaactgattgttaccttatctgtcatgtgtggggctaagacccatgtttatttcagaaaacactgcttgttcctcatcaagacatagtctctcaaaagcactacagaagccacacttgctctttagacttcctttctcaatatgaagtagctgattatcttgttgtcatcccaattaaggcagttacactgcagactctgcgtagaactgacttgacggacttagttctcataccattttcccaaaaaccttttccttgaattgctccataatattgaataggatttggctggggtggtgcatgtggtggaatgggaagaacacaggttgcagggacagggaaacaatccttttcatgtgtgctacaaggagagagcatcaaagctgctggaaaaggccggaacaatcatcgagctcgcaacaagcggggaagtcgggctcgggccagcaaggacacctccaagctgctgttgctgtatgatgaggacattctcgagcgagatccactcagggagcagaaggacttggcctttgcccaagcttatctgaccagggtaggcaaatgctgcttcctgttattgccagtctctatgaatgtggctgcttcttcaagggagatgtttttcaacataaagtctgtttttcaggctatgcaacaggcttcatattcctctatcttggcttttctggcaaaagatctctgtgacagaaccacaaggagacatagaattcaatcataagtatgtttattgttagtaccctgccatcatccttctgttgaccagagattggcagaaagatgataccaccatcatcagtgggaggttgtgactttactgggtgcgctgataaggacctttatagaacctttggcttgagaagaaagatagtgggtacactggccagcaagtggatttcaggaaaatacattgctcttaagacatgaaccagctgggcgtggtggctgacacctataatcccagcactttgggaggccgaggtgggtggatcacctgaggtcaggagttagagaccagcctgaccaacatggtgaaaccctgtctctactaaaatacaaaaattagccgggtgtggtggtgggcgcctgtaatcctagctacgggggaggctgaggcacaagaatcacttgaacctgggagacggagtttgcagtgagccgagatcgcaccactgcactccagccttggtgacagggcgacactctgtctcaaaaaaaaaaaaaaaatgaaccaggctgggcgctgtggcccttgcatataatgccagcactttgggaggctggggtaggaggatccttgagtccaggagttcaagacaagacaagcctgggcaacacaggagacctccatctctacaaaaataaaaaaaaaatagtgagctaagcatggtggtgcatgcctgtggtcctaggtactttgggagtctgaggtgggaggatcacttgggcccaggtggttgagactgcagtgagccatgattgcatcagtgcactccatcctgggcaacagaatgagaccctgtctcaaaaaaaaaaaaaaaaaaaaaaaccacacataagctaaccacttcttggtagtgtcctggagaactgtgtccttctcttggtaaccacctgattcctttatccccctggaaagcagaatactggcaatgatagtcatagctttttcttatctcctaatgttttactgacattcctaacttatgtattatttactctcaaattacgcccatgctgaaatacatgtacaaacacatgttacctatttcattatggggctgtaatcagtaaggaaaggttagggctgtgacctagagaaaagcattgcttggttttgtgggtagaactgtggaacgtggaagatgatttttcacttgctcactcccagaaaaagatctttaccttgcctattgctctgtgtcttccattaacagtcagatgttaagatctgttggaggcacagcctctgatggataattcttggagctctctaaccataaccctgccttctcccttgtacccttattgcttgttgtggcccaaataaagggtgttgatgattgaaagtcttcccgtgtaggtgcgagaagccctacaacatatccctggcaagtatgaagacttccttcaagtcatctatgaatttgagtcaagtacccagagacggacggctgtagatctctacaaaagcctgcaaattctgctccaagactggcctcagctgttgaaagactttgctgctttcctgttacctgagcaagctctggcctgtggattagtaagtgaatggggaaaaaaagtacactgggactcctgggtcagagtgagactgggattgaatggggttgaataagactctttcagtctcccagctccttccagacacacagccatcccctagcccagagtgataaaagcctctgtcttttcagggtattatctttccaatcccattctcccattttctttacatgataaatgagagggttttacctatagttgccaaaggacaccttaggtgagtcatatgctctctgcttctcactggtatcaagccagacattcatttaacaaatatttgttaggtgcctcctaactgtcaggaattcctagcaattcctgacctcaattgctaggaatatagtaattacaaaagactaaaattcctgccctcgtggagcttacgttatcatgaggaaattcagatgatactccagaaaacatatatatatatatatcatatatatatatatataatatataaaatataaattataaaaataaatataaacagcaaaatatatagtatacaatgttttatagtgatcatgttttacagaaaaataaagcaggaaaggaaactagaggggtggttttatacacagcggtctgggaaggccactgtggtatggtaacgtgaaatgttgcagaataggaggctaaacatgagggatatcccagtagtcctggacttatcgtcataaaaataggaacaaagggaggaacgggattattctaagagttttattggggttaaatgacagtggggtagttctgcatataatgtgtgatgcccattttctcttctggtattatgaggttccaatcagtgtatacgtgaacaaaaaaaaaaatttttttttttttgagatggagtttcactcttgttgcccaggctggagtgcagtggcgtgatctcggctcactgcaacctccgcctcctgggttcaagcgattttcctgcctcagcctcccgagtagccgggattacaggcatgcgccaccaccacgcctggctaattttgtatttttagtaaagacggggtttctccatgttggtcaggctggtctcgaactccagacctcaggtgatctgcccacctcgacctcccaaattgctgggattacaggtgtgagccaccacacttggccaaaaaatttttttaaagagataatgtcagccaggtatggtggctcacacctgttatcccagcactttgggaggccagcctggacaacatagcaagaccccatctttacataaaataaaaaaattaactaactgggtgtggtggtgcacacctttggtcccagctatttgggtggctgaggtgggaggaccacttgagcctgagaggttgaggcttcactcagccatgattgctccactacactccagtttgggtgacaagagcaagaccttgtctcaaaaacaaaaaagagagagacaatggccagacacagtggctggcatctgtaatcccagcactttgggaggctaaggtgggaggatcccttgtagccaggagttttgttgttgttgttttattgttgttgttttttgaggcaaagtctgactctgtcacccaggctggagtgcagtggtgtgatctctgcttactgcaacctctgcctcccaggttcaagtgattctcctgcctcagccttccgggtagcagggattacaggcatgcatgaccgcacctatctaatttatgtatttttagtagagatggggtttcaccatgttggtcaggctggtctcgaactcttgacctcaggtgatttgcctacctcggcttcccgaagtgctgggattacaggcatcagccaccacagctggcctgtagacaggagtttgagatgagcctggacaacacaggcccctgggatcctcctgcctcagcctcccaagtagctcaagctacaggtgtacaccacggcccctgcctaatttttaaatttttttgtagagacatagtctcagtatgttgctgttcttgaactcctggccttaagcgatcctcctgccttggcctcccaacatgggattacagctatgagccaccttgtgcagcctgaaagttctttgtaatataaactctaaagtatcatatgaattttggtggctgatttcacaatccttaaaacagcaaacaacttgaaatatatacatctcttgaagctgttgctcacatcttaattgctttgggtggctacccaccagtggcccaaggtggatggaggttagggttttaaattagatctcaatagttgtaaactagaattttaaaccagggttctgtcatctcttgtgtcctagtccactagttcttatccttagaaccctcaagtcctgctctagctgtatcatgactcctcttttgcccactttccactctggtagtttgaggagcagcaggcttttgagaagagccgcaagttccttcggcagctggagatttgctttgcagagaacccctcacaccaccagaagattatcaaggtcctccaaggctgtgcagactgccttccccaggagatcaccgaggtattctttcctgtcctgctttcttcctgttgtcttccgggccttaggcctttcccttgtctctttccccaacctactccatacctttttgcctctggaggctcatgggcttcctggaggagatgaaaaaggcaaggacttttcaggctcacccaaagcataaagcactgggatagggagggattgctacctgaaaccggagcctgtctgatcttcacaggctcaggaatgccatggatgtgctggaagggatgttcagcgaaggaggttctgggacctgggaggggccttacctccttgctctgcttggaatagtgccctagctggagatcagtagggtggagtggagagtggaatcattaggaatcaaatccagtattagtacccttcccctataggcagctaaggaggaagagaaagttttagtattctttgttaccaggcagagtctctgtgtgtttcccagttgactgggaaagcagaacatggaagtatgtgggattgattgggaagggcagcctagagaggctctggagacttcctctttccctctgtgactctcctcagctcaagacacagatgtggcagctcctcaagggccacgaccacctgcaggatgagttttctatcttctttgaccacttgcgcccagcagctagccggatgggtgactttgaagagatcaattggactgaggaaaaggagtatgaggtataggacctaaggctgctgtagccttatgaagggggaaggccacacgtgggagggatattggcctggtgtctgtgctcagcagcaccaactccttctcagtttgatggctttgaagaagtggccctgcctgatgtggaagaagaggaggagcctcccaagatacccacagcctcaaagaacaagaggaaaaaagagatcggggtccaaaatcatgataaggtattttctttgtttatttgtttgtttttgagacagaatctcgctctgtcacccaaactagagtgcagtggcgtaatcttggctcactgcaacctccacctcccagattcaagcgattctcccacctcagcctctcaagtagctggaattacagacaggcgccagccaccacgcccagcaaatttttgtatttttagtagagatggattttcactatgttggccaggctggtctcgaactccttacctcaagtgatccacccgcctcggcctcccaaagtgctgggattacaagtgtgagccactacgcctggcctaaaatcatgataaggtatgccaagttattgaaaattatctatgtttcatgaatcaagccttgcgttttctcactgaacatttctgtggcttactatggcccaaggtttctagttcaaaggctctaggatctgagacgatcacggagaacaaaccaaaggtcaggctgatacagacatgcagagcctttgggaaaactgcagttgttgcaggggccccaggattccctagttagaaggatttgtttcttccccttttctgtctagctcagagttattacccttaattcaacttttttcatttttgctcatgtgagaaaatagagccaattgaggatgagcttgttattaaaaaaataaaatagaaccaagattccccatattaataataatgatagcagctaatacttagttgtattacaaagtgtcaggcattctgggaagtattttaatggattattgacacatttaattctcacagtaatcctatggagagattgctcttgtttgcattttacagaagacataactgaagtgcagagaggctgttgtcagggtctcatatttagtaagtggtggtgctaggatatgaactcctcaggtaagccatctgtggagtctactggttgtcactgctcttcaagcagtattttttttttttttttttaattcgtgtttcctgaccaagcgttttttctcttttctggggagaaactgcttcttagtagctgtatgaccttgggaaacgtatttaacctctctttgtttcagtttcttcatcataaattgggatgataatggtacttacttacgtcttgggtttattaaacagtgtcactgagtaggctttccatgggtacaaagttctctctgaaggggattggaagagatgggagagctgaagtcacagagagacagaaacaaagacattatatctcatgatggagctctccagtgattttgcctcagattatgtctgacttaaatatttcttgaaacatctggggcaattgggatatgtcagtctttaggtcatttagggattgtttcagggattcataataggccttaatctagtttgggctattgatttccccaggcgatgtgaggagttgatacataaaagaggatggggtccgggcgtggtggctcatgcctgtaatcccagcattttgggaggtcgaggtgggtggatcacttgaggacaggagttcaagaccagccagagtaacattgcgaattcctatctctactaaaaatacaaaaattagccataggctaggtgctgtggcttacacctctaatgccagcactttgcaaggccaaggcgggcggattacttcaggtcaggagttcgaaaccagcctggtcaacatggcgaaatcccatctcactgaaaatacaaaaaaaattaggcttagtggcatgcgcctgtaatcccagctacttgggaggctgagacatgggaatcgcttgatcccggggagtggaagttgcgctaagctgagatcacgccactgcactccagcctgggagaaagagcgagactccatctcaaaaaaaaaaaaaaaaaaaaattagctaggcgtggtggtgcgcagtcccagctacttgggaggctgaggtgggaaaatcacttgagcccaggaggcagaggttgcagtgagccatgaatgtgacactgcactctagcctgggtgacagagccagaccttatctcaaaaaaaaaaaaaaaaaaaaagcatggggagagggtgggctgtgttgtgttcatatggctcacaactttagcttcctctcttggtaccaaaaatacggccaggcacagtggctcatgcctgtaatcctagcactttgggacgctgagggagggcagatcaagaggtcaggagttcgagaccagcctgaccaacatggtgaaaccctgtctctactaaaaatacaaaaattagctgggtgtggtggcgcatacctgtaatcccagttactcaggagcctgaggcaggagaatcccttgaacctgggaggcagaggttgcggtgagctgacatcgtgccactgcaacccagcctgggccacagagcgagactctgtctcaaaaaaaaaaaaaaaaaaaaaaacaacttggcagctaatcaagcccaagtatctcctaggagactgaatggccagatggggccaaggactgtgcctgctcctgccatgaaggaggtccagattccaagctgaagaagagcaaaaggcggagctgtagccactgtagcagcaaggtgaggaaagtatcaagggtcccgagggtatcagagctgctgggggattgtttgctaccaagaattgtaccttactgaattcctaaaaaggcacatatataaataacattcagtatacacatatgtgtacatatgcaaaataaatggaatctgctagaaatacgtgatagattttgttttttaaagagaattctgtgagtaaagcttttggaattggaaaaacaaaataccagttaaaatatttccctcagatattagaaaatgaaataaacctctgtcgtgaaaatagtctctacaagtaatcctggttctctagaatggagttggttggcaggaaaaacacagttcttggtgagagaaggagttgtggaatccaatactctattcggggccatttaaaatccttggagcagggaggcagaggttgcagtgagccatgatgataccactgagctccagcctgggtgacagagtgagaccgtgtttaaaaaaaaaaaaaatcaaatccttggaggaatagctgggcaacagggcactcaggaggctcaggtgggaggatcacttgagcccaggagtctgaggctatagtgtaccaccatggtcatgcctgtgtaaacagccactgcactccagcctgggcaagataatctgtgtcatctgagaccctgtctctgtctatcttttctttttgtttgtcatttgagacagagtctcactatgttacccaggctgatcttgaacccttaggctcaagtgatgctcacaccttagcctcccaagtaactaggtttataggcatgtaccactgcacccagttgaaactctgtcaacaaaattgttggagcagacatgcatgtgggttgacttgatgagcatcaggcagggcttcttcctttggtgggccccaaccaaagacataggcagtcagaacacctttgacccggaagaccatccctgcaggtctgtgacagcaaatcctacaagagcaaggagccccatgagttggtgggcagcagcccccaccgagaggctagtcctatgcctggtgctaaggaagctgggcagggcaaggatatgatggaagaggaagccccagaggagcgggagagcactgaggccacccagagcaggactgtcaggaccaccagaaagggagagatgcctgtttcaggtgagtgatttgccaacgcagcccttctgttcctcagtctcgttatcctgtactccagacaggaacctccatgagcctggataaatagccttttcagggatggatataccacctctttcactgatggacccataggaagcccttctgctgttcaggctttttctatcatatggcctcactcctcttgcagaattaagaatgccacaaatttcatgcaattcaacattgtcttgtgttttattccaaaaacccttccccctgtctccaaatctagtgtaatctacatcctaaagactgggccgttctcagctttggcagtaggactttatatctttgcataagtgacattatgccccccacctccacccaactcttttattatttatattttcttgtagagatggagtctcaccatattgcccaggctagtctcaaacccctggcagtcccaccactttggcttcccaaagtgcggacattataggtgtgagccaccatgcccagccctcttttttattagaatttttgcacagtacctggccacaggtaatttctcgtgcttaggtgcatcttgaacctgacagtaccctgagatccttattttcctcctaagcaggattggcagtggggagcactttgccatcccctcgagaagtgactgttacagaacggctcctcctggatggcccaccacctcattcaccagagactcctcaatttccccccacaactggagctgtactgtacactgttaagagaaaccaggttgggcctgaggttcgctcctgccccaaggcatcccccagacttcagaaagagagggagggccaaaaggcagtgagtgagtcagaggctttgatgctggtctgggatgcatcagaaactgagaaattgcctggtaccgtggaaccccctgcttccttcctgagtcctgtttcctcaaagaccagagatgcagggagaagacatgtgtccgggaaaccagacactcaagagagatggctgccctcaagcagagctcgggtgaagacaagagacaggacgtgccctgtccatgaatctccatcaggaattgacacctcagagacttctcccaaagcccctagagggggtttggctaaagacagtggaacacaggccaagggtccagagggggagcagcagccaaaggccgcagaagctacggtgtgtgccaacaacagcaaggtcagctccactggggaaaaggttgtcctgtggacaaggtaggtaagggtggatgacgtgtgtttggaaaagagcatagaccacatccatgtggctccctagggttaatcatgatacctgggttacagggaagctgaccgtgtgatcctcaccatgtgccaggagcaaggggcacagccacagaccttcaacatcatctcccagcagctgggaaataagacccctgctgaggtaggtgcgggttggggtgaagacctggcaaaaagaggtcaaggtggccaactaacagacagaaaggccaaagaaggagttttgatatccaagataataagtggtttttgtaaaggtttgatctaaggaaaggcttgactcatcagggtggtagtggttctagaagagaaaggacactagattttgaggatttttaaatttttatttatttatgtattttagacgcagtttcacttgtcgcctaggctggagtgcagtggcacaatctcagctcactacaacctccacctcccaggttcaagtgattgtcctgcctcagcctctcccaaagtagctgggattacaggcacccaccaccatgccaggctaatttatttatttttagtagacacggggtttcaccatgttggcaaggctagtcttgaactcctgacctcaggttatccacctgcctcagcctcccaaagtgctgggaataggtgagatactgcgcccggccaggattttaaagtggaagccccagtttccattccagttttgtttttaggagttgtgtgactttgggcaaaacatttagcctcttgagtttccttatctataatgacatagctctcccaaccttgctgtgaggaataaacaagagatttttcaaatcagtatattgtgcttcataaatgttaacattgttacaaagcatcagtgaggctgggcgcagtggttcattcctgtaatcccaacactttgggaggccgaggtgggtggatcacctgaggtcaggaatttgagaccagcctggccaacatggtgaaaccccatctctactaaaaatataaaaactagtcaggtgtggtggtgggcacctgtaatcccagctactctgaaggctgaggcaggagaattgcttgaacccaggagacggaggttgcagtaagctgacacagtgccactgcactccagtctcagcaacagagagagactccgtctcaaaaacaaaaaaaaaagaccagtgaatacagccctcctcctttcttaggtttcccaccgttttcgagaactcatgcagctcttccacactgcctgtgaagccagctctgaggatgaggatgatgcaaccagtaccagcaatgcagaccagctgtctgaccatggggaccttctgtctgaagaggagctggatgaatgagactctgggaatcatctacacaggaccaaacccaacaggcgccctggcaccggggagggggtagttgtactctgcttgtacagtccttgagcccagtttacagatctggagagcaggaggccaggacaaggacaaaggctggaggatggagtaggacccaggggctctgccatcctaggcatcattcaaggtcttttatgaagactttacagatgtcctctgtaaatagcatcgagagtggagttcagctcc

SEQ ID NO: 15594 - DNA, 92778 bp, Homo sapiens
gacttccggtggtgccaaagccgtttccgtggaatcaggccggctggtgagggtacaggtttgtgtgtggtggggtgggaagaggcaggtgggagctgggacacctggacgaacgatgtccaggttgagaaggtcgggtctgagggtgggcgctgggtgcgtggcggaagttaagggcgtgaagtccagtgtctagttgggaatggggactggagccagccctgggcaccgaggtggaagcgcggttaggaccccttttgaaaatgttttcctaggagagggccgtgccggggctgcctccacattggcattcattcaccctgctggtccgacttgggttcccaaaaaagtggattctgtcgagctactgctgtgtttgaggtgcctggagctgaagtagctgtctttctttccttctttttctttctttctttttctttttttcccctttttttgatctcagtaattatctgtgaaataaaagagctgccctggctactcccattctatttcttataaggtcaccaccatctctcacaggaatcaacgaaatcttcatgttttattgagctttagttactgagttttaattacatcagttgattgaggggatggagaatctcccctaatgtcttggagaaacagaagggaggtttaaaactaactgtaggtcgggcgcggtggctcacgcctctaatcctagcactttgggaggctggggcgggaggatcgcttgaggccaggagtttgagaccagcctgggtaacaaatcgagaccccgtctctacaaaaaaaaaaaaagaaaaaaagtcgttgagggtggtggcaagtgccttgtagtcctagctactcgggaggccgaggccagagggtcactggagcccaggagtctgaggctgcagtgaactaggatcttgccactgcactccggtctgggcaacagagcgagaccttgtctctggaaagaaagagagagagagagaaagaaagaaaagaagaaagagaaatctaaccttagacgcttagagttacaaataacttttatttttcagttctctagttcaggctttcatctagtactctgataagtggacattcaggcttcgcttgaacattgccagtgatctaacacaaggcggcttattctattattggatctatttatgacagtaaagttttcctgggtaataagatgccttttttttttttttttttttttttttttgacagagtctccctctgttgcccagggtggagtgcagtggcatgatcttggcccactgcaacctccacctcccgggttcaagcgattctcctgcctcagcctcccaagaagctgggactacaggtgcccaccaccatgcccggctaatttttgtattttttagtagagacagcgtttcaccatattgaccaggctggtctcgaactcctgaccttgttatccgcccgccttggcctcccagagtgttgggattacaggcgtgagccactgcaccaagccactatcagtttttatataatgcttaacatttggcccaaatgctgcacagaataagttgtttaacctctgtttcatttattattcagggagcattcattgagtatctacaatattcagtgacacattgagtatcaatactcagtgatacattgagtatctacaatacccaaatactgaactggtgcagtggcttggatgggaccgtaatcccaatgacttgggaggctgaggtgggagcattgcttgagcccaggaggtcgaggctgcagcgaactatgttcgtgccactgcagtgcagcctgggtgacagagcaagaccttgtttcaaaaaaaaaaacccagatactgctggatattagggatatgagttgaaataatcccatttctcgaaaagctgatagttttggaggaaggagatgagaaagagaaagatgagagaccattacaaaactgataagtaccgtaaaagaggtttacaaacagatactaaaagaacatagaggataccctctggtttaggtcagtaatgcccttaaaatgtgataactagaattgaagcaaaaagccaagaagtaacatagcgcagaggatagtaggactcttatcttccttgtttcgacacaaagtttgttgttaatgtagcctaacctttttttttttttttgagatggagtttcgctcttgttgcccaggctggagtgcaatggggagtgatctcggctcactgcaacctctgtctccgggttcaagtgattgtcctgcctcagcctctggagtagctgggatcacaggcgtgtgccaccacgcccggctaattttgtatttttagtagagacagggtttctccatgttgatcaggctggtctcgaactcctgacctcaggtaatctgcccaccttggcctcccaaagtgttgggattacggacgtgagccatctcgtgcccagccaacatagcctaaccttttaaacaatcacactttgcttttgatttgtttctattaatggaaatacctgtttatgaaaacagcaatagcaaacatgtattgatcatttaccatctaatgaagtagatgctattatattccattttatagctgaagacactgagattcaggttgagtaacttccacaaggtcataaagctggagagaaggtgacttgggaaacatccagacagtctgattccacagtttactctcagcatcatgctagtctaccaccctgatggtaataataacaatgtttgctggacgcggtggctcacgcctgtaatcccagcactttgggaggccgaggcgggtggatctcaaggtcaggagttcgagaccatcctggctaacacggtgaaaccccatctctactaaaaatacaaaaaaaattagccaggcgtaggtggtgcacgcctgtagtcccagctattcaggaggctgaggcaggagaatggcgtaaaacgcgagaggcggaggttgcagtgaaccgagattgcgccactgtactccagcctgggagacagagtgagactctgtctcaaaaacaaaaacaaaaacaaaaaaacacaaaaataaacccacagtgtttattaatcacttactctttaattgtaacaattctatgaagtaagagcaattattttttactgttgagggtactgaagacttgcgaggttaaatcacttggcctaggtaacagtagtccatcagtagtaatcagtagagttgagatttgaactcagtcacttaaccactgtctctcaacttccacctaaagggaaattgtgcatttggtgtgaagtattgtgttcatgatcgaacatgaataaatgaaaagataattgagtaaatgttattacttttaattaatatgaaggcagtaagaactttttattctttcagaatggaacaaaagtgggacttttaaaatgttgccctgtaagaagagaagaactacagtgacagagtccctacagcataaaggcaatcaagaggaaaacaacgtagacctagaatcagccgttaaaccagaatctgaccaggttaaggacttgagttcggtgtcactatcctgggatccaagtcatggcagagtagctggcttcgaagtacagtctttgcaggatgcaggaaatcagcttggtatggaggatacatctctgagctctggaatgctcacccagaacacaaatgtaccaattctagaaggtgttgatgtggccatctctcagggaatcaccctaccttccttggagtcttttcacccccttaatatacacattggtaaaggaaaactccacgctactggctcaaagagagggaaaaaaatgacactcaggcctgggccagttacccaagaagacagatgtgatcatcttaccctaaaggagcctttttcaggagagcctagtgaagaagtcaaggaagaaggaggtaaggtatacaaggtctctaggttacattcttgtcaataccactttgccattgctatttctggatacctttacagagtagtatttctgaaaggggatattgatttggtacggaattggaactgctgtgttgctaagggtcaacagtgaactttttttttttcttgagacggagtcttgccatgtcaccagactagagtgcaatggtgggatcttgactcactgcagcctccacctcctgggttcaagcgattctcctgcctcagtctctcaagtatctaggattacaggcatgcgccaccacgccaggctaattttgtatttttaccagagacggggtttcaccatgttggtcaagctggtctcgaactcctgacctcaggtgatacgtttgccttggcctcccaaagtgctgggattacaggtgtgagccaccgtgcctggccagcagtgaactttatgaatggatatagactttcttttcccctcccattcgctatatccacttctgtacccctttcttctttcttttttgagacggagtctcgctctgtcacccaggccagggtgcagtggcgtggtctcggctcactgcaagctccgcctcccaggttcacgccattctcctgcctcagcctcccgagtagctgggactacaggcacccaccaccatgcccggccaattttttttgtatttttagtagaggcggggtttcactgtgttagccaggatggtctcagtctcctgacctcgtgatccgcccgccttggcctcccaaagtgctggattacaagcgtgagccactgcacccagccattgtatccctttcattccattctctcatcctttatttggtgtgtctggagatgtgtatggtcttttgtgattgggcagcagcttaaagggggagactactgcctgggacactgggaaaggctctactgagatgaatgacccttccaatttgaaagatgaattgcggtttaacagaaagtggtatgggcacataggccaagaacagtgcacagagatagactggcagaaaaggatggtgacatggttgcttggaacaggtggtgggagatgacttcttttttttttttttttttttttgtgacagtctcgctctgttgcccaggctggagtgcagtggtgtgatcttggctcactgcaacctccacctcccatgttcaagtgattcccctgcttcagcctcgcgagtagctgggattacaggtgcctgccaccacgtccagctaatttttttatttttattagagaggaggtttccccatgttggccaggctggtctcaaactcctgacctcaggtgatccacgtaccttggcctcccaaagtgctgggattacaggcgtgagccaccacgccctgccaagatgactttagagtagtagattgtactaaggttgtgaaaggttttgtttttcataccaaggcatttgagcttttcctgtaggtaggtgatagtcatttaaacgtctaagtagaacacatttatgctttagaaaagataccaacttctcttattcattttttttttgatacggagtctcgctttgtcgcccaggctggagtacagtggcgtgatctcagctcactgcaacctccacctcccctgttcaagtgattctcctgcctcagcctcctgagtagctggtattacaggcgcccgccaccgtgctcagctaatttttgtatttttagtggagatggggtttcaccaggttagccagcttggtcctgaactcctgacctcaggtaacccacctgcctcagcctcccaaagtgctgggattacaggcgtgagccactgcgcccggcctagattgtgaaggtttttgtttttcatactaaggcatttgagcttttcctgtaggtaggtgatagtcattttttttttttgagacgtagtctggctctgtcgcccaggctggagtgcagtggcgcagtcttggctcactgcaagctctgcctcctgggttcatgccattctcctgcctcagcctcccgagtagctgggactacaggtgtctgccaccatgcccagctaattttttgtatttttagtagagacggggttttaccgtgttagccaggatagtgtcaatttcatgacctcgtgatccacctgcctcgtcctcccaaagtgctgggattacaggcgtgtgccaccgcgcccggccctttttttttttttttttttgaggtggagtctcgctctgttgccaggctggagtgcagtggcacgatctcatctcactgcaacctccgcctcccaggttcaagcaattctgcctcagcctcccaagtagctaggactacaggcacacgctgccacgctcagctaattttttttttttttgtattttagttgagacagggtttcaccatgctggccacgctggtctcgaactcctgacctcgtgatccaccgacctcggcctcccaaagtgctaggattacaggcgtgaaccactgcacccggcctattcattcattttgactgttaagatgttttcttttttgccgcattttaagtccacttgttcttattttgtcctactggtacattctcagtatgtggttttttattgtgtcttgtgtgtgtttatattgaagaatttcatgtttctgactctgctgtatttgaaaactgatggagtgcccaagatgagggagtttagcaataatcttgatggtatactgtgttggtcacgccctctctggcatgagctgcctgaagcacattgtcaaagatgaaagctcttttggggaaaagtgctctcctgtggaatcatcccttgtcatagcatgtggctctaaattttcagcctcattcacagtagcttgcattgttgtattgcttttgggacacctgtgttttatctggaaatgtagacaggaatagcggttttttttgtatgtgtattatatattgtttcactgctaatcttctacacaattttttagaataaaaaagggtaaatagcttgtgccattttgctaattacatagatttgacttttgatcacataaataaaaaataaaacaaggcaggacattgtcctgcacatagttgatgtggacaaatactttttattactttgaaattcttattttgatagttttccacttaatgaggcaagtgcttaagcctcagtctttttgagttctcattatttagacataaggaaaggagaaatgaaggtttttctttattctccccatgcctttcctttttttctcttttattctttttttttttttttaagagcagaatatactagatcaggacaaattaaggtgatactggaatttaggtgtttttactggaaaaaaggcatttcctttgagatagtttaaagaaaatagtaaggagataagaatcagttcaactactaattcaggaagccgggagagatgtacattcaaagcataggacagaatcaagttttctttcttttttttttttttttttttttgagacggagtctcgttctgttgcccaggctggagggcagtggtgcgatcttgactcactgcaacctccgcctcatgggttcaagcaattctcctgccgtagcctcccgagtagctgggattacaggcacccaccaccacacccggctaatttttgtatttttagtagagacggggtttcaccatgttggtcaggctggttttgaactaccttttttttttttttttttttgagacagagtctttctctgtcagccaggttggagtgcagtggcacaatctcggctcattgcaagcttcacctcctgggttcacgccattctcctgcctcagcctcccgagtagctgggactacaggcgcccgccaccacgcttggctaattttttgtatttttagtagaggcagggtttcaccatgttagtcaggatggtctcgatctcctaacgtcgtgatctgcctgcctcggcctcccaagtgctgggattacaggtgtgagccaccgtgcccagccctgctggttttgaatttctgacctcaaatgaccacccgcctcagcctcccaaagtgctgggattacaggcgtgagccacagtgcccagccccttttttttttttttttttttttttttttgagatggagtctctgttgtttaggctggagggcagtggcatgattttggctcactgcaacctctgcttcccgggttcaagcgattctcctgcctcagcctcccaagtagctgggattacaggtgtgcatcaccaggcctagctaattttttgtatcttagtagagatgggatctcatcaggttggccagcctggtctcgaactcctgacttcaggtgatccgcctgcctcggcctcccaaagtgctgggattacaggcgtgagccaccgcgcccgacctacaattccgtagttttagtaaaccattgcagtaacctacaaaacacattttgatgtttaacttttatctctcagatttttttttgtctgaaaatgacaaagaaatcctttgttctgagttttggtttaaaacataatctctatctgtgtgacatttaaaagaagcagaagacatagttctaacctcaggaagtttagaatcttaattgggaaaacaaccataaatatatactttttggaattggagcttgaaggattcacaggatttgatagattgtgagggaagaagtggaagtagaataacatattctgcaaacatgtagaaatgctgtgtttgtgtgggaaagtactaaggcttcaggtagaaagagtagatccagattatggagagccttgaagctttccccttaagaccttaagatttagaataggatgctggcagtaagggtagagaagaatgggtacaccatagacacattacaaagaaatgattaacactgctcagagactgacatgtaagatatctggggtaggggatggtgatgcatgccttcatagggaaggtatttgagagtttgaatatgagttcagatttgggtatgagttatgcaggtgaaccccaaaattggggctcagcccaggggggttcttggctttgtgcaagattcatttgcaagccaatagagaaaaaggaaagcaagtttattagagcagcagagtacaggaaatggctgccccatagacacagcaatagcagcagcccttgtgaatagatagctattccttgattatatactaaataagggcaggttattcatcaattttctagaaaaggggcagggagttcccagaaccaagagatcctcccattttaaaccatataaggtaacttctaggggttgccatggcatttgtaaactgtcatggcagtggtgggacttttcttctttgtatgtatgtatgtatatatttatttattgtttatttattttgagacagagtctcactctgttccccaggctggagtgtagtggcacgatcttggctcaccgcaacccccgcctcctgggttcaagggattctcctaccccagcctttcgagtacctgggactacaggcatgcaccaccacactcagctaattttttttgttttttgttgttttgagatggagtctcgctctgttgcccaggctggagtgcagtggcgccatctcagttcactgcaaccaccacctcctgggttcaagcgattctcctgccccagcttcctgagtagctggggttataggtacccgctaccatgcctggctaatttttgtatttttagtagagacggggtttcaccatgttggtcaggctggtctcaaactcctgacctcatgatctgccctcctcagcctcttaaagtgctggaattacaggcttgagtcactgcacctggctttttttgtatttttaattgagatgcgtttttgccatgttggccaggctggtcttgaactcctgacctcaggtgatcatctgcccgcctcagcctcccaaagtgctgggattacaggcatgagccaccatgcccagcctgtttttattttttaaaaccaatccatttaattgtgtctttcaaggtaaacaatttatggagcctggatcccaagcctgagagtgctagagctatgggtccaaaacttgtggtattctgagttcagaagggttcgaactcacggtgttcaactcacggagtcagagaacatgcggaatttgtgtattccatttagcaattttgtaaattaccagaaacagactgaaagagtctttcaagatggggaaaattcaactcctgtgttttttttgtttttttgtttttgagacagagtttcactcttgtttcccaggccgtagtgcaatggcacaacctcaatggcccctgctcggttgaagcgattcttctgcctcagcctcctgagtagctgggactacagccgtgtgccaccatgccaagctaatttttgtatttttagtagagatggggtttcaccatgttggccaggctgtctcgaactcctgacctcaagtcatccacccacctcggcctcccaaagtactgggattacaggcgtgagctaccgtgcctggcccaggacagctttttaacaagcagttaaagtggaaaagaaccccccagtagcacgctggtttagtttataagattttagtttacaaattaaaaaatctatatgttttacattttctctttatatcacttttttcctttatctttctctttgtcgtcttttgtatccttttttgctctcttctttttcctatctttttttttttttttggtgacagagtcttgctctgtcacccaggctggagtgcagtggcgcgatctcggctccctgcaagctccgcctcccgggttcacgccattctcctgcctcagcctcccgagtagctaggaatacaggtgcccgccaccacacccggctaatttttttgtatttttagtagagacggggtttcactgtgttagacaggctggtctcgatctcctgaccttgtgatccgcccgcctcggcctcccaaagtgctgagattacaggcgtgagccaccgcgcctggccggtttctttttcctgtctttcttctctgcatcccagttggcaatcttgttgatgaggttgtgtagggtgatcacagaatggatcagcgaggccaagtacactgctaccatttggttattggtcttcaggtaaaaggccttgacaaactcctataggctaatgactggcagcagcttgaagacctgcagctgatagatgaattggtggttggtggacagtttgcctgtggcaactttttccaggtagcttctggtacccagaagcttggagttcagtcccttcaaatccaggacctggtttgtgatacactgggaaagagtgcccactgtagtgtctttgatgtcttgtaacaagtgtttaactccaatttccttagcttcctctgctgcagtttcactggtcacatgctcaaatgttttcaaggctgaagttccatcttcatagacttctactgaaatatatgcttctgtaggcagccctaagtcctttggcttcatgtcactagtgaccaatactgagttacggcagtatcttttcatgatttcattgaaggcagtgtcattcttgtgtagtttagggcctatgtggtaccactcaactattctttccctggcattcaccctcttaaacattctgtatgtgtttttcaaataatcgtgggctaaaaaacaattatctttgtcatcttcattaaaagggactgtaaaactgctggatacatcaagtactttcatttgccatgaccgcaaaagcacatgaagaatgcatttctggtttccaaccttgctgattctgttgaaatgatccaccacattgagcagtacctgggggtggactaccaccttctgcaccaccaggtccagcctcatgatacactctggccaccaggcctggctccctgtgacccactggagtttcttttagcatgcaaattcattataattagtgtataataagcagtgagagcaaccgaatgtcacttttgttgccatcttggttgtaactggttttggctgctttctttgctgcatcctgttttgatcagggttttgttcttgttttgttcagcaggctctctggccagtgcttggaaaacaaatcctgcttctctcctacctcactccccccacagagattatatactccccttcaatcttacagggttttagaagggtggaagtccatcttctgtgactgcttcctgttgattttatgggcattggccctgcctagcactggaggagtaaaaatctcttgatgcctcatctaaggggtcagaacaaggatgtgttggaagccacttgctagcattatcttcacatggaaattgttgcaatctagaagacacacactacaaggaggctaaaagaggcagggccaaagattcatagttacaagatagctgctagaggtcctaaaaagagtagaaaccaggtgagacttgggagggttttttttgttgttgttattttttgggttttttgagacaggatctcgctctgtcacccaggctggagtgcagtggtgtgatcatggcccactgcagctttaacctcccaggctcaagtgatcctcctgccttagcctcctgagtagctgggaccacatgtgtttgccagcaacacccagctgatttttaaatgtttttatagagacacagtctcactatgttgcccgggctggtcttgactcctgagctcaagtgatcctcccactttagcctcccaaagtactggtattacaggcgtgagccactctgcctggccaggagggtgttttttatggtcaaccagatatagttggggtcagttccctggttatatatatgtaaccaggtggcttgctcttagaacttttgaatgttaacctcagcctgtccagagttgttaatatatgtgcagtcggtcttattgataacagtgcagactctacctttttcagtcagtaaacaatccaagactagtctgttgtcagggctacaattgccaaagagtccagagattcctgaatttttcttaatgtctgactagtgttggtggccagagattctagggcctgagttatgtttcttagcattgacttgtggtatgcaaagcccctgccaaggggccaccacccctattgctgccccaattcctgtaaaaattaatcctattgctcttttacttcttgtttttctagattttatggggttatgaatggataccccctgaagggataatggtggccaaaatacattcactggtgtttcaagtttttgataagcaaaatggaaagctattcctagaagaataaatggttccctacagggttgggagtgggtatggggtaggatttcttcccctaaaggtgagcccagatgggtcacaaattgaatccttgcaagttatgccgtccattttttattgccaaactgggtctatagagataccttttccaggttccaatgggggtgattgagtagccctcgttttccaccagagggtggtacctccatcttcccaaattaagcagtcgtttctcccttgcatgtattggtcctggaggaggcaccatgtatagtctccttgtttaccagtgggatcccgtttgccctcccatggccttgggaatttggctactagggttgggtcagagcatcgtggggaatttctgtctctgtgtcattgtcacaacaatttgtgcaaaagatagtatcattagtacactggagctgtagatacccaacatcctaggtccaggtaatagtagggggtaggagggtggttggagaggagtcaggtcaatctgttaagtgtgggagagagctgttttataagtaggggcctaggtaccaaaggaacactatggccaattaggaggtttggggagatggctgtgaggtttgcagggtgcaccagaaggtgatgctctctatcctgagggtgctgatgacagattctgcaatcatgcaggctatttcctgatgctataattctagaaatgtttactatggagttttgttcccattccacagcgagttagattgattaggagcagggagcaagaagaacagggacaactgagtatcacactgggctttagggtggtccctatactcaataaggacaagtaaggtgtttctcaggaggaggtggttgctacttatctgtcttgtgaaatagcaactttaagtcttccagaggtttgcaggtgtaggtcatggtgtcctcctcttgtgcctgtagggattcaccaaaaacaggtttgtttaatccgggacaggtgtacctagctagtgattccccgaagtttaacagcagtgggagtgcttaacaatacctaatggggagtgggtgcccttccatattggttatattataattgatcttcaaggaatccttctttccaagttttttttttttgagatgaagtcttgctctgttgcctaggctggagtgcagtggtgctatcttggctcactgcaacctccgcctcccgggttcaagtgattcccctgcctcagccttctgagtagctgggactacaggcatgtgccactatgcccagctaaattttttgtattttactagacacagggtttcaccatgttggccaggatggtcttgattccctgacctcgtgatccacccacctcggcctcccaaagtgctgggattatgggtatgagccactggcccggccctttccaagttttttttttttttttttttttttgagatggagtctcgctctgtcgcccaggctggagtgcagtggcacgatctcggctcactgcaacctccacctcccgggttcacaccattctcctgcctcagcctcctgagtagctgggactacaggtgcctgccaccatgcccggctaattttttgtatttttagtagagacgaggtttcaccatgttagccagtaaggtctccatctcctgatctcgtaatccactcgccttggcctcccaaagtgctgggattacaggcgtgagccaccacccctgccccaagtttttaataggactaggtgtcctggttaaacagggaacaatcttttcctttgtgggaaagggcaatactttattttcatattcttagagtgccttttgaacctggtctcttaagttccaaaggggagcggggggaaggtatagtgaggcttgtccaaccccttgtttcttgtcatggcctgaattagtttttcaagtttctttttttttttgagacggagtcttgctctgtcactcaggctgtagtgcagtggcacgatctcagctcactgcaacagccgccttccaggttcaagtgattctcctgcctcaggctcccaggtagttgagattacaggcgttcgccaccacgcccagctactttttgtatttttagtagagatggggtttcaccatgttggacaggttagtctccaactcctaacctcaggtgatctgtctgccttggcttcccaaagtgctgggattacaggtgtgagccactgcatccagctgccagaggcaatattgctggccaagcttttattttgttccataccaatgctgaggtggtgtgctacctgccccaggtccctcatgtcccttggtgggacgctgatggccaagggacttagattcaagtgacttatagccaattaaacattgtaggccagatggaagtggaggtaggcaggcactcattattatctcttaaaaccccttttaagcaatataagagccaaaaccagaagccaaaaaataaggttataaaactgacttatctataaattctgtgcattgagctattgtaatcttggcttgcagcaattaggtttacaaaacacaaacattttgttcagctatttaggtatctgtgtgcctgtccttgatttggaaggtctgaattaattatatccctcaaaacccagcccctataatctctcatgcccacctcttcagtagtccttgggcctggaggaattgaatagttttaaattctgtagataaaacaacacataaagaattagcaatgtttcaaacaaaaaagtcataagccctgccctagttttgagaatgacaggaaaggaatcttacaggtacctaaacatttaaattatttagtatcaaggcatagaataagttatattaattcatatagaggcaaaattattaaatgaatacaagcttgtccctgtgtctcattaaagcagtttactttttttttgagactgagtttcactcttgttgcccaggccggagtgccatggcatgatcttggctcaccgcaacctccgcctcccgggttcaagcgattcccctgcctcagcctcccgagtagctgggattacaggcatgtactaccacgcccagctaatttttgtgtatttttgatagggacggggtttctccatgttggtcaggctgatcttgaactcccgacctcaggtgatccacccacctcagcctcccagagtgctgggattacaggcgtgatcaactgcgcccgtcctaaagcagtttactttgccccttttgcccaggtctaaagacaaggctttggttaacttgagtttggtgttagatcctggcaagagttggtgccttctctagatgagctgtctgtacccaggagtcaaagccctgtaactcaaaagcacattgattagttaatagcacccgataaggaactttttaaagggctggcagtggtaatgctggagtccacaacctgtcaggaggctgtaaaaatatatcacaaccttgcagtgattagtttttatagctttgataaagcccagcaacaagccagacaatcaagctaggattcgattctgggggcatttgtaaaagatgttaaaaagcccaaaatactgtattgacacagaaccacaggttactgtaagtaatagttacttatttacccaaagtggtaatctctctgcagtgtaattgtctctccttatgggaagcccacttaactaatcttgaagttaaatttgatgaagagaaaaataatacttgaatttaatcggacaaagtatgttcaaggttttgaatatagcaggtgaacatgaaaagttttctggttactctgaaaatttagacatgtcaagaaaaaccaagagtatagaatcaagttatactggaggaaaacattgcttttatagacctctaagctaaaatatttcagcatctgactgtaaaaacagaactggaagagaaaaagttacagcaactgatgaaaaggttgaaggagagactaatgtctcaggctttctcaaggggagaaaaagctgaaagcagtgagatagaacaattgaacttatgagatatgaatctgagaaattttcaaaagaaacaagttatagaattgaaaagcaaattttcttgtaatttcattaagagcaaatcaataccttgaaacccttactttaacataggagaccattctttagaaagattccacttttaattatagctaacttaatcacataaacaattctttttataaattctcctttataaatcttatgacctgcacagaccatgtatgatatggttgaatgaactttctgacttgtccaatactacctttttttttttttttttgagacagagtctcattctgttgcccagactggtgtgcagtggtgtaatcttggctcactgcaacctccgcctcccgggttcaagcaattctcctgcctcagcctcaaaagtagctggaattaacaggcgtgtgccaccacacccagctaatttttgtattttttagtagagacaaggtttcaccatcttggccaggctggtctcaaactcctaacctcaagtgatccacccaccttggcctcccaaagtgctgggattacaggcataagccactgtgcctggcctatactacttttcctaaataactagtcattctactactctagaacaataccatataagatccttttttttttcccactgagatctgcaggattctttcttatgtagaattattctcttttatttataacctttcttaccaaaaatacctctgaacatccataactttctttacctatctctcccctacttactggttcctttctacctggttatataaataaccttttcaagtccataatttgaatcaacctttagataacttttgaattagacacaattattctttttctcaataaaaacacatcttctttggtaagttttatataaacctaagaaggaagaaatcctgaactatcagatattagcattttatagatgagaaccattccacagtttttaaaattttttattttattgtaaaatgtttccctatataatattcctttcttaattggaaatgacccaggcatccaataagcatccaaaacgattttaagattttaaattatacaaaaagttcacttataagcatttatctcattatatttacctaatttattattattatttataattttttttctttttttttttttgagacagagtctcactctgtcacccaggttggagtgcaatggcataatcttagcttactgtaacctctgcctcccggattcaagagcttcttgggcctcagcctcccaagtagctgggatgcatgcaccaccacgcctggctaatttttgtatttttagtagccatggggttttgccatgttggccaggctggtctcaaactcctgacctcaagtgatccacctgccttggccacccaaagtgctgggattacaggtgagagcccctgtgcctagctggaactatattagacaaaattggtcattattcaaagttatttcctggttaaccatttttaaactctgaacattaggtgaacccctaagtaagaatcttaaacacatgggcattttgccagtaactgagaagattcagctattttcattgagccaacaatcttaaattcgtcttatttatacaattctgaagacatttctatttccatcaattatttaatttaattaattaattttttgagacaaggtttctgttgcccaggctggagtgcagtggcatgatcacagctcactgcagcttccgcctcttggggtcaagtgatcttccacctcagcctcctgagtagctgggactataagtgtgtgctgtcacacctggctaattttttttgttttgttttagagatggagtctcactatgttgcccaggctggtcctgaactcctgggctcaagcagtcctcccaccttagcctcccaaaaggttgggaggtgtgagcgacagcacccagtctttattaataatttgaaaacaagttttatttaccaaaggattcatgtgaacttgaaaagcctttggactttattaaagatagctggatttaaatatttctgacaattttgaaacctgttcacatggctaaactttttttttctaataggtaatccaaggaaactgtagactagaatttgggtaaggtagttttcataacagttttaattttaaaaccctcttttatccttttttcccccttcagcttcagaggaggaggagatgatttaaaagggcaggaaagaaaaagagggaaaggagggagagtagggggatgaggggtacctttccctttgtttctctggtgggggagagagagagagagagatacagcaagccagaacactcattgatggatgaagggtcaccttaccatgacaacttcaatatcagatatcttggacccaagaccttgggactgtcccagggacccacaatcctagagagacatgaaccagtagaagtataataaaagaagactgaaaaggcagaaagggaaaggaagctaggaaaaacaggctcccgtagcagcaaatgtgaattggggaagagaggggttgttgttcagggcgtgtccttggagtccctgagacagtggagaactcacccatcagtggagacaccaaaaaaagtgttcaggcggctgcttttctgccattgcagggagtcgtcattaggtcaggggttcagggcctccagaaaaatgggcttgaacaaggcagctcatttgggaccctcattttgagcagaaagaaagacaggaagagacctgttgcagaaaagaaaatttatgattttaggagggactagaagaagttgctgaagtggatggaatgacagagtaaggaaaaaaatgaaacggcaccaaatgctgaaaaacctggagtatctagacattggccagtgagggtccccataccaaatgctgaaaacctgggggtggccaacagtgaggcccaaaggcatgagacctaacacagttggggccatagaataatgtgactctgacatcccagagtcagcacaaaggaatacctctcaaaataacaaaagcctgccttacatggaatagaaacaactgcccaaattgccaaaacagggactacaaacatgacaactggataaacataagtgtgcatttaggcactaagagcagaaaagtaaaatgactggtcattagaagctaaagagaaaaggtctgagagagaaggtgacaaagtaaattacaaaggacgtggatgtccaggtgtgcttctgtctggggcacccagatgatgggggacaacgaactgactaacaacccagagacactattccccatttcctgattgatttgaaaaggtaaagggagaggagagtgaaagagaaagtaaatcagttaaagaacaccacatcggccaggcgtggtggctcacgcctataatcccagcagtctgggaggccgaggcggggggatcacgaggtcaggagttcaagaccaacctggccaatgtggtgaaaccctgtctctactaaaaatacaaaaattagctgggtgtggtggcaggcacctgtcatcccagctactcgggaggctgaaagcaggagaatcgcttgaacccgggaggcgaggttgcagtgagccgagattgtgccactgcactccaccctgggtgacagagcaagatgtcgtctcaaaaaaaaaaaaaaaaaacgaaaacaaaacacacattgagggggaacaaaggggacactcatcttttcgtggaggccaaatggtgccagtcagtctttgggttcaagcaattctcatgcctcagcctcccaagtacctgggactacaggcgtgcaccaccatggctggctaattttttgtatttttagtagagccggggttttgctctgttgcccaggctagtatcgaactcctgagctcaggcaatccacctgccttggcctcccaaagtgctaggattacaggcgtgagccacggtgctcaacccaatcagtcttaatttagggtctggctaaaggtctccctcagttccttttggcttattattggtctcttcatggtcaccaaggaatgacgcaggtgaaccccaaattggggctcagcccaggagcattcttggcttcgcactggaaggaatcatgaatgggccaacagtgaattgaaagtaagtttattagagcaacagaggaagggaaatggctgctctgtaagagaagcagccgcagcagcagacctgcggattgctggctagctgtatgtatacaaagacaacatggaaaaaaaatgaaacggtgccaaatgccaaaatacccagagtatccaggcatcagcccatgagggtccccataccaaatgacgaaaatcccagagcacctagggggtggccaacagtgaccctcaaaagcatgagacctgtatagccatatatatatgggtatactttgattatatgctaaaataaggggcagatttttttttttttttaattgatcattcttgggtgtttctcgcagagggggatttggcagggtcataggacaatagtggagggaaggtcagcagataaacaagtgaacaaaggtctctggttttcctaggcagaggaccctgcggccttccgcagtgtttgtgtccctgggtccttgagattagggagtggtgatgacttaacgagcatgctgccttcaagcatctgtttaacaaagcacatcttgcaccgcccttaatccatttaaccctgagtggacacagcacatgtttcagagagcacagggttgggggtaaggtcacagatcaacaggataagaatttttcttagtacagaacaaaatgaaaagtctcccatgtctacctatttctacacagacacggcaaccatccaatttctcaatcttttccccacctttcccccctttgtattacacaaaaccgccattgtcatcatggcccgttctcaatgagctgttgggtacacctcccagacggggtggtggccgggcagaggggctcctcacttcccagtaggggcggctgggcagaggcgcccctcacctcccggacggggcggctggctgggcagaggggctcctcacttcccagtaggggcagctgggcagaggcgaaggggcggatttttaatggattttctggaaaaggggcgaggacttcccggaactgagagtccctccccttttaaaccatataaggtaacatctgggggttgccatggcatttgtaaactgtcatggtgctggtaggaggttcttttagcatgcagataaaaggagggcaacaggaggtggctttcatcaccatcttgcttttagctggttttggccagtttctttgatcagctcctgttttgttcagcggggtctttcgaacagtgcttggaaaacaagtcctgctgatctcctacctcaaatggaatgtgaggtgacaatagggccagcaagcaaaaatagaaatctgagattgaagtttagtaagaggcaaggactagaaatgttcagtgttagtcatggttcttctccatggaaacagacatggagggggaagagcagtggattgaagacaaccttgccttgaggaagaagataacagagaaggaacaactggagaagtaatagtaaaagtgaaaagaggaaggagagctttaagaacaaggtactttaaaatgtaaatttaaaatttagtagcaaaggagggataaggataatacctgagaaaaaggttacatttgaagattgatgatcttggagagtagattcaggagtttgttggggaaaggacattatatgaagcagttaaagaggaaggaatggggctgggaacagtggctcacacctgtaatcccaacactttggaaggccaaggtgtgaggatcttgtggccaggagttcaagaacagcctgggcaagatagctaggttccatctctacagaaaattttaaaaattagccaagtgtggtagtgcatccctgtagtcctagctactcaggagtagctagggggatagcttgagcccaggagttcaaggttgcagtgagctctgatcgcaccactgcattgcaacctgggtgacagagcaagaccttgtctgtaaaaaaaagaaaaaggaggaggaatgaaaccccagagatttttctttctttcctctcccccatccccctcctcccctcctcccttcctcccctcctcctctcctcccctctcctccccactctcctcttccctcttatccccttccctcacctcccctccccttccttccctttttttttttttttttttttttttttggagacagagtctcgctttgttgaccaggctggagtgcagtggtgtgatctcggctcactgcaagctccacctcccgggttcacgccattcttctgcctcagcctcccgagtagctgggactacaggcacctgccatcatgcctggctaattttttgtatttttagtagagatggggtttccccgtagccaggatggtcttgatctcctgaccttgtgatctgcccgcctcggcctcccaaaatgctgggatcacaggtgtgagccaccatgcctggccttccttcctttttttgcagtgggagaatgggtgagaaatagctagagaaggcagcgagattattgcatattttttcaagataagttgtcagaaggaactggaggaaattataagattaaaatgctagagaaggaatggataaataactatgggttcatagtcactcagttattgataagtgtaattaagagattttaaaaatcagttcacagatatccggatttaaataaacatttattgtttagtattatctgtgatatcactccccttcattaatctggagaactgaaaattgattatactactttgcactttaattagttgtatatacaagtaatagcaataaaagtacactatgagtgtctctccagaatttttcttcaagtaactttttttttttttttttttgccaatcagataatgtaacacaaaacagagaggaagaaagaaagattgacaattcacatatatctactttggaaaatattgaaaactttaaaggagaaaataaaaatcacccgtagccctgctgtttagtatgtgtttttgttgttttactttcttttaagtaacattttagttttctgattatgaaagcagcagcatcatatacactgtagaaaaaatgaaaatacatagaaagatagttggattattttcaagtattgacattttgttacaattgatacctttttgttgttgttattgtttgtttgtttgtttgtttttgagacagagtctcgctctgtcacccaggctggagtgcagtggcatgatcttggctcaccacaacctccacttcctaggttcaagcaattctcctgcctcagcctcccgagtagctgggattacaggcgcctgccaccacacctggctaatttttgtattttcagtagaggtggggtttccccatgttggtcaggctggtcttgaactcctgaccttgtgatccacctgcctcggcctcccaaagtgctgggattacggtgtgagccactgcgctaggcgcaccttgccgggcaatacattgttaaatcatgtttcttttttctttttttttctttctttttttttttttttttttttttgagacggagtcttgctttgttgcccaggttggagtggagtgtagtggcgtgatcttagctcactgcaacctccacctcccgggctcaggtgattctcttgcctcagcctcccgagtagctgggattacaggcatgtgccactgcgcctggctaagttttgtatttttagtagagatagggtttcgccatgttggccaggctggtcttgaactcctgatctcaagtgatccacccacctcggccttccaaagtgttgggattacaggctggagtgcagtggtgtgatttcggctcactgcaagctccgcctcctgggtttgcattgtccagcctaaatcatgtttcttgactgcaggtattagtgtttaaaccttttctttatttattttttttaaagagatgaggtctcaccctgtcatccaggctatagtccagtggtacgatcatagctcactgcagcttctaactcctgggctgaactgatcctaccaagtaactggcactataggcaggagccacatcatccagctaaaaaaagctgcgactacagacctgcaccaccacacccagctttttttttttttgactttttgcagacacaaggtctctataagttgcccagcatagaaatgttttttgtttgtttgtttgtttaacaggtgaggtctcataattcactgcaacctacaattcctggccttaaatgatcctgctgcttcagccttctaaagtgctgggcttacaggtatgagccactgggctcaactagaaataactttttatttatttatttatttatttatttatttatttatttatttatttttaacgagacagagtcttactctgtagcccacgctagagtgcagtagcacaataatggctcactacaacctctaactcttggcttcaagtaatctttctgccttggcctcccaaaacgctggaattacaggcatgaagccacacataacttttttttagacagggtcccaccgtgttacctaggctggagtacagcagtgcaattacggctcactgctgccttgacctcctaggctcaagtgattctcccaccttagcctcccaagtagctgggactacaggtgtgcaccaccatgcctggctaatttttgtattttttgtcgagatagcgtttcaccacattaaccaggctggtatcaaactcctgagctcaagtgacctgtccacctcagcctcccaaagtgctgggattacagccatgagccaccatgcccagcccacaaattactttttaaacaagcataccagaacttttaaatctaagcaagtattgcccttcaaaacacagagattcactttggtaggcagagcctcttccactgacatttttactacttaaaaaatatttggggtcaggcatggtggttcacacctatccctgtacattgggaggctgaggtgagaggattgcttaaggccaggagttcaagaccagacttggcaacatagtgagaccccatctctacaaaaataaaataaaattagctgggcatggtggcaggaacctgtagtctcagctacttgggatgctgaggtggaaggatcacttgagcccaggaggttgaggccgcagtgagctgagatcgtaccactgcacttcagcctaggggacagagcgagaccctgtctcagcaacaacaaaaaaattggaactacttggccaagtgcggtggctcgtgcctgtaatcccagcactttgggaggcagaggtgggcggatcacctgaggtcaggagttcgagaccagcctgaccaacatggagaaaccccatctctactaaaaatacaaaattagctgggcgtggtggtgcatgcctataatcccagccactcgggaggctgagccaggagaatctcttgaacccgggaggcggaggttgcggtgagctgagatcgtgccattgcactccagcttaggcaacaagaatggaactccgtctcaagaaaaaaaaaaaattggaactgctttttaaaactgtccctgcagggctgggtgcgtggctcatgcctgtaattccagcactttgggaggcctagagggacagattacctgaggtcaggagttagagaccagcctggccaacatggtaaaaccccatctctactaaaaataaaaaattagctgggcgtggtgacacacgcctgtaatcccagctactcggaaggctgaggcaggagaattgcttgagcctaggatacggaggttgcagtgagctgagatcatgccaccgtactccagcctggcccacagagcgagactctgtctggaaaaaaaaaaaacaaaaaaactgtccctgcaagcacattatcagctgcaccacaaaatcatttttcatactctagaggaaatgttccttttttctacaacctttttttcccctctgactccacaatgcttttcaatttatttccccttcctagagccctttaggaccccaccttcctttatagatatgctggatgctaaaagacctcagaaagagaagctgagcagaataagagaaatagagaaagcaaaccttattcagagcatatctgtaacttatgtactgccagcctgagaactgtatgttgataacatcaaaattattattttttaatttatattgtttattttttggagacagtgcctcgctctgtcgcccaggctggaatgcagtggtgcaaccttggctcactgcaaccttggctcactgcaacctctgcctccccggttcaggtgattctcgtgcctgttgaatagctgggattacaggcacctgccaccacggctggctaattttttgtattttagtagagacgaggttttaccatgttacccagcatggtctcaaactcctgagctcaggcagtccgcccaccttggcctcccaaagtgctaggactacaggtgtgaaccaccatgcctggctgatcataacatcaaaattagctgagaacagtacaaatcaactaattataagctaaaatcatgctactcacttttaggaggcaaagaaaggagaagcataagtggaaattagggtatgtaagtcaaattcagaagaacaagtaaaattctattagaataaacaccattaaagcagaagatttagctggatggtgtgatggaagtaagctataacaatgctactgcactccaggctaggcgacagagtgagacccaagtataaagactggccatgtgttttgaaagaaaatgttcaactaagtaatacacaaactagggaaaaaattcagaaatataaaaagtacacagtgaaaatttaggcatcctttcactttgtactcttgctccccaagtcctcttcccaggtaactgttaaacaattttttgtgtatagtccagggattttctgtatatatgcaagctatttccttgatagcctgatttctgatgtttaccatttttttttttttttttttttgagacagagtctctctctgtcgcccaggctggagttcagtggcgcgatctcggcacactgcaacctccgcctcctgggttcaagcagttctcctacctcagcatcctaagtagctgagattacaggtgcccgccaccatgcctggctaattttttgtatttttagtagagacggggttttgccgtgttggccaagctggtctcaaactcctgacctcaagtgatccacccatctcagcctcccaaagtgctgagattacaggcgtgagccactgtgcccagcattcttttttggtttgtttgtttgttttgtttgagatggagtttcgctctgttgccctggctggagtgaagtggcactactatcttggctcactgcaacctctgcctgccaggttcaagcgattctcctgcctcagcctcccaagtaactgggattacaggtgcctgccaccatgcctggcttatttttgtattctttttttacagccgaggtttcatcatgttggccaggctggtctccaactcctgacctcaagtgatctgcctgcctcagccttccatagtgctgagattacagatgtgagccactgcgcccagcctacttttaatactacatgaatatttctttgcgtgtgtgtgtgtgtgtgtgtgacagtgtcttgctctgacacccaggctggagtgcaatggcatgatcacagctcactgcagccttgaactccagggtccaagtgattctcccaccacaccctcctaagtagctgggaccacaggtgtgtaccaacacacccagctaattttagagctctatatttttgtagagacaaggtatctccaaatgttgctcaggctggtcccgaactcctggatcctggctaaagcgatcttcctgccctggcctcccaaagtaatgggattacaggtgtgagccacctggcctagcctaattttttatttttatttttagtagagacaaagcctcgatatgttgctcagactggtctcaaactcctgggttcaagtgatcctcctgcctcagcctcccaaagtgctgggatgatagtcatgagccacctcatgactataagcacctggcttttttttttgtgtgtgtgtgtgtgtgacggggtcttgctgcgttgtccagtctggagtgcagtggtggaatcgtatctccctgtaacctcaaaatcctggcctcaagccatcctcccagctcagcccccccaagtaactaggactacaagcatgcaccatcaccccttttttctctgtctttttaatgctagcctcacctactcccctcacaaagggagtgtttatgaagtgttgaggtgagaaagttgtctaatgaactgtagaaccatatatttacaattttatggtgacagttactcttctgctctgccaaattgatttacaaagtcagggcattttatgattatatttatagttgatgaaatatggtgttaatggtcatctatataaaatgtcatcaggaatttcctttacaagtctgatttttcataggaaaaaatgcaaaactgaaagcatattagaaataaaaagacctcagcaattacctagtttaactccctgagtttacagatgagtaaattggatctgagctttgatttaagagaggaaaattcctatatagtatatgcttaattcatgaagttgtctacctaaaaacactataataagatgctaaattctacaacagagtatgactgagaatggtcaaagtgtggagcaatatttgtgattcttccagggaaacctcaaatgaattctgaaggggagataccttccctgccatcaggcagccaatctgcaaaaccagtaagccagcccaggaaatcaacccagccagatgtttgtgcctctcctcaagaaaagccactcaggactctgtttcaccaacctgaggaagagatagaagatggtggactcttcattccaatgggtaggctttctttttctttttaattaaatgaaacctctttattgaagtataatatgtagaaaactgcacatgtcctaagatatcctgaattcactatatttttacaaatttaatacacccttgtaagcaggacccagatcaagatagagaatgttatcaatacccagaagtccatcttgtcttccctttcaattaccctctacccataggttaaccactatcctgatgtctagcatcatatattggttcaatttttttttttttttttttgagacggagttttgttcttgtcgcccaggctgaagtacaggggcgtgatctcggctcacggcaaccgctgcctcctgggttcaagtgattcttctgcctcagcctccggagtagctgggattacaggtgcctgccaccacacccggcttaatttttgtatttttagtagagacagggttttgctatgttggccaggctggtctcgaactcctgacttcagatgatccacccaccttggcttcacaaagtgctgggattacaggtgtgagccactgcgcctagccagttgttctgtctttttgtcttttatttgaatggaatcgtgtgtacattttataactgcctttttttttttaaagacagggtctcactctgtcactcagactggagtgtagtggtgccatcacggcttactgtggccttgacctcctgggttaaagtgatctttttgtctcagccctaagtagctgggactataagcgcgtgccgtcacagccagctaattttttttctttttttttgagacacagtcttgctttgttgcccaggctgctggaatgcaatggcttgatctcaggtcactgcaacctccgcctcccaggttcaagcgattctcccgcctcagcatccctagtagctgggattacaggcacctgccatcatgcccagctaatttttgtattttttgtagagacggggtttcaccgtgttggccaggctggtcttgaactcctgacctcaggtgatctgcctgccttggctttccaaagtgctgggattacaggcatgagccaccgcacccggcccagccagctaattaaaaaattttttttgtagagacggagccccactatattgcccaggctggtctcaaactgctgtgctcaattgatcctcttgcctcagcctcccaaagtgttgggatgacaggtgtgagccaccgtgcctggcattgtgactgcgtttattctctcaattttttttttttttgttttgagacagagtcttgctctgtcacccagactggagtgcagtagcgcaatctcggctcactgcagtgtctgccttccgggttccagcgattctcctgcctcagcctcctgggtagctgggattactggcacggccaccatgcagggctagtttttttatttttagtagagacgggctttcaccatgttggccaggctggtctcgatctcctgacctcaggtgatctgcccgcctcggcctcccaaggtgctaggattacaggcgtgagccaccgtgcccggcctcaacattgttttatgaaattcatccatattcttggatgtacttgtagattgttcatttttattgctgtatatcattctgttgtttgaatagtttatgtatgttttcttttctttaattttttttttagagataggtactgctctgtcacccaggctggaagttcagtgccatgatcatagctcactgcaatttgaactcctaggttcaagtgatcttcccacttcagcctccccagcaactcggactctaggtgcacgccacaatgcctggctaattttcatttttattttattattattatttttttagagacggttttcactatgttgcccaggctggttttgtatttctgggctcgagcagtccctccttgatctctcaaagtgctgggattacaggcatgagcctcctcacctggtttgctttacgttttctttatccattcaactctttgttttttctttttgcttccttgtgcccattgttacccattcaattcttcttcttcttttttttttttttttttgcgacagagtctttgttttgaaccagagtctcactctgtcgcccaggctggagtgcaatggtgtgatcttggctcactgcaacctccgcctcccaggttcaggtgattctcctgcctcagcctcctgagtagctgggattacaggtgcgctccaccactcctctgctaatttttgtatttttagtagagatggggtttcatcatgttggtctggctggtctcgaagtcctgacctcatgatccgcctgcctcagcctcccaaagtgctgggattacaggcatgagccaccgtgcctagccttttttttttttttttttttttttttttgatgtggagttttgctctcgtcacccaggctggagtgcaatggtgcaatctcggctcactgcaaccgcttcctcctgggttcaagcaattctcctgcctcagcttcccaagtagctgggactacaggcacgtgccaccatggccggctaatttttgtattatttttttttttttagtagagacagggtttcaccatgttggtcaggctggtcttgaactcctgacctcaaatgatctgcccgccttggcttcccaaagtgctgggtcacaggtgcaaaccactgcacctggccccattcaattcttgatgagcatttggatacttttcagttgtgggctactgtgagtggtgctgctgtgaacattctatagattttttgctgaacatgtgtacttctttttcgttgggtggaaatgctagcttataagtttgggcatccttaaaattcttttgaaatactaaattttttattgtgaaacataacacagacacatgactaaagacttctttatttgatttagcaaatggtttttttgtgtgtgtgtgtgaatcttgctccgtcgcccaggcttgagtgcagtggtgtgatctcggctcactgcaacctccgtctcctgggttcaagtgattctcctgtctcagcctcatgagtaattgggattacagggacacaccaccatgcccggctaatttgtattttcagtagagacgaggtttcaccatgttggccaggctggtcttgaactcgtgacctcaggtgatccacctgccttgggctcccaaggggctggaattataggtgtgagccactgcgtccagcctcactttggcaaatgcttttaaaatggacacgtaatttttcttattgcatattctagaccttcattgctatgtaggttgtaagtagtagtggtagtcgacatctgtgtcttatttctggacaaaacaggaaaatgttcagtattccttcattatatatgaggatagttataggcttttcatagaaatattttttaggttaaggaaataattttcctaagttttctgagttttttcatatattgaatttcatcaaatgctttttcctatctctattaagatcatgtttttttctctttcattttgttaatgtggtaagtttcattaggtttattgagatataaaataaaatgtatctgatgagttttgaaaaatatgtacagttgggccaggtacggtggctcacacctgtaatcccagagctttgggaggctgaggcgagtggatcacctgaggtcaggagttcaagaccatcgtgagcaacatggagaaaccccatctctactaaaaatacaaaattagccgggcgtggtggcacatgcctgtaatcccagcactttgggaggctgaggcaggtggatcacctgaggtcgggagttcaataccagcctgaccaacatggagaaaccctatctctactaaaaatacaaaattagccgggcatggtggcacatgcctgtaatcccagctactcgggaggctgaggcaggagaatcacttgaacccaggaggcggaggttgcgctgagccgagattgcaccattgcactccagcctgggcaacaaagagcgaaaactccgtctcaaaaaaacaaaagaaagaaaaatatatacagttgtgttaactgctaccacaaccaacgtggaacatttctgtcaccccaaaagttgcctaattcccctttgctatccccctttctcaaacattggcaagcactgatttctatttccatagttttgcatcttctatgcaaatgttctatacttgttataccgtcatataatatgtgtccttttacatctggtttctttcacagcataatgcttttgagatttatccactttactgttggctttctgggctaagttcctggagcagctattttggaattctgatgatgttcttggtttatttgcagaagaacaagacaatgaagaaagtgagaaaaggagaaaaaagaaaaagggtaccaagaggaaacgagatggaaggggtcaagaagggaccttggcatatgacctgaaactggatgacatgcttgaccgtaccttggaggatggtgccaagcagcacaatctaacagcagtcaatgtccgaaacatccttcatgtgagtaagactggggcagttatgtaaatggaagggaactttttcatggaaagcatataaaaatgttcagcaaattcttgactcttgatacgtgaattaccgattttgtgggttacccgtgacagaacattttacatttttacatatttaagatagctttctccttgcactcagtacaagtttgaaatatgaacacatgttaaagaagaatttaattggaaagataaactgttcctgtttccttccactgattttcatatttactgtattgtttagtagattcaatgttgataatgttcatagtgggtttactcttgtgggtcgatatgtctaaaaagatgcctggttaatagtttattgcactttgtacatatgtaaatacttttcttgatatgtagcaacacagctatttgcagagcctttgctcttgttactctttctcttaagcatatagttacttacctcaggatctccttttatgtgagccattcctgttcctagtagcagctaatgagattggttcatttgctgctacattgtttgaaactgtgtggttctggccaaaacttacttctgccttctttgctttcagttgccttgctttaccccagtctgatgctattcgagtatatggttctcatttgtcctgtacataggtctgacagttacatggagagatgagtattgtctaggtgacaaacccttgttgcataaagtgaaatttcatctttctccaggaagtaatcacaaatgaacacgtggtagctatgatgaaagcagccatcagtgagacggaagatatgccaatgtttgtgagtagttgattatcactcttttaatgtcttggaacagagttatctctaaactggctaagggtaggaggtcacttaggagtttgtaaacagtttggcagctggggttaaagttagcatttcaaaacataagaattacttggtaatttttacttattttatttgttattttattattattattattttattattattatttttttttgagacggagtcttactctgtcacccaggctggagcgcagtggcgcgatcttggctcattgcaagctccgcctcccgggttcaggccattgtcctgcctcagcctcctgagtagctgggactacaggggcctgcaaccacgcccggctaattttttgtatttttaatagagacggggtttcaccacgttagccaggacggtctcgatctcctgaccttgtgatccgcccgcctcggcctcccaaagtgctgggattacaggcgtgagccaccgcgcccggccttgttattttattattattatttttttagagacagggtcttgctctgtcaccaaggctggactcaaactcctaagctggactcagcgatcctcccagttcagcctcttgagtagctgggactacaggaacatgcgactatgcccagctaatttaaaacaatttttttgtagggagggtgtctcactctgttgctcaggctggtctcaaactccttgcctcaagccatcctcccaccttggcccctaaagtgctaggattataggcatgagccacctcactgagctgtgatttttattgaggatttcctttctgtttttttctccttaggagcctaaaatgacacgctctaaactgaaggaagtagtggaaaaaggagtggtaagtattctgtttttttgttgttggtttttttttagcttggtgaataggatctaattcacccatagggaaaaatataggaaagattgtggtctgaatttgcctctttaaagaaatatttataaaagacagtagaattgtttctacatgatcataagctatgataatcatagtttattttagtagatatgaagcattgctttttggaattgctagatagataaccatttggaatagttgaaatcaataggtgagaccagtttttctatttatgttacaacacatgttgcaaagtgtttagtatttttcatagtgtgttccaggggccagttgcataaaaatcactttggtgtgggatccctcaggcatgcttattaaaaatgcatacttttggctgggtgtagtggctcatgcctgtaatcccagcactttgggaggccgaggcagatggatcacttgaagtcaggagttcgagaccagcctggccaacatagtgaaactctgtctctactaaaaatacaaaaattagctgggtgtggtggtgtgcgcctataatcccagctgcttgggaggctgaggcacaagaatcacttgaacccgggggcggaggttgcagtgagtggagattgcaccactgcactacagcctgggcaacggagtgaaactgtctcaaaaaaacaaaaacaaacaaaaaaatctccatacttttgagcccaccccagacctgagaatcaggacccatgggcagggccttggaatatgcattggcaaaaacacaacagttaattcttttgaatactaaagtgttgagaaccacttgaagacatctgaagtattctgtgcagcaagctctttggtgcttggagctgtgctatatccttcttaataagcacttgactagtttgtgcttacaaggcaggtaatagtcatgagggagttcattatatttctgatagtaaggaagatttgccttacagaccgaaaatatgtatcataggttttatctgtcctggttttattccttggagactgatagaagaaacaggtctaggctgggcttggtggctcatgcctgtaatcccagcactttgggaggtggaggtaggaagattgcttgaagccaggagttcaagaccagcctgggcaacgtaatgagaccgagaccttgtctagaaaaaaaagcaagaaaaggaattggtgtattcttccacattacttttcctacagttgaagaaaactagtatgttatttcataacattcttttcttggctatacatcccccaatttctccccccctttttattttgggagtcttgcttcatcgtccaggctggagtgcagtggcacaattctggctcactgcaacctctgcctcccaagctcaagtgattctcctgcctcagcctcctgagtagctgggattacaggtgcgtgccaccatgcccggctaatttttttgtattttttaaaatttttattagagatggggttgcaccatgtttggccagcctggtttcaaactcctgacctcaaatcatctgcccgccttggcctcccaaagtactgggattacaggcatgagccactgtgcctggcctttttgttttgagatggagtctcactctgtcacctaggctggagtgcagtggtgcgatctcagctcactgcaacctctggctcccaggttcaagcgattctcatgcctcagcctgctgagtagctgggattataggcatgcaccaccacacgcatctaatttttgtagttttagtagagatggggtttcaccatgttggccaggctggtttccaattgacccatgtgatcgcccgccttgtcctcccaatgtgctaggattacaggcgtgagccactgtgcccgtcccatatccttttaaaagtatgccaaaagaagactctactgaaccagatatggtttgactagtagttagattatctccacagtgttccagattacatatttctcctaatgtagcctaaggtcaaattgacctttgtttttggcaatcacatcactttttttggtctggttgactaactcttgttgcataaattgaaatttcatctttctctaggatgtgttcacaaatgaataggtggtagctatgatgaaagcagccatcagtgaggaagttctatgaagtctacttgacatatagaatataattaacatggctgggcacggtggctcatgcctgtaatcccagcactttgggaggccgaggcagctggatcacctgaggtcaggagtttgagaccagcctggccaacatggcgaaaccccgtctctactaaaaatacaacagttagctgggcgtgtggtgggcgcctgtaatcccagctacagagacgagaggatcgcttgaactcaggagggagaggttgcagtgagcggagaccatgccactgcactccagcctgggtgatagagcaagactctgtcttaaaaaaaaaaaagaatataattaacattaattctttatttgatttggggaaaaaaaatccaaggagatcaaattaggctctgaattatgtttattggccatgaatatagatgtggagaagttgggccatccaagacggtatagtttacgtaggagagcaagtattaaaatgtaggtctcttgcttcttaattctttctttttttttttttttttttcagtgacttgctctgttgctcaggctagagtacagtggcctaatcatagctcactgcagccttgaactccttcctgtgctcaagggatcttcctgccttagcctcgcagacagctaggcctataggcatgtgccaccatgtccagctaattggtttttttgaaacattcttttgtagaaatagggtcttaatgtgttgcccaggctgaactcaaactcctgggctcaagtgatccttctgccttgatctcccaacatggggggattacaggcatgagccgctatacttggccttcttaattcttactagactgactccaacacacttctgaatgctggcttgcctttctaatggatttggcagtaggtaggaaagggaaatgggcctgaatcacatcattccctttaccctatattggtcccacctacacagcactagataaatggtcagaacatagcagggctgatttgatttgagaagctaagactccttttagagacagaacctaatggccagttggcttttgttcataaggtgcttttggttgggttacaattaaatggtcaagaaattatacatcctcaatggcattttatcagcagtatataagaactttaaaaaagttctttaggctagatgtggtggctcacacctataatcccagtgctttgagaggctaaggtgggaggattgtttgagcccaggattttgagaccagcctgggaaacctaatgagactccatctctacaaaaaatttaaaaaattagtgaggcctggtgaggaggcatgcctgtagtcctagctaattagtaggctgaggcaggaggatcgcttgagctcaggaatttgaggctgcagtgagctctgattgtgctgctgctctagcctaggcaacagggcaagatcctgtctcaaaacaaaaacaaaaacaagaaaaactttccccctagctcttataaaaattttcaaacattcaaaaagttgaaagattgttacaatgaatctaaattccaagagtaatattttgccatatttgctttatatctctctgtgttgttttttcctgtactattggaaaaataagtgtggacaacatgaaactttgccctaaatgccctggtaaaagcttttttttttttttttttttttaagaaaaaaaaaagcccataggcagagcagggctaccccataggcagaatagtccataaaagcttttcatggctggctttttggagttgtacttatggtggattcatgtaactgattacaaaaatatattgctgttaaaagactactgtaaccaaaatatcttaggtttgtgtagtttaatagtttataaatagttgtcacatctgttgttccatgtaaaccgcagctgtgatatgaacaaggtagacattgttttcttcatttatagaaagaagtgaggcttaccaggtgtaaggcagaaatgctaatgacagtaatagattctttcctggtttcttctttctaactctgacaaataattgagagtataccctcagggataatcaacacctctagatcactgcagttacttgttaagtatatggctgttagtgatggtacagaggaagtaaacatgaaaaacaattatttcagttaagataacttaattatttatattctttgttggtaggtaattccaacatggaatatttcaccaattaagaaggccaatgaaattaaggtaaacttggaagaaataattgttattcttttccagaaagacttcatcggttttgaaacttaagtacttcctctttaacttttcttgatcaatctttgttttaattccagctttgtttttttccattctattactcttaggtttgtatctcatggaattcactttaacctctgcctcgtgttatttgctttagctgtacattatgctcttaggattttttttttttctgccctgcttcttccccttattttccaaatacgtatgatttgtgtttcccattacttcatttctttctaattgtactaatgtagcctcctcagtttgtggatatccaccttgaagaagatgattcctcagatgaagaataccagccggatgatgaagaagaagatgaaactgctgaagaggtcagtgaatgttagttggtaatatttgtcttaatagagcagggtatactttgcttccttagtaatgtcacttgtagagaggattgagacatggttcttttttcagctcatttctgtgctttaagctgtttttctgccctttatactcccttaattttagaatttgttgtattatgaaatacagcatagaaacgtgcatagaataaaaatgtatagctttggttattataatgcaaatcctcatgaaactcatagcaaagtcaagaaatatatcattactaggacaacccctgtataccctccccagtcacaatcacctccctccccctaaaaataaccactaccctgccttttagtaattatttctttgcttttctttatagttgtatcacctcaatatgtatctctacacactgtagttcaattgttactgttttgaactttatataaatggacccatgtttatatgttttgttcctagctttttaaaattcaacattaagcttttgagattcatttatactattggttttagctatacttcgttccctttcattgctgtgttaatatgttctttgacttgtttcttaatgtgttctttgaattgttttgtaaaaggattttagaccaaggccttacactttgtaatgcagattaggatagtgatctgatccctgtccccacctttaggattttttttttgagtctcctctgttgcccatggagtgcagtgtgcgatgttggctcactgccatctccatctcccgggttcaggcaagtctcctgcctcagcctcctgagtagctggaattaacaggcgtgcgctaccatgcctggctaatttttgtatttttagtagagatggggtttcgccatgttggccaggctggtctcggacttctgacctcaagtgatccacccgcctcggccttccaaagtgctgggattacaggcataagacactgactgcacctggcctttaagtttctatttaaattttattttctgttactgtaactagttgagtgatggattttatttatttatttatttatttttgagacagagtctcgctctgccacccaggctggagtgcagtggcgtgatctcggctcactgcaacctccatctcctggattcaagtgatactcctgcctcagcctcccgagtagctgggattacaggtgcacgccaccgcgcctggcttatttttgtatttttagcagagacgggtgttcaccatgttggccaggctgagtgattgatattttatgattccttctcttgagatacttcagactttgtggaatgaggtaggggcataaatattaaggcgaactggatttattttgtagagcttattggaaagtgatgttgaaagcactgcttcatctccacgtggggcaaagaaatccagattgaggcagtcttctgagatgactgaaacagatgaggagagtggcatattatcagaggtaaatcggcatcatacaaaagagatgttagacataactgtctaagtagattttttaactgtataagtagattatttatccatggtgattctgggctgtcaccctttttcaaagtttcttaagttagtaaacagttcagagaaggctagaactcagtgatagccaaagaacttttctgagttctcattaaggggccaaaaatgtgcaactagcagagtttcttttctcctacccttctcttctttcatatctgtgctttttaatattgtcctaaagccattgttattaatttcccacattttggtaaactaagtagcattctgttgacttctctagaaataggatgaaaactaattagatcaatacacttggtgtctttgtttttatgtaactctaactagagaagagaaaggacaatggtgtatggaaagtctgcctctttttccctctctttttttcctttttttgctttctctttctttcttacctccttccttttttgatgcagtcacctcttttaatcaggctgagaaagtcaccacaccagccatcaggcacatcagtgctgaggtagtgcccatggggcccccgccccctccaaagccgaaacagaccagagatagtactttcatggagaagttacatgcggtagatgaggagctggcttccagtccagtctgcatggattctttccaggtaaatattaaaactgtacttaactgagaaagtcaagtggagtaatgtagttgttgctcaggctgggaagggagaggaaaagataactacaattttatataagtaagagttagtctttgatactttgtatttggctagtgctattttctgctcaaagtgacaatggcagtttggggttttttttgtttgtttgtttgtttttgagacagggtatcaccctgtcacccaggcttgagtgcagtggtgtgatcttggcccactgcaacctccgcctcccagactcaagtgatcttcccacctcagcctcccgaataggtgggacaggtatatgccaccacacctggctaatattttagttttttgtagagatgaggtctccctatatttttgctcaggctggtattgaactcctgggctcaagtgatcctcccaccttagcctctcaaagtggtaggactactggtgtgaaccaccgtgcctggctgagaatggcagtttctaaggaagaaatgaactatgtagcagagagcattttaaaatgtagaacataggaaaaagcttcacccaaattcccccaaattaaccttttaccacaattgcttgatggttctcttcctctttctctgtatatacacatagtgttttctaaatcattttagagtgtgatgcaggcatgatgccattttacctctgcatgcttttgtgtatattttctaaaaatgagtttattatcttgtattaacacagtataatagtgttaatcaaaatcaggatacaggctgtgcgctgtggctcatgcctgtaatcctagcactttgagaggccaaggttggtggatcacttgaggtcaggagttcgagaccagcctggccaacatggtgaaacccccatctcgactgaaaatacaaaaatttgccaggtgtcgtggcgcatgcctgtaatcccagctacttgggaagctgaggcaggagaatcgcttgaacccgggaggcagaggttgcagtgagctgagattgcgccactgcactccagcctgggcaatggagagagactctgtcccaaaaaaaaaaaaaaatcaggatacagtaatattacataatatattaaagtgcttattctggttttatctgttgtcccaacaatgccctttatgttggaggaaaaaaatttttttttccctattcagcattcaaccctggattaaatatctatttaattatcttgttctttagtctcctttaatctggaacagtttctcagtctttgtcttttataaccttgacagttttgaggagtatgcaccatttattttgtagaatgttcttcaatttttatttttctaatatttcctcttagattcaggttttgcacttttgttacaaatactggaagagtgatgtgtgtttctcattgcatcatatcagaaggcacgtgatccctgtaatgttaactttcatcacttggttaaggtggtgtgtgcttggttttcccattgtaaagttattattttccatttttaattagtatatatcatgtggggatatacttcaaagccgaattcctttctttctgtttttttttcctagatggagtctcactctcttgcccaggctggagtgcagtggcgcgacctcagctcactgcacctctgcttcctgggttcaagtgattctcctgcgttagcctcctgagtagctgggattacaggtgcccaccaccacgcctggctaatttttgtattttttagtagaaatggagtttcactgtgttagccaggatgatcttgatctcctgacccgcctcagcctcccaaagtgctgagatgacatgcgtcagccaccgcgcccagccttctttttttttttttttttttttttttgagacagagtcttgcctgtctcccaggctggagtgcagtggtgccatcttgggtcactgcaacctccacttcggggttcaagcgattctcctgcctcagcctcctgagtagctgggattacaggtgactgacaccacacccagctaattttttgtatttttagtagagatggggtttcaccacattggccaggctggtctcgaactcctgacctcaagtgatctgcccaccttagcctcccagagtgctgggattacagacgtgagccaatgcacccagcccaatcaatcaaattatttttctcacactaatattagcatccattgattattctttcttttttttttttttttttttttttttgagacggagtcttgctctgtcctctaggctggagtgcagtggtgcgatctcggctcactgcaagctccgcctcccaggttcacatcattctactgcctcagcctcccgagtagctgggactacaggcgcccgcaccatgcgcggctaattttttgtatttttagtagagatgggggtttcaccgtgttagccaggatggtcttgatctcctgacctcatgatccacttgcctcggcctcccaaaatgctgggattacgggcgtgaaccaccacgcttggcctgattttctttcttgaaacagtctttactatggtcgttgtcaaatgatgactttgtaattctaacatttagtgagtaattttttattttttggatatggagtcacagtctgtcacgcaggctggagttcggtggtgtgatctcagctgactgcaacatctgatctgcctcccgggttcaagcagttctcgtgcctcagcctcctgagtagctgggaccagaggcacacaccactacgccagctaattttttgtattttttagtagagacagggttttattgttggccaggctggttttgaactggccttaggtgatccacccttgtcaacctcctaagtgctgggattataggcatgagccactgcgcctggccttagccagtaaattttttttttttttttttgagacggagtctcactctgtcgcccaggctggagtgtgatggcgtgatctcggctcactgcaagctctgcctcccaggttcatgtcattctactgcctcagcctcccgagtagctgggactacaggcgtgcacaccatgcccggctaattttttgtattttttggtagagacggggtttcactgtgttagccaggatggtctcgatctcctgacctcatgatccgcctgccttggcctcccaaagtgctaggattacaggcgtgagccaccatgcctggccttagccagtaaattttaatgttccaagtttcccctatcattcttgcaggtcaatgaaaaatgtctgtcctaaaattttaaagtatgatataataatttaaaaagaaatcctaaaattaaaaaatataattaaggctgggtgtggtggctcacacctgtaatcccagcactttgagaggcccaggcgggtggatcacccgaggtcaggtttgagaccagcctggtcaacatggtgaaaccccgtctccactaaaaatacaaaaattagctgggcattgtggcaagtgcctgtaatcccagctactcgggaggctgcggcacgaaaatcgctttaacccaggaagcggaggttgcagtgagccgagatggcgccagtgcactccagcctgggtgacagagcaagactacatttcaaaaatatatatatatatataattatatatatatataatttataattatatatgtatataatttataattatatatgtatataatttataattatatatgtatataatttataattatatatatgtatataatttataattatatataagtatataatttataattatatataagtatataatttataattatatataagtatataatttataattatatataagtatataatttataattatatataagtatataatttataagtatatataagtatataatttataagtatatataagtatataatttataagtatatataagtatataatttataagtatatataagtatataatttataagtatatataagtatataatttataagtatatataagtatataatttataagtatatataagtatataatttataagtatatataagtatataatttataagtatataatttataattatatataagtatataattaaaaatagaatattgaatggaatagctctgagtcatttaatcaccatgctttggagtatgtagtagtaggagcagtaatagttttttatgtaatcatttatttaccaaacacatactgaatggttgaagttgagaaacaacagtgtagaagacagaaaaaattgttcttcatggaacttagtctgttgaggagagatagactataaacatataaacaagtaaattcggatgtggttaagtgctatgaactaaattaaaatgaggaaatatgaaacttcctgtcagagaactttagataggctgatcaaaaaagacctccttggctgtaattccatcactttgggagtcctaggctagaagattgcttgaggctaggagtttgagaccagcctaggcaatatagtgagactccatctctccaaaaactcagaaaaattatataggtgtggtggcgcatgcctgtattcttagctgcttggtggctgaagcaggaggattgattaagcctgggagcttgagactacagtgagccatgactgcacccctatactccagcatgggtaatagtatgagaacttttttaaaaaaaattttaaaaaacagggtccggtttggtggcttatgtccataatcccaacactttaggaggccaaggagagtggatcacttgagcccaggaggtcaagacaagcctgggtaacctagtgagaccttgtccctaccaaaaaaaacacaaaacttagctgggcatcctgttacacacctgtagcctcagctacttgggaggctgagcctaggagatcgaggctgcagtgagctgtgatcatgctacagcactctagcctgggccacagagcaagactgtcaaaaaaacaaaaaacaaaaagaaaaaaggcctctttgaggagatggcatttaaactgagatccgaatgagaggaagccaggcatgtaaaagatctggggagaaaaagtgctccatatggaagaaacagcacattctaagtcgctaagatagaaacaaccttggcatggttaaggaacagaaactacatgaagggtgggatcgtgaaaaagaggtagaaatgaggtcagagagcaaggcaagagctagatcatgaaggtcttaggaaaccatgataaggggtgtagattttattttaaacattagaacagatgcccagtgtggtggctcatgcctgtaatcccagcactttgggaggccgaggcgggtggatcacctgaggtcaggagttctagaccagcctggccaacatggtaaaaccccatctctaacaaaaaatacaaaaaatgtcctgggtgtggtggcgcacacctgtaatcccagttacttaggaggctgaggcaggagaatcgcttgaatgtggggagtggaggttgcagtgagctgagatcatgcccctgcactccagtctaggaaagagtgagactccatctcaaaaaaaaaaaaaaataaataaataagaaaagatttttgtgatatttttggattaatgttaaaaattccttttggttaacgtgtgggaaatggactagagtaaagcaagagggtaaacagaaacccattagcaggttgatgcagtgtagtctagggagagcttcccaaattgatctacagattcaatgcagtccctatccaaatcccagctaccatttttgtggaaattaacagtctaatcctaaaattcatgtggaattgcacaggcccagaatagccaaaacagtctttaaaaagtacaaagatggaggtctcacactttctgattttcttttttttttttttttttttttgagacggagtctggctctgtcacccagactggagtgcagtagtgcgatctcggctcactgcaagctctgcctcccgggttcatgccattgtcctgcctcagcctcctgagtagctgggactacaggcgcctgccaccatgcccagctaattttttgtattttttatagagacggggtttcactgttagccaggaagttcttgatcttctgacctcgtgatccgcccaccttgtcctcccaaagtctgggattacaggtgtgagccactgcacccagcctcatttttttaaaataaatattttaaataagagtcttgctctgttgcccaggctggagtgcagtggtatgatctcagcttgctgcagcctcaacctcctcctgtgttcaagtgatcctcccacgttggctcttgcatagctggaactacaggcatatgccaccactcccatctaactttttattttttgtagagatgggggtcttgctgtgttgcccagctggtcttgaactcctagactcaagcgatcttgtcaccacagcctatcaaggtgctgggtttacagatgtacaaatgtgagcctctgtgcctggccctgttttttttttttttttgagatgtctctcttgcttaggttggagtacaatggtgcaatcatggctcactacagccttgatctcctagtctcaagagatccttctctttcagcctcctaagtagctgggactacaattggtgccaccacacgcaactaatttgtttgtttgtggcagagatgaggtctcactgtgttacccaggctggtctcaaactcctagcttcaagcagttcttcctgggcctcccacagtgttgggattgcaggtgtgagccaatgcattcagccagcggtattatacttaattgccccacagtggaaacaatctgaattccatcaacagataattggataaacaaaagtggtatatctatacaatgggatattattgggtgaaaaaaggaattcggggccaggcatggtgactggagtgcagtggtacgtgtctcactgtcaccttgaactcctaaacccaagcaattctcctgactcagcctcttgagtagctggtaccacaggcacataccaccatgcctttaatcccagcagttaggaaggccaaggcaggaggattacttgagcccagtccaggagtttgaaacttgcctgggcaacatagggagtccccccacccccatctctacaaaaaatgaaaaaaattagctgagtatggatccagtggctcacacgtgtaatcccaacactttgggaggctgagcaggtaggtcacctgaggtcaggaattcaagacaagcctggccaaccccatttctactaaaaatacaaaaatttgccaggtgtggtggcacacgcctgtagtcccaactatttgggaggctgaggcaggagaatcacccgaacccgggagatggaggttgcagtgatccgagatcgtaccactgcactccagaatgggtgacagagcaagactccatctaaaaaaaaaaaaaaaaattagccgagcatggtagagcatgccgatagtcccagctacttgggaggctgaggcaggagaattgcttgagcccaggagttcgaagctgcagtcagctctgattgtgccagtgctgtagcctgggtgagagattgagactctatctcttaaaaaaaaaaaaaaaaacaccaggcatggtggctcacagctgtaatccgaacactttgggaggctgaggtgggcagatacctgaggtcaggacttcgagaccagcgtgcccaacatggtgaagctccgtttctagtaaaaatacaaaaattagtcagatgtcgtggctggtgcctgtaatcccagctccctgggaggctgaggcaggagaatcacttgaacccaagaggcagaggttgcagtgagccgagatggcaccactgcattctagcctgggcaacaaagcaagactatgtctcaaaaaaaaaaaaaaagtattgatagatattacaacagggtgggatttaaatgcattatgctaactgaaagcggccagagacaggccacacattttatgattccatctaagtgaaatgtccagcagaaacaaatccatagagacagaaaatagattaatgcttaacaggggctgggaggagggggaaagggaagcgactactaatgggtatgggatttctttttgggttaatggaatgttctgaaattagataatggtgatggttgtataactctgtgaatatatgaaaatcctttcaattatacactttaaaagggtaaattttatggtatgtgaattgtatatcaataaagctgttataaattttcctaaaatgttggtttcaaactgatgtcatttattttatttcttttttatgtcgtgtttcttaaagtttctcaaacaataataaatccaaattgtttagaggaaggatcctgttacttaagctaagatgagaagaaaaggagtgatgatgaggtttggaaacatcactcactcagtgacttttctttctccattgtccagcccatggatgacagtctcattgcatttcgaacgcgttctaagatgcccctgaaagatgttcccctgggccaattagaggcagagctccaagctccagacatcactccagatatgtatgaccccaatacggcagatgatgaggactggaagatgtggctggggggacttatgaatgatgatgtggggaatgaaggtaagttttggtttgtgatttattatgtatactgtccattatctgttgtaaaatttttagtatttggaagggtatagaatggaatggtttgggttaattgatttaatttgtatttaactgataatttatcttaaatcagtagttaatttttctttttttttttttcctgagacagggtctcactctgtcacccaggctgagtgcagtgttgcagtcacggttcattgcagccttgacctcctgggctcaagcaatcctaccccttatcccactgagtagctgggactacaggcacatgccactgtgcccgactaattttttattttttgtagaaacgagatgtcactatgttgcccaggctgttcccaaactcctggcctcaaacaatcctcctaccttggcctcctgaatgctagaattataggcatgagccaccgtgcctgggccaattcttaacatttctttttctgggtaaggaatcttttgaatcctaagattgttgaatgctaagatttgaatcccttgaaacatacatgcacatgtagttttgttgttgtcttttgtttttgagacactgtcccaaaacagggtgttgcccagggtggatcacagtggggtgatcatagctcactgtagccttaaactcctgggctcaagagatcgtcctcaggtctcagcctcccaagtagctgagattataggcacgcaccaccttgcctggctaattttttaaaaatttctgtagagaaatgttgctcaggctggtcttaaactcctgcctcaagtgatcctcccaccttggcctcccagagagctaggattacaggcatgagccactgtgcctggcccactcaaaattttatgtatgatttcattagggttcagtgatttaccaaaagaacactgtgttagttaagggtcttcatgatgcaagtgaaagaatcctaactctatcttgctggggtgaaatgaaaccagactttgggaagtgtagtaaatcagcagtggaactgaggcactgttaggatccccctttcctctctattttacttccttttgtcactcagctccattctcacatttatttttctacaaggttagagctctgttcataaacactccgtgattactttttgctttgtctacacttcaggactctcccctgcaagctccagttataaaatccaggggaacaagtcagatcgacttggtttgatctcatgcccagtctcttggtactacatgggattgatagggagactgttcagcatggagtctggtgattgatagcacctcatagaacagtgtggttgaagtatgtggtgaccctaaagaagtaatggtattatcagaaatggggaagaaatattgatcagataaaagtttggatggaaacagactaagtaggctgggcgtggtggctcacacctattatcccagctctttgggaggccgaggcgggcggatcacaaggtcaagagattgagaccatcctggccaacagggtgaaaccctgtctctactaaaaataaaaaaatttgctgggcgtggtggtgcacgcctgtagtcccagctactcaggaggctgaggcaggagaatcacttgaacctggcaggcgaaggttgtagcgagccgagattgcgccactgcgctccagcctggcaacagagcgagactccatctcaaaaaaaaaaaaaaaagaaaaagaaatagactgagtaaatggctgggtaggtaatgctaggagtaagtcaggataagtgaatgaaagaaaataacaggtccttgaatgtaccttatgatactattaatagttatatagtatatcatttggcaaatgtttgagtactttctttatacaaggcattgtgctagaatctgtgagggataaaggagcataatcatttggtcatggaataaaagctttatgaatgacagggtgcctggcccattgttaggttcacaatacattgtacttttttgtgtgtgtgtgagacagggtctcactctgtcacccaggctggagtgcagtggtgagatcttagctcactgcagccttgacctccttggcgcaagcaattctcccacctcagccttctaaatagctgggaatacaggtttgtgccatcatgcccggccaatttttgtattttttgtagagttggggttttgccatgttgcccaggctggtctcgaactcctgcgctcaagcgatcctcctgcctctgctttccaaagtgctgagattacaggagtgagccatcgcgctcagccagtatattgtaaatgaatgaagttgttgaataaactcagatatgccatcaaagtggcataaatgctgttgtaagattttagaagaggacagggtaacttttgtttaggatgatcagagacagctacatgaaagagctggtaattgaaatggaccttggaaagatttttgaaaacagtgacagggaagagagaaggcatctgagtagaagtgacatgatatactctatatgctggattctgtaggatatattctttccagagttttctcttttttcactgtaaaactgtaagagtaatatatgcttggtataaagaaatcaaatattacagaaataaaacaattaaagccttccccccccccaaggaaaatgtacatatctacatacatgaaatttttcatatgatttttttggggtttatgtatctcttagagtttatttattggcacttcattttcctaccagtcatttccaaagcctttgacaccaaggttcaagtttggttccccagagggactactgataatactttggtatgcatctgtgagagttttcaatgtgtagttactttttagttttccacattaatgtggggataaaaataattaaattttagtcctaaatttaaatttaagacttttctcaaacatttagaaaagatagtccaggcgtggtggctcatgcctgtaatcccagtactatgggaagccaaggcatgaggattgcttgaggccaggaagtcaagaccagcctgggaaacacagtgagacctcatttctattttttttttcttcgacagagtctcgctctgtcgcccagactggagtgcagtggtgtgatctcggctcactgcaacctctgcctactgggttcaagcgattctcctgtctcagcctccccagtagttgggattacatgcgcctgccaccttgcctggctaatctttgtatttttagtagagacagggtttcaccatattggtcagactggtctcaaactcctgacctcaggtgatccaccctccttggcctcccaaaatgctgggattacaggcatgagccaccgcacctggcatttctatttttaaaataaaataaaattttaaaaaagagagagaaaataacaagaagcaaattgttttaaatcttatcatatttcttttttttacccaccctctgtagtagaggggctaacaagccacaaaatgaaaaaaattgtgtaaggagaaaaagatggagtttgaagctgagtcattaacatgcaaagtatagaatcagttccttcataattagcaactgatatattatcccattagtcattctgataggagtctaagcttctgagttttccattactcacccctttgacaatctgatgaaaactatgcagccttcccccagaaaaaaatgtacatatccaaatacatgaaatttttatatgatttttgggagatacatatcttttaaagtttattgacacttcctgtttctaccaggttcagaaatctccacaaaaaggaatagacaggacagagagttctttttttttttttttttttttttgagcagcagcaagatttattgtgaagagttaaagaacaaagtttccacaacgtggtaggggacccgagtgggttgcccaaggacagatagttctaaccactttgtaggcagtgaaatctcagagaaattcattgtcttgctcaaagttacagaatcaatttgttatactcctaggagtagaacccagtttaatattctaggaacatgtctcaatcagacaggtttcacggtaagttaaacctttttttttttttttttttttctgagacagagtctggctctgttgcccaagctagagtgcagtggcacaatccctgctcactgcaacctccacccgggttcaagcgactcttctgcctcagcctccagagtagctgggactacaggtacgcgctaccatgcccagctaatttttgtgtttttagtagagatggggtttcaccatattggccaggcttgtctcgaactcctgaccttctgttccactcgcctcagcctcccaaagtgctgggattacaggcttgagccaccgcacctggcctaaaccatttttttttgagagagtttcactcttgtcccccaggctggagtgcagtggcgcgatctcggctcaccgcaacctccgcctctcaggttcaagcgattctcctgtctcagcctcccaagtagctgggtttacaggcatgtgccaccatgcctggctaattttgtatttttagtagagtcagggtttcaccatgttggtcaggctgttcttaaactcctgatctcaagtggtccacccaccttggcctcccaaagtgctgggattacaggtgtgagccaccacgcccggcctaaaccattttttaaaagtatatgacttttcataatgagctgtgttttttgttttgttttgttttgttttgtttttgagatggagttttgctcttgttgcccaggctggagtgcaatggcacgatctcagctcaccgcaacctctgcctcccaggttcaagcgattttcctgcctcagcctcccaagtaactggattacaggcatgtgccaccacgcctggctaattttgtatttttagtagagatggggtttctccatgttggtcacgctggtctcgaacttccaacctcaggtgatccgccctcctcggcctcccaaagttctgggactacaggcatgagccactgctcctagccttcataataagctgtgctttttatctttggcacaggctaatacaaaataattacagtaagaaagtcaggttctcctagcgttattggtagcagcagctttggtgctcattttcatcactttggttcaaaggcctaagatggtagctattgggaaggaaaggccaggcagaactgactttcaggattttgtttctcataatttggttccgagaacttgaatcagaattgaagagtgtatggatatgtagggtgatgtttattaaagatacagatttcagggcttcaccccttacctactgaatcagaatctaatgagtatggtctagggatctaattctgatatatctaaaggattggaaactactggtctgggaaaggtaagagtgcatgataaaggttgattggggaattggactaatggttagggggagggtgaaaatcctcttttcttaaaataaaacttcagtttgttttgttttgttttgagacagggtctcactcttgtcacccaggctggagtacaatggtgtgatcttggctcactgccacctccacctctcaggttcaagcacttcttctgcctccacctccctagtagctaggattacaggcacatgccaccatacccagctaattttgtatttttagtagagacggggtttcaccatattggtcaggctggtcttgaactcctaacctcaggtgatccgcccgccttggcctcctaaagtgctgggattacaggcgtgagccaccacgcccagcaacttcagtatttttgtatgtgcctattcggacagatttttaaaagagcacacaaagccaatgattaggatgggtgtggcctccagatctaccagttgagttaaaagacaatacaggaggggtatatcagctgggtaaatactgacattgttaataagtcaaaaaagtgattaagctcagaggacatattccacaatcagggtactaaaagctaagcagaactcagaagaatccccctaaatgatttttcagcatctttgttaaatgagtgctctgagaataatattcgctgacccatttgtgtggtgtgggcagaactatctattgcagttcttgcatccaaacagatggagtccaaacctgtgcacactactcattattatgggctcttccagaactttcgttattcagcaatgtttgttaagaactttttgatcaggcgcagtgtctctcacacttctaatccctgcgctttgggaggctgaggcaggcagatcatgaggtcgggagatcgagaccatcctggctaacacagtgaaaccccgtctctactaaaaaaaaaaaaaaaaaaaaaaaattagcctgacgtggtggcgggtgcctgtagtcccagctacttgggaggctgaggcaggagaatggcgtgaacccgggaggcagagcttgcagcgagccgagatcgcccctctgtgctccagcctgggcgacagagtgagactccatctcaaaaaaaaaaaaaaaaaaagaacttgctgtgaagagacttatatagaaagtactatagagattatgaattatgaagacagtattctattcctaaagaaataaagaatctgtactgataagttaaacccacaaatagatgaaaaagatttgataattagttatgtgtaaagaatgcaaattaatatattataagctgagtataaatgttgagtaaagaattatcaagttagattagggtttaatcagcacagatttttcagtgattgtgaattttaaatgtgtgtctgtataagtatatatatatttatatatatttatatttatataaaaaatatatatttgtttttgagacagggtctcactctgtcaccctcgctggagtgcagtggcgtgatcatgactcactgcagcctcaaactcctgggctcaagcagtccttccagctcagccttctgagtagctgggactataggcacacaccacgacacttggctaatttttaaaaagtcatttgtagagattggttcccactgtgttgcccaggatatatatatgtgtttttttttttttttcttgttagatggagtctcactctcgcccaggctggagtgcagtggcatgatcccagctcactgcaacctctgtctcctgggttcaagtgattctcctgcctcagcctcccaagtagctggaattacaggcacgcaccattactcttggctaatttttgtatttttggtagagacgggagggggggggtctcaccatgttggccaggctggtctcgaacccctgacctcaagtgatcttcccacctcggcctcccaaagttctgggattacaggcgtgagccaccatgcttggccccaggctgtatatgtctgtttataacaaaagatgtttatttatggccaggcacggtatccagtctgggcaacaagagcgaaactccctctcgaaaaaaaaaaaagatgctcatttattatgaaaagttaaaacattatggaagaggcgccagactctgtggctcacgcctgtaatcccagcactttttaggggccgaggcaggtggatcacctgaggtcaggagtttgagaccagcctgaccaacatggtgaaacgccgtctctactaaaaatataaaaattagctgggcatggtggtgcacatctgtagtcccagctactcgggatgctgaggcaggagaatcgcttgaacccagcaggtggaggttgcagtgagctgagatcgagccactgcactccagcctgggcgacagagcgagactccaccttaaaaaaagaaagaaaaaaaaaatattgtgggagggtacacagagaaatctttgttaatagttttatgtgtttctttctagatactctgtgggtgttcagtcaagcatgtatttatctcaaacaagaatttttttccacaaaaagaatcatactatacatattggtcttcatctgcaacttgcttctttcacttagcagtataacatatatttttccattataatacatagagatcacctcttctatttaatggatacatgatagtaagaaatttaggtattctctttttggtctttttttttttaaatcagttcctcagtcacactagctgcatttctcaagtcacatgtggctaatggctactgtatgatacaatacaatacatgtatagatcatttccatcatcacagaaagttctgttagacaacactgatctaaaattatctggagaaaaatattaccttaatatataataattccataatttaatgactccttcataatttttacttagtaattgaaaagacagtttagcattaacattaaagaaaattaggctgggccctgtggttcactcctgtaatcctagcactttcggaggccaatgcaggcggatcacctgaggtcaggagttcgagaccagcttggccaacatggtgaaaccttgtctctactaaaaatagaaaaattagccgggcgtggtggtgggcatctgtaatctcagttacttggtaggctgaggcaggagaattgcttgaagctgggaggcagagtttgcagtgagccaagatcatgccactgcactccaacctgggtgacaaagtgagactccatgtcaaaaaaaaaaaagaaaaaagaaaattaaaagggagaagaacatccatatttctattattctaacctaacaaatgtttattatttttgtatatttttagttatttatgattcttattgtaaggatataatttttcatgcttatgattattatgtatatattgtacttttgtcatacatgtattgaacttttatagaatggttacatattcacattttatatgtgtacgtgttgagtatccccttcatccaaaatgctcaggaccggaagtattttggatttcagattttttcagatattagaatatatgtattattatacttaacagataagcatactaaatttgaaaatttgaaatctgggcagggtgcaatggctcacactgtaatctcagcactttgggaggccgaggcattcagatcgcttgagcccaggagttcaagaccagtctgggcaacataccaaaaccctgtctctactaaaaatacaaaaattagttgggcatggtggcatgtgcctaatcccagctacttgggaggctgaggtgtgacaatcgcctgatcctgggcagtcaaggctgcagtgagccatgatcgtgccactgcacttcagcctgggtgacagagtgagaccctgtctcaaaaaaaaggaaaaagaaaatttgaaatctgaaatgctccaatggctattccctttgagagtcatgtttgcactcacagagtttcagattttggagttttggatttggaatgctcaacctgtactattttatactaagaaattataattatatagtcattctctaattgttgggaatttgggccactccttttttcactgtcagcttcactgtacaagtagcttttacagaaagtattattttcatggaatatactacacaaaattagctgggtgtggtggcgtatgcctgtggtcccagctactcaggaggctaaggtgggaggatcacttgagcccgggaggtggaggttgcagtgagctgaggctgtaccactgcactccagcctgggcgacagagtgagaccctgtctcaaaaaaataaagaataaatgtgctttattggaacagattcttagaagtttgagaacagagttaatgagcatctgaaacacttttttttcctagatgaagcagatgatgatgatgatccagaatataatttcctggaagacctcgatgaaccagacacagaggatttccggactgaccgggcagtgagaatcaccagtgagtctgtgtttattctaagtcctgctcttgactgctttgcagctgtctttgtttactttgtagatttttaggggtgaagtttgcagctcatccatgttaagacatttaggtttcctttacccatttattgatctgattctttaaatttaggtacatattcagaaagcccatcagttattcatttgtatatcccacagtcgtgtattcagtccttactgtttggcagggattgtgcaagatgaataagacatggcatctgtgctgtaggagttcagcctagtagggtgatagaaacagaaaaagttacaatacaaagtgataaatgctgtaacaggttttacataaggtataataatgacctaaaagagagtgtcatctcctagtgtatgatatggactaggataggagaacttaggaaagaatttgcagaatgaaatggctttttatcttagttttgaaggaggaataagaaatttggtgaatagggacagagaggaatattgcaaatagaagagcatctgcaaaccacagaattgtaaaacatcaaaaaagtatgtttggaaaatactaagtactttggtggtggtgtatgagtgaaaagacagagaagtggtagataagattaggtagtgtttacatcatggaggatttttaagctctcaaaatgaggtttaagggcgggcatggtggctcacgcctgtaatcccagcactttgggaggtggaggcaggcagatcacctgaggttaggagttcaagaccagcctggccaacatggcgaaaccctgtctctactaaaaatacaaaaattagccaggcgtggtagtaggcacctgtaatcccagctactccggaggctgaggcagaaaaattgcttgaactcaggcgggagaggttgcagtgagccgagatcacgccaatgcactccagcctgggcgacagagcaaggctccgcctgaaaaaaaaaagaggtttaagcagtaaatcagtaggaactgatttggattttagaaagatcactttgatttaataccagtttaatgtattaatttgttaggtaaagtgaacaagactggaggtatggaaaacaattatgataacttagcttgagttatttctataaaaaattatatcattgagctaggagtggtggcttacacctgtaatcccagcactttgggaggctggggcaggaagattgcttgagcttaggagttcgagaccggcataggcaacatagagaaactttgtctgtactaaaaatttaagaaattagcctaatgtattggcacgtacctgtagtcctagctactcaggaggctgaggcaggaggattgcttcagcccaggaggtcaaggattcagcaaactatgatagtgccactgcactccagccttggtggcagagggagatcctgactcaaaaaaaaattatatcattggctagtgtgtcaagcatagaaaacatacatttcatcctgaagaaattctacctatggggagaaagaaaaataaaaaatatatttcataagccattgatttttattgcatgtatgcatgaccctgtactggaataatatacacgacatggagaaggtaagatgctggctcttgaccaggttatgcagagagctttataaacatccaagatatacctaattaatgcagttctttgtgtaaagagaattatgtaaatacaatcctttagaacttacattttattttattgctttattgtgcctttcaccttgcttttaagattagaataccatttcctttgtgaagatctttcatttattttgatatactatgacagggatagtggaagcattgaaaggaaagcaccaggaattagagaaaatgtagaatgaaaaggtttgaggatttaggctttgagaaaactgaaaggagaatctaggaaggtacaagaaaaacctagaaaatctagtgtcgtagaaaccaaaggaagagtcttttggctggggcacagtggctcatggctataatcccggcacttgggaggctgaggcagaggcagaaggatcgcatgagcccaggagttcaagaccagcctgggcaagatagtgagacattgtctctacaaaaacattttaaaaataaaatgaaaattagttgtcgtggtgcatgcccgtagtcccagctacttgggaagctgaggtgggaggatcacttgagcccaggaggtggaggctgtagcgagcagagatcccaacactgtactccagcctgggtcagagcaagaccctgtttcaaaaaaagagtctttcaagaaggacagaatggtcaacagtaaagaaacaagtaaagaaacatctgcttaaagcacaaaagcagatcttaagttcagctatcatcctggaatatatttgccttccctttttgattgttactttcttcagtttacgtataatttctcagggagatcctccttcgttaggattgatcttcttgctttgcattcccgtaccactctttttgtccttttatatactgatcacctcataattgcttatttaatatctgtcttctcccctagactgtgaacttctcaagagctttgttttgtttattgctgtaaagctggtggcaatatttgccagtcgaatagagatgggtaaatgaagggcagtctttctagtcatacagttctgtaatgatagtgaaagctggagtagaatttttaatttttttttctgcctcttgtcctcttgtgtctcattgtcatatttgattataatctctttaaaaggacttatccttatatggataactaaaataaaaaaattaaaaagcatagaatcacagagtttgaaaagctccatgtggtcacatgttttttgcccgcttgagaatttgtttacacctcctctgaggtggcctttttagtcctgtttgtataccttcagtgacagggagctcaacaattctgcagatagtgtattgtaaacttgaacacctcctcaattaatactttccttattgaacccaaatctgaatgcaaattcagatactttccttattgaacccaaatttgaatgcaaagcaggaagatcaatccttttatattcctcctatttgtctttatgttatgttatgttatgtgatgttatgttatgttatgttatgttatgttatgttatgttatgttatgttatttttgagatggagtttcgctgttgtcgcccaggctggagtgcaatggtgcaatctcagctcactgcaaactctgcctcctgggttcaagcgattctcctgcctcagcctccagaatagctgggattacaggtgcccgccaccacgcccagctaatttttgtatttttagtagagacggggtttcaccaggttggccaggctggtcttgaactcttgacctcaggtgatccacctgcctcggcttcccaaagtgttgggattacagtcatgagccgcactgtgcccggcctcctatttgtcttttgttgttaagaaaaaaaaaagcaatttattcccaagtgtacatattaaaagatgtttcttaagtttttttttttttttccctatgcaaaacataggaaagtttcaagtttcttctgccaggtttcttcttctccaaagccttggtgtccagacctctcaccatgcacattactcttctctggattctagcatttattttctttaaacttttcccctgttacatcttattatgaaatttaaaaatatatatagaaaaattgaaaaattatacagctaacattcatatactcaccacctacttttttttgagacgaagtctcactcttgttccccaggctagagtgcaatggtgtgatctcggctcactgcagcctccgcctcccaggttcaagcggttctcctgcctcagcctcctgagtagctgggattacaggcgcctgccaccatgcccggctactttttgtatttttagtagagaagaggtttcaccatgttggccaggctcatctcgaactcctgacctcaggtgatctgcccgcctcagcctcccaaagtgctgggattacaagcgcgagccactgcgcccagcctcaccacctactttctatagtttgttggtttttttttgagaaggagtctcgctctgtctccaggctggagtgccgtggcgccatctcagctcactgcaacctccgactccctggttcaagtgaatctcctgcctcagcctcccgagtagctgggattatagtcacgcgccaccatgcccagctaatttttgtatttttagtagagacagggtttcaccatgttggccaggatggtctcgatctcctgaccttgtgatccgcccacctcggcctcccaaagtgctgggattacaggcgtgagccactgtgcccggccaaactttcagtagtgttaatataaactgtgcgcctttcatatgtgcgggtttcacagctgcagattcaaccaaccttgaaaatattctgagaaaaaaaaatgcaacagcaaaaaataatactaactgggcgtagtggctaacatctgtaatcccagcactttgggaggctgaggcaggaggatcgcttgagcacaggagtttgagatcggctgggcgacatactgagattccatctctacaaaaaactttaaaattatctgggtgcagccgggcatggtggctcacgcctgtaatcccagcactttgggaggccagggtgggcagatcacgaggtcaggagttcgagaccagcctggccaatatggtgaaaccccatctctactataaatacaaaaattagccgggtgtggtggctcacgcctgtagtcccagctactaaggaggctgaggcaggagaatcgcttgaacctgggaggcggaggctgcagtgagccgagatcgcgccactgcactctagccagggcaacagagtgagacgctgtctcaaaaaaaaaaaattatctgggtgcattggtgtgtgcttgtagtcccagctactctggagacagagtcaggaggatcccttgagcccagaagttcaaggttgcagtgagctgtgatcataccactaccactgcactccagcctgggtgacagagtgagagcttgtctcaaataaataaataaaaaataataaggtataacaagcatttacattgtattaggtgataagtaatctagagataaggtatacaggaggatgtgtgtagattatatgcaaatactacatcatttttatataagggacttgagcatcctcagattttggtatccatggatacgaaatggttccaggagattggctcctggaaccaacctccacagatactgagggatgactttatttgccttatcatgcagctgtccatctccctgtccgtctgtggatgcatcttagttttcaaatgcatttcagagtaaattatacttcacttttttttctttttttttttaaattcagacaaggtctatgttgcatgggttggtcttgaactcttgcggtcaagcgatcttcccacctcagcctcctgaccagctgagattacaagtgtgcacaatggcacctggctatatgtcactttttttttgtatttttagtagagacggggtttcaccatcttggccaggctggtctcgaattcctgacctcgtgatcctcccacctctgcctcccaaagtggtgggtttacaggcatgagcctatacttcacttttaaccacttcagcacgcatataatgaactagagctccatatttgtttatgatttctttttataggtaattttacacacagtgtatcacacacatctcaagtgtaccatttaatgaattttgacatgtgtgtacctatgtgacacaaatccctgtcaggatatagaatcctcaccccaggaagtttcctcatgccccttccaagtcaatccccacaccatcccttcagaggcaaccactgttctgatttttttttttttttttttccgagacggagtctcgctctgtcacccaggctggagtgcagtggtgcggctcactgcaagctccgcctaccaggttcacgccattctcctgcctcagactcccgagtagctgggactacaggtgcctgctaccatgcccggctaattttttgtatttttagtagagacggggtttcaccgtgttagccagggcgatctcgatctcctgaccttgtgatccacctgccctggactcccaaagtgctgggattacaggcgtgagccactgcgcccggctttttttttcttaatcacaggttatgtttgccagttttagaacctcacataaatggaatcatataggatgtgctttgtgtgtaaggcttctttcactcagcataatatttttgagattcatttgtgttgcatgggtcgttagtttgttcccttatattgttgagtagaatttcgttgtgtatatatactacagattatctatttttgtgttgatcacctgggctatttttaattttgggtaacgaataaagctgcgctgaacttttttgtgcaagtctttgtggaaatgcttcatttctctctctctttcatttgttcccacctatgagttagaaaagccgtatttcatttatcttgggtcagctgtataggagacaaatcactgggtcacagggtatgtttagttttataagaaattgccagaccattttccaaagtggctttccattttacattcttatcagagttctggttgctctacatcctcagtaacatttggattttaattttttttgttggctgggcatggtggcgcacacctgtaatcccagcactttgggatactgaggcaggcagatcacttgaggtcaggagttcaagaccagcctgggcaacatggtgaaacaccgtcgctactaaaactacaaaaaattagccaggcgtggtggcgcatgcctgtagtcccagctacttatgaggctgaggcatgagaattgcttgaagccggaaggtggaggttgcagtgagctgagaccgcgccaccgcgctccagcctgggcaacagagtgagactcagtctcaaaaaaataaaataaaaaataattaaattacttaaatgattttgtttttgtttttgttttgtgtttgagacagagtctcactctgtctctcaggctggagtgcagtggtactatctctggtcagcgtagcctctgcctcccgggtttaagagattcttgtgcctcagcctcccaagtagctgggattacaggcatgtgctaccatgactggctaatttatttatttatttatttttgagatggagtcctcgccctgttgcccaggctggagtgcattggtgctgtattggctcagtgcaacctccacctcctgggttcaagtgattctcctgcttcagcctcccgagtagctgggattccaggtgcatgccaccatgcctggctaatttttgtatttttagtagagacggggtttcaccatgttggtcagactggtctcgaactcctgaccgcagatgatctgcctgcctcggcctcctaaagtgctggaattacaggcgtaagccactgcccgtggcctggatcttaatttttttaatgtcctcttaagaagggcctttatagaattgttcacagtcctccagacatagtgttagactctgctctagttcagtgatatgtttgccttgttggttatgagccccgttttggagcaactgtgtcttattgaacttgatatcaaccaaaacttttttttttcctcagattcttgtaacaaccaaaactttcaggtcttgttcacattatttttaagccacgtcaccttttcatgcagttaataaactgatctttaaaactcttgctgggcgcggtagctcacgcctgtaatcccagcattttgggaggctgaggcgggtggatcacgaggtcaggagatcgagaccatggtgaaaccccgtctctactaaaaaatacaaaaaattagccaggcacggtggcaggcgcctgtagtcccagctactcaggaggctgaggcaggagaatggcgtgaacctgggagatggagcttgcagtgagctgagatcgcgccactgcactccagcctgggcgacagagcaagactccgtctcaaaaaaaaaaacgaaaaaactcttaactgtaggactgggcaccgtggctcacacctgtaatcccaacacttagggaggccaaggtgggaggatcgctggagcccaggagtttgagaccagcctgggcaacatagcaacatgctgcctctattaaaaaaaaaaattcttaaacatagaactttaaatttatccgtatatgttgcatccagttgatttgagaaaatataattttgaattttccgtctgttggattggcagtccctttcagctttacatcatctacagatgtgttaggtatgttctctgggtcttctaagtcaccgatggagttcttgaatagttcagatccaaagacagcgtcctgtgaaaccctgctggaaacttgtctttctctctctcttttttttttaagacaatatcttgctctgtcgcccaggctggaatgcagtggcatgatcttggcacactgcagcctctgcctcctggactcaagagatttctctcacctcagcctcttgagtagctgggactgcaggtgtgcgtcaccaagcccagctaaatttttttgtagagatatggtttcaacattttgcccaggctaggagactcatctcttgattccattcagtactgtgtggatttggataggtcatctaattataaaatcatctagctcacattttctcctgtcttcttccttttagaatttaagcttcatgagaatagaactctctctctctatctctctttcattctctcatatatcccaagcatctaaaacatggattgaagcatagtgctcaataaatgtgttttgttgttgttgttgttgttgttgttttttgagacagagtctcgctctgttgcccaggctggagtgcagtggcgcagtcttggctcactgcaagccctgcctcccgggttcacgccattctcctgcctcagcctcccgagtagctgggactacaggcgcccaccaccacggctggctaattttttatatttttaatagagacggggtttcaccatgttagctaggatggtctcaatctcctgactttgtgatccatctgtcttggcctcccaaagtgctgagattacaggcatgagccaccgctcccggcctcaataaatgtttttgaataaatgaatgaaggatagccagtcatggtggctcacacctgtaatcccaccattttgggaggccgagttgggctgatcacttgagctcaggagttcgagaccagcctggtgaaccctcatctctacaaaatatacaaaaattagccaggcatggtggcatgcgtctgtggtcccagctacttggggagctgaggtgggaggagcgattggaccagggaggggatgcggaggttgcagtgagctgagatcgtgccactgcgctccagcctgagtgacatagtgagacccatctcaaaaaaagaaggatagatatgaagaatttgtcatgccttgttgaaaacattatacattgtcttcatggaattcctccttattgtaaaatctaatttataccaacaatatactgtctggctttcttgcagaaaaggaagtaaatgagctgatggaagagctgtttgaaactgtgagtaatgatcctcgagtgagaacacgggattttaagtcagttctccagcaagatgtgtcatttggtctctgtgatgctccctctaggagagggggtctgactgaaccaattctccttttagtctacctgggaaagaatataatgacaagggaattttgctaactactagactcttgattatatacatgtatgttgttcttattaacattttccttgaaacttctttttgtttgagggggttcttgctccatcacccaagccagagtgcagtggtgaaattacagctcacagcagccttgaccttctaggctcaagcagtccttcgtctaagcctcctgagtagctgggacataccaacacacccagctaattattttatttgtagagacagggtcttaccacattgctcaggttgttctggaacttctgggctcaagcaattttcctgccttgggcctcccagtgctggaattataggtgtgagccagcatgcctggcccctggaaaacttttgatgacttcccctactgtcatttggtgtgtccttaaagattgtcaactagttttaaactactttgtgtacaaataattacctttttcataaatttgtttcaaaagatttttcattttaagagattgatcattttgaggctgggtgcagtggctcacgcttgtaatcccagcactttgggaggccacggcaggtggatcatctgaggtcaggagtttgagaccagcctggccaacatgatgaaaccctgtctctattaaaaatacaaaaattaggcatggtggcgggcacctgtagtcacggttactgcagaggctgaggcaggaaaattgcttgaacctgggaggcggaggttgcagtaagcccagattgtgccactgcactccagcctgggcaatagagcaagactgcaagactctgtctcaaaaaaaaaaaaaaaaaaaaaaaaaaaaaaaaaaaaaggagagagagattgataattttgagttatccacgctctgtccttactgttacaagttgactggttgaatgacttctttcttggcataatagccatcccaagtgtgggtttgtgggaatcctgaagtgagaaagttctgacattggctctttctgggtgccagcattattatagtcttgtaatctatagttttcactcttccttcccaatactggagcaacattcagaggcccattccccaggaaaaccctccctttcctttgcccacagttccaagatgagatgggattctccaacatggaagatgatggcccagaagaggaggagtgtgtagctgagcctcgtcctaactttaacacccctcaagctctacggtaggctagttgaagaccttgagatttggaatagaggaaaagtttatttctgaaaaggttttcagaagttgcaattgataatttttcatcccaaaccagcttctgttactgatgtaaggatgcagagccctgtcaggagttaggtgtcaagtgaagtctccttgttatggggcagtgcagctgtaggccaagctatatccgtttgggaagggagaaaaaacagtagctggcatccatatccacttctccgggtgagtggtgctggagaggtatgtaggactcaatgtggccagccacacaaactaccccatattgtaatatcctgtctgtcccttttgttctttttatgtgccattaatatctgctaaatgtgactgaaaatttgttagtcacctaggcattagtggagcaaaccctgaagcacctgcagtaaggagtctgaaacatacgtgctgacctttttgcctaaagttggcacttgtgttacagcatccagaaagtagaggctttaattttttcctcattttgtggtggatttgcatctgcactttattgtattgttatccattgcgagtagcagcatgtagtcattagatggatggctagatgtcaggatgcagtttgtgccataagtggaacaaagcaaagagaatagtccctgtaattcgtcctgggtttgaacctaacagcattactaagcagagagcttgggatccatctgaaagctagacctttagagatttttcaatttagtgaaaaaagataagatatgccaaccaatgtctaaaaactagaaataccagtaattctccattacaacaaatatcacaatacaactacatcaaaaacctcaagattgctaagtcagtatttgacccattattttaagttacagctcatacaacaaaattctgttatagcagaatggaaccattcatcctgggaacatataatgggatttgatctataaacgtgttttggttctgctgattgactctttgtaacttcttaaaatttgggaagtgtaggctgggcgcagtggctcatgcctgtaatccctgcactttgggaggcggaggcagggggatcacctcaggttaggagtcgagaccagcctggccaacatggtgaaaccccatctctactaaaaatacaaaaattagccaggcatggtggcgggtgtgtgtaatcccagctactcaggaggctgaggcaggatactcacttgaacccggaaagcggaggttgcagtgagctgagatgacagcctgcttgacagagagagactctgtctcaaaaaaataaaataaaataaaataaataaaatttgtaaagtatagaaataatttaaaactcttgttagaattcagttaccttctggtattcagtagaatacagtcatatatcatctcatggtgatacattctgtgaaatgttatcattaaacgatttcatcattgtgtagaaagcacttggataaacctagatggtttagcctactgcatacctaggctatacggtataacatattgctcccaggccacaaacctgtatagcatgttattctgctgaatattgtaggcagttgtaacacaatggtaagtacatatgtatgtaaacatagaaaaggtacagtaatcttatggagccatctctgaatatgtggttcattattgactgaaacattatgtggcacatgactgtacttgggcagctgctgcttctctttcagttgcaaatgcaaacctgttataatctttgactaaataaagcatcctggattctgtaagtccatagatagtaaaaacttcttaaaacacaataaagaagagagaggaaaaaaaagaacaaaacaaaaaccctgggaaagtgagttatctgtgcttcccttgtcagttatccaagtaatacttattaaaactaggtgcaaggccacgtgtggtgactcacacctgtaatctcagcactttgggaggctaaggcaggcagatcactttaggtcaggagttcagaccagcctggtcaacatggtgaaaccccatctctactaaaaatacaaaaattagctgggtgtggtggcacacgcctgtaatcccagctacttgggaggctgaggcaggagaaacacttgaaccctggaggcggaggttgcactgagctgagattgtgccactgtactccagcctgggcaacagagtgaaactgtctctcaaaaaataataataggccgggtgcggtggctcacgccagtaatcccagcattttgggaggccaaggcaggcggatcacaaggtcaggagtttgagaccagcctgaccaacatggtgaaaccccgtctctactaaaaataaaaaaattagccaggcatggtagcactcgcctgtaatcccagctactcaggaggctgaggcaggagaatcgcttgaacccaggacgcagaagttgcaatgagccaagatcatgccactgcactccatcctgagagagagaaaaagactccatctcaaaaaataataataataataataataataattatagatcaggcgtggtggctggcacctgtaatcccagcactttgggatgccgaagcaggcatatcacctgaggtcaggagttcgagaccagcttggccaacatggcgaaaccttgtctctactaaaaatgcaaaaaaaattagtcggacgtgttggcaggtgcctgtaatccccgctacttgggaggctgaggaaggagaattgcttgaacctgggaggcagaggttgcagtgagccgagaccactccattgcactccagcctgggcaataggaacgaaactccatctcaaaaaaaaataatagtaataataataataataataaaaaatacaactacgtgcaggctatgttttcattacctacttttttatgcttctggtcttctgttccttcagtggtagtagtgcaggtgatcaggttttcagttctcagaagattgcataagacagtcccacaggctttaggtttttaccctgtgctgcccaaacccacagtaaatactataaaagaaagaatgatttttatccccaatagataaatgataacttttaaaaattaactattgaaaacacttatttatctattgctgtaatattggagattacttgaaatatgataacctgcttgttgtaactacatcagcaggtcttatcctgattgcatagggtatcagcacgtgcttaatcacttaagtatctttttctccttttacttcagaactgtcatgctgggtttttcagtttttgcttcagccctggaaacagtctctcaggagggtaggggtgggaagttagggttaggaaccttagaagaggaatttattttatttatttatttattttattttatttttttgaaatggagtcttgctctatcgcccaggctggagtgcagtggcgcgatctcggctcactgcaacctctgcctcccgggttcaagtgattctcctgcctcagcctcccaagtagctgggattacaggcacgcatcaccacggccagctaattttcgtattttttcatagagacagggtttcgccatgttagccaggctagtctcgaaccactgacctaaagtgatccacctgccttggcctcccaaattgctggcattactggcttgagccaccacgcccgactgtttcttgaccttttaataattgtcattctgactggcaaggcttgctttcttaacaagtcaaaaatcttctagcatgaagcaggaaaaggatatactaaaataactaaagtaatgatagtttacctgaacagaactgagtggttggttcaaatattaccctactgctctccatgaaggtattttattttagccctttaaattcctcttcctggctgggtgcagtggctcacgcctgtaatcccagcaatttgggaggccaaggcaggtggatcactttaggtcagtggttcgagactagcctggctaacgtggcgaaaccctgtctctacaaaaaaatacaaaaattagctggccgtggtgatgcgtgcctgtaataccagctactctggaggctgaggcaggagaatcacttgaacccaggagacagaggttgcagtgagccgagatcatgccactgcagtccagcctgggcgacagagcaagactccatttcaataaataaataaataaataaataaattcctcttctaaggttcccaaccctaacttcccacccctaccctcctgggagactttttccagggctgaagcaaaaattcaaaaacccagcatgtcagttctgaagtaaaaggagaataagatagctaagtgattaagcatgtgctgataccctatgcagtcagggtaagatctgttggccaggcctggtggcttacgcctgattccagcactttgggaggccgaggcaggtggatcatgaggtcaagagatcgagaccatcctggccaacatgatgaaaccccgtctctactaaaaatacaaaaattagctgggtgtgatggcgtgtgtctgtagtcccagctactcaggaggctgaggcaggagaatcacttgaacctgggaggcggaggttgcagtgagccgagatcatgccactgcattccagcttggcgtcagagcgagactccgtctcaaaagaaaaaaaaatctgtttatgtagctacaacaagcaggttatctttctttcttttttctttttttttttttttttttttgagacagagtcttgctctgtcgcccaggctggagtgcagtggcgggatctcggctcactgcaagctccaccttctgggttcacgccattctcctgcctcagcctcctgagtagctgggactacaggcccccacgactgcgcccagctaattttttgtattttcagtagagacggggtttcaccatggtcttgatctcctgacctcgtgatccgcccacctctgcctcccaaagtgctgggattacaggcgtgagccaccgcgtccggccaacaagcaggttatcatatttcaaggaatccccgatattacagcagtagataaataagaaaatgtagtatcccaccagggaatactatacagccataaaaaggtatgatatcatgtccgtttcagggacatggatggaggtgaagccatcagcaagctaacgtaagaacagaaaaacaacactgcatgttctcacttataagtaggagctgaacaatgagaacacatgggcacagggtggggaacaacacacactggggcctgttgggggagcgggggaagggagaggatcaggataaactgctaatgcagctgcacttaataccaaggtgatgggttgataggtgcagcaaaccaccaaggtgcacgtttacctgtgtaacaaacctccatgtcctgcacatgtattctgaaacttaaaattaaaattttgagggctaggcatggtggcttacgcctgtaatcccagcactttgggaagccgagatgggtggatcatgaggtcaggagatggagaccgtcctggctaacacagtgaaatcccatctctactaaaaatacaaaaaattagctgggcgtggtggcacgtgcctatagtcccagctacttgggagggtgaggcaggagaattgcttgaaccctggaggcggaggttgcagtgagctgagatcgtgccactgcactccagcctgggcgacagagcgagactgtgtctcaaaaaatatttaaattttgaaaaaaaaatgcaaggcagtgcagcctgagtggatagggaaatgggacaagctgaacctgggatgggagtaacaagtaaatgagagaagaaatgagaatgatgagttcccaccagctccttggctgctttcttatccagatatttctctgttcctagcattttaattttttctttatttgtatattatttagaagaggaattttagaggaatgggatagagtgtaatatagaatcatcatatttgatgcatgctaactactttggcaaaagatttgtaaaaggctgagagtttgactgttggctaaagtgagatgggggattagtagggaatgaaaattgttcaggctctttgctcatcattggaacgaattggatgtgttgtggacctacggaaacactcaaattcagtcatctccctgttgggaataggtttgaggaaccactggccaacctgttaaatgaacaacatcggacagtgaaggagctatttgaacagctgaagatgaagaaatcttcagccaaacagctgcaggaagtagagaaggttaaaccccagagtgagaaagttcatcagactctgattctggacccagcacagaggaagagactccagcagcagatgcagcaggtaggacttttcttggtcatgttaacattggatttttttttttgagacagagtctggctctgtctcccagcctggagtgcagtggcccgatatcggctcacttcaacctctgctttctgggctcaagcatttctcctgcctcagcctcccaagtagctgggattacaggcatccaccaccacacccagctaatttttgtatttttagtagagacagggtttcaccatattggccaggctggtctcgaactcctgaccttgtgatccgcccgcctcggcctcctaaagtgctgggattacaggcgtgagccactgcgccctgctgttaatactggattataccaaggcctaactctgaggccagaaattaacagctttgtaaaagtcagagatagttaccttaccacctcctaaaaccatagtatcttcacatcattaggagctcgagaagtcatcatgttcatgccttatggctcaaggaagagagcacacaaggacactaatggtattcagaaatatagatttcaaagagtccttagtaatctattctgaaatttaacaaccttcactgtgagaagtaggtttgtttttcctttttctaacctcagtccctctggattgaggttaagcttcctctggttctgtcattttgttcaagggaacatgtctgagagatttatgccaagatcctatgttattttcatactcctttcagaaagcaaaatatatgtgataaagttgcaaacatcttggttattgtctctctgggggctgggttacggtggctcacacctgtaatcccagcactttgggaggctgaggtgggaggattgcttgagccagggagttcgagagcaacctgagcaacatagtgagaccctgtctctgcaaaaaataaaaataaattagccaggcatggtgccatgcatctgtggtcccagctactcaggaggctgaggtgggaggattgcttgagcacaggaagttgagagggcgtggagccatgattgcatcactgcacatcagcctgagtgacagagagagatcctttctccaagaagaaaaaaaaaaaagatctctctggattcctgaaatgacaatgtggtaacatgtcacttcatcattttctttccatccccagcacgttcagctcttgacccaaatccaccttcttgccacctgcaaccccaacctcaatccggaggccactaccaccaggatatttcttgtaagtttccaaatatccataactctaaagactagagtatgaaattagcttggcaggttatttctcagttattcactgatcataatctatatttattcttctctcgggtatttttgattgttttgcctgctttctgttaaggcttcctgtgtttgctgagagaacgtaagccactgattcccatgaaaggacaaggagtgtattcaattttcttaatactgtctttctgatatttttattgaatcctcctcatctttagatccaacctaacttcttaggtttttggtaccactgttcgttttatagatgttgagactgggcacggtggctatgcctgtaatcccagcactttgagaagccaaagcaggcagattatatgaccccagtagttccagactagctggggcaacatgccgaaagcccgtctctacaaaatacaaaaattaaccagatgtggtggtgcgtacctgtagtctcagctacttgggaggcagaggtggaaggatagcttgagcctaggaggtgagggttacagtgagctgagatcgcgccactgcactcaagcctgggcagcagagtgagacccagtctcaaaataaataaataaataaaataaaagtaatagtcctaattcttggctgggtgcggtgacttgtgcctgtaatctcagcactttggtaggctgaggtggctggatcacttgaggtcaggagttcgagaacagcttgaccaacatggtgaaatccagtctctacttaaaatacaaaaaatagccgggcgtggtagcgggcgcctgtaattaatcccagctactcgggaggtagatggagaagaatcgcttgagcccaggaagtggagacttcagtgagtcaagatcgcaccactacgctccagcctgggcgacagagcgaaactccgtctcgaaaaaaaaaaaaaaaatgagtcctcattcttcataatcttacttctagttcaggagctagaccatatattccttagtgtttctcactaagtctaaaagtaaaacaagaatacaatccctgaatatctgggaactcaggcataatcttaacagagtagtttattgtgaaagactttatgatgatttttacctgtttttatcctgtagtaggaaggtcagcttctcatttagattctgaaggctactggtattaattgtctggaattgtcttaaatctttcttgtgtcctgttttcccagaaagagctgggaacctttgctcaaagctccatcgcccttcaccatcagtacaaccccaagtttcagaccctgttccaaccctgtaacttgatgggagctatgcagctgattgaagacttcagcacacatgtcagcattgactgcagccctcataaaactgtcaagaagactggtaggagacagatgtgtcagctttaagtttttacttgcggtgagaggtggtgggaatcttatcccatagataactaaggatacttgcctaggaatggaggacacaggacatttgtaatttcttccttctctcttttatcctccctttgtactcattatccaagttctagaattacatgataatctctgggcctgggtaaagtgtggaggcagtggacagtataggaatatgggaggtagagatctgaggctcagtgctaagaattggactacagcaatatgaggggtaagtattaggagtcagatcgagataaactggggcctggtaaagatgaaagtcaggtggtaaagtttggtcatgtttagctttttactgtcttcattaagatcaactaaggccaggcgcggtggctcacgcctgtaatcccagtactttgggaggccgaggcacggggaacacaatgtcaggagatggagaccatcctggcgaacacagtgaaaccccgtctctactaaaaatacagaaattagccaggcatgggggcacgcgcctgtagtcccagctactcgggaggctgaggcaggagaatcgcttgaacccaggaggcagagtttgcagtgagccaagatagcatcattgcactccagcctgggcgacagagcgagactcagtctcaaaaaaaaaaaaaaaaaaatcaactaactttatttaccatactgactgcagcataagtgatatctccattctgaatgaaatattgacttgcaagttaggcataagttagagattatacatttgccatgttcagtattttaaagaaatttgcaagtttagattctaccttgcattagtttagtattttttagaaaatacttgctatttacttaagccaaatatttgcttctgatttgtttcttgatttagcaaattagttgtggtttgttctggatttgggtttgtctttggattctattttaaatccctgagtcttatcgttaagttgaaaatagttgtatttaagtgtattatatcatagacacggatcccaaactgctttaacagctatattaaatgatatgaaatggtaatgaaaacttgatttaacaccaaattataataatatcttacacatctgttgacctgttgctttcttctggggatataaaaataacacttatggaaggagaaatatggatatagtagttttgtctctagaaatgcagaggtgcctgaaagtgagaggctgagagagggagagagaaatgaatgagactgaattgtctccttccttttatggttcttttgttcccagcctcaggaggaatctgggagaacttaagtaagaatcaaataaaagtaaaatttggaataccagatttgtgagggagattaaagaagttggaatcttattctggaagaaagaaagcattgttgaaggtctcttatccttcaagtatttaaggggggaaggaggtaaaacatttttgagcatacgctattgttagcaccttattttactaggtgctttttaagtgtttgttttacttagtgaataaagtgttccacataagaaagaatgagtcaacttttattgccattgaatgggactccctttagatataatgttagcttaagaaagactggaaacttttggggggatggtgggcagatgggagggaatcaagttaggtaaggatagctcctacctaaatgcaaaaatgcattcacaggcttttatgaagccctcttttgtcctagaagttgatttatccgagatttattttcttatagcgaatgaatttccctgtttgccaaagcaagtggcttggattctggccacaagcaaggttttcatgtatccagagttacttccagtgtgttccctgaaggcaaagaatccccaggataagatcgtcttcaccaaggctgaggacaagtaagtgtttactctgggggatcaaaacagcagaacatcccaaggagaagatgtagttcctttgaggagtttaggggaagtaagacttgtataataagacacggacacaaaagacaaaaggaaaagcaatatagatgagcagagccctctaggacgtgcttgttctagcagtgccaaatactgctttttgggagatgtcacacacatttttaaagcattttagaccggacatggtggctcacacctgtaatcccagcactttgaaaggccaaggcaggaggttcgcttttattttattttatgttatttatttatttatttagaggcagaatcttactgtgtcacccaggcagtcacagctcactgcagccttgaactcctgacatcaagcgatccttgcacctcagcctccacggagcagctgagaccacaggcgtgtgccaccatacatggctaaatttttttttttttttttgtagagatgagggtctctctgtgttatccaggcatctctcaaactcctggactcaaggcatcctcccaccttggcctcccaaagtgctgggattacaggcatgagccaccacacccaccagattatgaacatttttatggccctttgtgtgtattgccacactgttatcagcacatatgtgtatatgtaaccacgatcatatatgttgttagagggtagtattggtgccggtttaagttgtctgacagggtacctattcattttgtattagttttattagaattattctccttcctttctattctctttgaacttcctttgtattgttagtatacagctcgtcatgatacagctcatcatgatctcacgtttattaatgatttatgcctagtttcttatgttcccacataattgtgaagtatttgattttttttttttaaacagagtttcacttttgtcacccaggctggagtgcaatggtgcgatctcggctcactgcaaccttcgcccccggtttcaagtgattctcctgaccaagtagctggcattacaggcacctaccactacacctggctattttttgtatttttagtagagacgaggtttcaccatgttggccaggctggtctcgaactcctgactcaggtgatctgcctgcttcggcatcccaaaatgctgggattacaggcgtgagccattgcgcctggccttattcttattcataatacttaatcagtactcactaagtatctgaaattttctgttgagtagtcaccaacttgtacaagaattagatttacaaaaagtagattgaccaggcatggtgggcttacaactgtaataccagcactttgagaggctgaggcaggaggatcgcttgaggccaggagtttaagattagcccaggcaacatagtgagaactggtctctacaaataatggaagaaaaaaattagcccggcatggtggtgaacgtctgtggtcacagatacttgggaggatgaagtacgggaatcgcttgagcccaggcattcaaggctgcagtgcgctgtaatcatgccacccgctctccaacccgggcaacagagcaagaccctgtctgaaaaaaaatgaaaaggtagattgggccacacaccatggctcatgcctgtaatcccagcactttgggaggctgagactggagaattgcttcagcctaggaagtagaggttgcagtgagctgcgatggtgccactgcactccagcctgggtgacagcgtgagaccttgtctcaagaaaaaaatgaaagagtagattgtaaaatgtgttagtctggggagaccctttagaaggaaggactgtgaagtgagatttagtgttattctcctttctcagtttgttagctttaggactgaagcattttgaaggaactgagtttcctaatcctctaatcagcaagtaccttctaacctgcaaaactgcccaccaactgacagtgagaatcaagaacctcaacatgaacagagctcctgacaacatcattaaagtgagtgtttcctgcatgcgccatccgggcacctcaccaatatgtacccattcttttatcttgttattctcaaagaaaagaggaaccttcttttatctaaagctaatttctcccactttacactagattaattcccctattgccttttgggcaatattccgctggcagtattccacttatttgctttttgttgttgttgttgttagacagactcttgctctgtcactcaggcttgagtagagtggcgcaatcttggctcactgcagtctttacctcccaggttcaagcgattctcctgcctcggtgtctcctgcctcagcgtcccaagtagcttggattacaggcatgcaccaccacacctggctaatttttgtattttcagtagagatgaggtttcaccatgttggccaggctggtcttgaacctctgacctcaagtgatccacccgccttggcctcccaaggtgctgggattacaggcatgagccaccgcacctggtttcttcttttttatttagatatttatgttgtgtttttagagacgggttcttgctctatcatcctgtttggagtgcattggctcagtcataggtcactgtagcctcaaactcctgggttcaagtgatccttccactttagccttccaagtatcctggactacaggcgtgttccaccaaggctagctcattattttattttgtgtggagatgctgtgtcactttgttgcccagactggtcttgaagttttgacatgtgtcagtccgcctgcctcagcttggcctcccaaagtgttgggattacaggcgtgagccactatgcccagccttttgttttgttttgtttttgtttttttcttgagaaagggtcttactctgctacccaggctggagtacagtggtacagtcatagctcactgtaagctccagctactgggctcaagcattcctcccacctcagcctcccaaggagctggggattatatgcatgagccaccatgcttgcctattaatttttttttttttttttttttttttttttttttttaagaaatggagtgtccctatattgcccaggctggtctcgaatttttggccttaggcattctcctgtctcagcctctaattgctacttcctggtatattggatttaggccttatttattaaccattaaccataagccaaggaagctgaggatttacctgtctcctcactcccttactcccaccacaaacatgcacattttctgctctccaatctcctcgctagtaattatgtcacaattttggttaggttgtattcagggtttacactataagattttaaggactgtataaatactcttcacagctatgttattgtgataccttgcctttcctgctgaacattttgtttttcttggagtaaataatcgcatttttagggggatggggctggacttgattttattatgtaattattcccaggtcaacagtaaaggttacttaaattttcttaatctcctttcagcgtgtctggccttctagatattccgtcactttcatcttgaaggaattgctccttgagccctctgacactattccactctaagcgtgttgctctctgggcttgctgcactgatgttttgggctttttcctccccatcatcctgggaattctttttgcctcttactgtgttggatcttcttatttcctgaattctacatctgtgtttttgttttacttccttcctttagtgaaacacattctagtagcattttttattttaatttttttctaaatttttaaaaattgaggccgtacacggtggctcaggcctgtaatcccaggtctttgggaggctgaggcaggcagatgacctgaggccaggagttcaagaccagcctgggcaatatggtgaaaccccgtctctactaaaaatacaaaaattgaccaggtatggtgccactcacctgtaatcccagccactcgggaggctgaggcacaaaactcacttgaactagggagacagaggttcagtaagcgtggatcactcccctgcactccagcctgggcgacagaggagtctctgtctcaaagatcaagaagcagagaaacaaacaaaaagtacaaagatgtgcacagaaaatgacacacaactcaaacgtgaaggaaaaagatttttctgcagcagaatacggtttatcaagtgccttagcaccacggatgaaactagacaaattctaagccatattatcatgaattttcaaaacattggagccaaaggaaaaatcttacatgctatcagaggttgggagaaacaggtgttacatgaatattcaagagttaaatggggccgtggctcacgcctataatcccagcactttgggaggccaaggtgggagaattacttgagcccaggagttcaagaccagcctgggcaaaaaagtgagacctgtctcaatttttttttttttttttgagatggagtcttgctgtgtcatccaggctggagtgcagtggtgtgatctcggctcactgcaagctccgcctcccaggttcatgccattctcctgcctgagcctcctgagtagctgggactacaggcaccagccaccacgcctggctaattttttgtattttttagtagagacggggtttcaccatgttagccaggatggtctcaatctcctgacctcgtgatctgcccacctcaacctcccaaagtgctgggattacaaggtgagccactgcgcctggcctattctttttttttttttttgagacggagtctcactgtgtcacccaggctggagtgcagtggcactgtctctgatctcagctcacctcaacctccacctcccaggttcaagcaattctcctgcctcagcccgctgagtagctgggattacaggtgcgtgccaccatgcctggctaatttttgtatttttgtaggaataggggttttgccatgttggccagtctggtcttgaactcctgaccttaggtaatctgcccacctccgaaagtgctgggattataggcatgaaccaccacgcccaaccttcatttactcttaaaattgaactttctcaggctctttttttccccccttctcttctaatgcctttcacaccaccatttgcttaaaaggaagctttcatgtgtccaaggtatagattacgatgttgtctttgcagctgttgatcaagaacaaatcttacataagattgctctgagcatctgcttccttttctctctgtgacctaaactctccccttcctggcaaccagaatggagatcatcagttagaaaatattgaataattgtgaaatatttaaatagagattagtttaatttgaaatgtacaagtattcagcatatgctatttatatatgtgcgttcatggatgtttgtgtatgtggtcttgtgtgtgtgtgtgtgtgtgtgtgtgtgtttctcttgatccaccaccaccccattcaccagcctgacaggggacagtgtttccagaaggaatgtaattcatgcgcatttttttcatgttaagttttataagaagaccaaacagctgccagtcctaggaaaatgctgtgaagagatccagccacatcagtggaagccacctatagagagagaagaacaccggctcccattctggttaaaggtacagccctcttcctcgaagtctgtaggaggcagaaggtcactgaaagttctgagagaatatcaagggcttccttaatcgtctaatgctttagttgtagaactaggactttagaaatcttcctgattcacctttcttcccttacttttctgcccttctctgggtgattctacagcattttcaaaataataggtaaaataataatttgctaaaggaaattcacagaagtttctaaagtgtataattagaatgtggtctttgtagatttgatatgcagagagacccttcttggaaagatgccttgagactgtctaaggtctctaaaacctagaaagccctattgtttttcccaaattctttttttgttgttgttttgttttgtttttgagacagagtcttgctctgtccacccaggctaaggtgcgatctcggcttctcgcaacctctgcctcccaggttcaagtgattctcctgcctccgcctcctgagtagctgggattacaggcacatgccaccacacccaactaatttttgtatttttagtagagacggggtttcaccgtgttggtcaggctcatcctgaactcctgacctcaagtgatctgcccacttcagcctcccaaagtgctgggattacaggcgtgagccactgtgccaagcctctttttcccaaattctgacatatgctggatcagagtgttcttgtttccaataggccagtctgccatccatccaggaagaactgcggcacatggctgatggtgctagagaggtaggaaatatgactggaaccactgagatcaactcagatcgaagcctagaaaaagacaatttggagttggggagtgaatctcggtacccactgctattgcctaagggtgtagtcctgaaactgaagccagttgccacccgtttccccaggaaggcttggagacagaagcgttcatcagtcctgaagcccctccttatccaacccagcccctctctccagcccagcttcaaccctgggaaaacaccagcccgatcaactcattcagaagcccctccgagcaaaatggtgctccggattcctcacccaatacagccagccactgttttacagacagttccaggtgtccctccactgggggtcagtggaggtgagagttttgagtctcctgcagcactgcctgctgtgccccctgaggccaggacaagcttccctctgtctgagtcccagactttgctctcttctgcccctgtgcccaaggtaatgctgccctcccttgccccttctaagtttcgaaagccatatgtgagacggagaccctcaaagagaagaggagtcaaggcctctccctgtatgaaacctgcccctgttatccaccaccctgcatctgttatcttcactgttcctgctaccactgtgaagattgtgagccttggcggtggctgtaacatgatccagcctgtcaatgcggctgtggcccagagtccccagactattcccatcactaccctcttggttaaccctacttccttcccctgtccattgaaccagtcccttgtggcctcctctgtctcacccttaattgtttctggcaattctgtgaatcttcctataccatccacccctgaagataaggcccacgtgaatgtggacattgcttgtgctgtggctgatggggaaaatgcctttcagggcctagaacccaaattagagccccaggaactatctcctctctctgctactgttttcccgaaagtggaacatagcccagggcctccactagcagatgcagagtgccaagaaggattgtcagagaatagtgcctgtcgctggaccgttgtgaaaacagaggaggggaggcaagctctggagccgctccctcagggcatccaggagtctctaaacaaccctacccctggggatttagaggaaattgtcaagatggaacctgaagaagctagagaggaaatcagtggatcccctgagcgtgatatttgtgatgacatcaaagtggaacatgctgtggaattggacactggtgccccaagcgaggagttgagcagtgctggagaagtaacgaaacagacagtcttacagaaggaagaggagaggagtcagccaactaaaaccccttcatcttctcaagagccccctgatgaaggaacctcagggacagatgtgaacaaaggatcatcaaagaatgctttgtcctcaatggatcctgaagtgaggcttagtagccccccagggaagccagaagattcatccagtgttgatggtcagtcagtggggactccagttgggccagaaactggaggagagaagaatgggccagaagaagaggaagaagaggactttgatgacctcacccaagatgaggaagatgaaatgtcatcagcttctgaggaatctgtgctttctgtcccagaactccaggtgagagctggagaatattctcaagtatttcgtggactcagtaatatgtatcacttattgatatgccacctgcttgcttgctgcactatggatagtcctaaaatcatttgtatttgatttgtgaatgcattatgggacatgattgtggagttgaggtgaaatgagatggaaaggatgaaattttacttattatattaaactcgtttacacattaaattgaatcacctgaccatactttaaatgccttaaaaaatagtaataggctgggcttggtggctcactcctgtagtcccagcactttgggaggctgaggtgggtggatcacaaggccaggagtttcagactggcctggccgacgtggtaaaaccccatctatattaaaaataacaaaaattagccaggcatggtggcggacacctgtaatccctgctgcttgggaggcagaggcaggagaattgcttgagcccgagagacagaggttgcagtgagccgagatcacgtcattgctctccagcctgggcaacagagcaaggctctgtctcaaaaaaaaaaaaaaaaaaaaaaaaaaaaaaa

SEQ ID NO: 15595 - DNA, 107634 bp, Homo sapiens
tggcgcatagtgttaggcgcatgctccttgatgcactgcggcgcggcgctccgaggctcggggacgcgcacgcaattcgctgttgttggctgacttccggtggtgccaaagccgtttccgtggaatcaggccggctggtgagggtacaggtttgtgtgtggtggggtgggaagaggcaggtgggagctgggacacctggacgaacgatgtccaggttgagaaggtcgggtctgagggtgggcgctgggtgcgtggcggaagttaagggcgtgaagtccagtgtctagttgggaatggggactggagccagccctgggcaccgaggtggaagcgcggttaggaccccttttgaaaatgttttcctaggagagggccgtgccggggctgcctccacattggcattcattcaccctgctggtccgacttgggttcccaaaaaagtggattctgtcgagctactgctgtgtttgaggtgcctggagctgaagtagctgtctttctttccttctttttctttctttctttttctttttttcccctttttttgatctcagtaattatctgtgaaataaaagagctgccctggctactcccattctatttcttataaggtcaccaccatctctcacaggaatcaacgaaatcttcatgttttattgagctttagttactgagttttaattacatcagttgattgaggggatggagaatctcccctaatgtcttggagaaacagaagggaggtttaaaactaactgtaggtcgggcgcggtggctcacgcctctaatcctagcactttgggaggctggggcgggaggatcgcttgaggccaggagtttgagaccagcctgggtaacaaatcgagaccccgtctctacaaaaaaaaaaaaagaaaaaaagtcgttgagggtggtggcaagtgccttgtagtcctagctactcgggaggccgaggccagagggtcactggagcccaggagtctgaggctgcagtgaactaggatcttgccactgcactccggtctgggcaacagagcgagaccttgtctctggaaagaaagagagagagagagaaagaaagaaaagaagaaagagaaatctaaccttagacgcttagagttacaaataacttttatttttcagttctctagttcaggctttcatctagtactctgataagtggacattcaggcttcgcttgaacattgccagtgatctaacacaaggcggcttattctattattggatctatttatgacagtaaagttttcctgggtaataagatgccttttttttttttttttttttttttttttgacagagtctccctctgttgcccagggtggagtgcagtggcatgatcttggcccactgcaacctccacctcccgggttcaagcgattctcctgcctcagcctcccaagaagctgggactacaggtgcccaccaccatgcccggctaatttttgtattttttagtagagacagcgtttcaccatattgaccaggctggtctcgaactcctgaccttgttatccgcccgccttggcctcccagagtgttgggattacaggcgtgagccactgcaccaagccactatcagtttttatataatgcttaacatttggcccaaatgctgcacagaataagttgtttaacctctgtttcatttattattcagggagcattcattgagtatctacaatattcagtgacacattgagtatcaatactcagtgatacattgagtatctacaatacccaaatactgaactggtgcagtggcttggatgggaccgtaatcccaatgacttgggaggctgaggtgggagcattgcttgagcccaggaggtcgaggctgcagcgaactatgttcgtgccactgcagtgcagcctgggtgacagagcaagaccttgtttcaaaaaaaaaaacccagatactgctggatattagggatatgagttgaaataatcccatttctcgaaaagctgatagttttggaggaaggagatgagaaagagaaagatgagagaccattacaaaactgataagtaccgtaaaagaggtttacaaacagatactaaaagaacatagaggataccctctggtttaggtcagtaatgcccttaaaatgtgataactagaattgaagcaaaaagccaagaagtaacatagcgcagaggatagtaggactcttatcttccttgtttcgacacaaagtttgttgttaatgtagcctaacctttttttttttttttgagatggagtttcgctcttgttgcccaggctggagtgcaatggggagtgatctcggctcactgcaacctctgtctccgggttcaagtgattgtcctgcctcagcctctggagtagctgggatcacaggcgtgtgccaccacgcccggctaattttgtatttttagtagagacagggtttctccatgttgatcaggctggtctcgaactcctgacctcaggtaatctgcccaccttggcctcccaaagtgttgggattacggacgtgagccatctcgtgcccagccaacatagcctaaccttttaaacaatcacactttgcttttgatttgtttctattaatggaaatacctgtttatgaaaacagcaatagcaaacatgtattgatcatttaccatctaatgaagtagatgctattatattccattttatagctgaagacactgagattcaggttgagtaacttccacaaggtcataaagctggagagaaggtgacttgggaaacatccagacagtctgattccacagtttactctcagcatcatgctagtctaccaccctgatggtaataataacaatgtttgctggacgcggtggctcacgcctgtaatcccagcactttgggaggccgaggcgggtggatctcaaggtcaggagttcgagaccatcctggctaacacggtgaaaccccatctctactaaaaatacaaaaaaaattagccaggcgtaggtggtgcacgcctgtagtcccagctattcaggaggctgaggcaggagaatggcgtaaaacgcgagaggcggaggttgcagtgaaccgagattgcgccactgtactccagcctgggagacagagtgagactctgtctcaaaaacaaaaacaaaaacaaaaaaacacaaaaataaacccacagtgtttattaatcacttactctttaattgtaacaattctatgaagtaagagcaattattttttactgttgagggtactgaagacttgcgaggttaaatcacttggcctaggtaacagtagtccatcagtagtaatcagtagagttgagatttgaactcagtcacttaaccactgtctctcaacttccacctaaagggaaattgtgcatttggtgtgaagtattgtgttcatgatcgaacatgaataaatgaaaagataattgagtaaatgttattacttttaattaatatgaaggcagtaagaactttttattctttcagaatggaacaaaagtgggacttttaaaatgttgccctgtaagaagagaagaactacagtgacagagtccctacagcataaaggcaatcaagaggaaaacaacgtagacctagaatcagccgttaaaccagaatctgaccaggttaaggacttgagttcggtgtcactatcctgggatccaagtcatggcagagtagctggcttcgaagtacagtctttgcaggatgcaggaaatcagcttggtatggaggatacatctctgagctctggaatgctcacccagaacacaaatgtaccaattctagaaggtgttgatgtggccatctctcagggaatcaccctaccttccttggagtcttttcacccccttaatatacacattggtaaaggaaaactccacgctactggctcaaagagagggaaaaaaatgacactcaggcctgggccagttacccaagaagacagatgtgatcatcttaccctaaaggagcctttttcaggagagcctagtgaagaagtcaaggaagaaggaggtaaggtatacaaggtctctaggttacattcttgtcaataccactttgccattgctatttctggatacctttacagagtagtatttctgaaaggggatattgatttggtacggaattggaactgctgtgttgctaagggtcaacagtgaactttttttttttcttgagacggagtcttgccatgtcaccagactagagtgcaatggtgggatcttgactcactgcagcctccacctcctgggttcaagcgattctcctgcctcagtctctcaagtatctaggattacaggcatgcgccaccacgccaggctaattttgtatttttaccagagacggggtttcaccatgttggtcaagctggtctcgaactcctgacctcaggtgatacgtttgccttggcctcccaaagtgctgggattacaggtgtgagccaccgtgcctggccagcagtgaactttatgaatggatatagactttcttttcccctcccattcgctatatccacttctgtacccctttcttctttcttttttgagacggagtctcgctctgtcacccaggccagggtgcagtggcgtggtctcggctcactgcaagctccgcctcccaggttcacgccattctcctgcctcagcctcccgagtagctgggactacaggcacccaccaccatgcccggccaattttttttgtatttttagtagaggcggggtttcactgtgttagccaggatggtctcagtctcctgacctcgtgatccgcccgccttggcctcccaaagtgctggattacaagcgtgagccactgcacccagccattgtatccctttcattccattctctcatcctttatttggtgtgtctggagatgtgtatggtcttttgtgattgggcagcagcttaaagggggagactactgcctgggacactgggaaaggctctactgagatgaatgacccttccaatttgaaagatgaattgcggtttaacagaaagtggtatgggcacataggccaagaacagtgcacagagatagactggcagaaaaggatggtgacatggttgcttggaacaggtggtgggagatgacttcttttttttttttttttttttttgtgacagtctcgctctgttgcccaggctggagtgcagtggtgtgatcttggctcactgcaacctccacctcccatgttcaagtgattcccctgcttcagcctcgcgagtagctgggattacaggtgcctgccaccacgtccagctaatttttttatttttattagagaggaggtttccccatgttggccaggctggtctcaaactcctgacctcaggtgatccacgtaccttggcctcccaaagtgctgggattacaggcgtgagccaccacgccctgccaagatgactttagagtagtagattgtactaaggttgtgaaaggttttgtttttcataccaaggcatttgagcttttcctgtaggtaggtgatagtcatttaaacgtctaagtagaacacatttatgctttagaaaagataccaacttctcttattcattttttttttgatacggagtctcgctttgtcgcccaggctggagtacagtggcgtgatctcagctcactgcaacctccacctcccctgttcaagtgattctcctgcctcagcctcctgagtagctggtattacaggcgcccgccaccgtgctcagctaatttttgtatttttagtggagatggggtttcaccaggttagccagcttggtcctgaactcctgacctcaggtaacccacctgcctcagcctcccaaagtgctgggattacaggcgtgagccactgcgcccggcctagattgtgaaggtttttgtttttcatactaaggcatttgagcttttcctgtaggtaggtgatagtcattttttttttttgagacgtagtctggctctgtcgcccaggctggagtgcagtggcgcagtcttggctcactgcaagctctgcctcctgggttcatgccattctcctgcctcagcctcccgagtagctgggactacaggtgtctgccaccatgcccagctaattttttgtatttttagtagagacggggttttaccgtgttagccaggatagtgtcaatttcatgacctcgtgatccacctgcctcgtcctcccaaagtgctgggattacaggcgtgtgccaccgcgcccggccctttttttttttttttttttgaggtggagtctcgctctgttgccaggctggagtgcagtggcacgatctcatctcactgcaacctccgcctcccaggttcaagcaattctgcctcagcctcccaagtagctaggactacaggcacacgctgccacgctcagctaattttttttttttttgtattttagttgagacagggtttcaccatgctggccacgctggtctcgaactcctgacctcgtgatccaccgacctcggcctcccaaagtgctaggattacaggcgtgaaccactgcacccggcctattcattcattttgactgttaagatgttttcttttttgccgcattttaagtccacttgttcttattttgtcctactggtacattctcagtatgtggttttttattgtgtcttgtgtgtgtttatattgaagaatttcatgtttctgactctgctgtatttgaaaactgatggagtgcccaagatgagggagtttagcaataatcttgatggtatactgtgttggtcacgccctctctggcatgagctgcctgaagcacattgtcaaagatgaaagctcttttggggaaaagtgctctcctgtggaatcatcccttgtcatagcatgtggctctaaattttcagcctcattcacagtagcttgcattgttgtattgcttttgggacacctgtgttttatctggaaatgtagacaggaatagcggttttttttgtatgtgtattatatattgtttcactgctaatcttctacacaattttttagaataaaaaagggtaaatagcttgtgccattttgctaattacatagatttgacttttgatcacataaataaaaaataaaacaaggcaggacattgtcctgcacatagttgatgtggacaaatactttttattactttgaaattcttattttgatagttttccacttaatgaggcaagtgcttaagcctcagtctttttgagttctcattatttagacataaggaaaggagaaatgaaggtttttctttattctccccatgcctttcctttttttctcttttattctttttttttttttttaagagcagaatatactagatcaggacaaattaaggtgatactggaatttaggtgtttttactggaaaaaaggcatttcctttgagatagtttaaagaaaatagtaaggagataagaatcagttcaactactaattcaggaagccgggagagatgtacattcaaagcataggacagaatcaagttttctttcttttttttttttttttttttttgagacggagtctcgttctgttgcccaggctggagggcagtggtgcgatcttgactcactgcaacctccgcctcatgggttcaagcaattctcctgccgtagcctcccgagtagctgggattacaggcacccaccaccacacccggctaatttttgtatttttagtagagacggggtttcaccatgttggtcaggctggttttgaactaccttttttttttttttttttttgagacagagtctttctctgtcagccaggttggagtgcagtggcacaatctcggctcattgcaagcttcacctcctgggttcacgccattctcctgcctcagcctcccgagtagctgggactacaggcgcccgccaccacgcttggctaattttttgtatttttagtagaggcagggtttcaccatgttagtcaggatggtctcgatctcctaacgtcgtgatctgcctgcctcggcctcccaagtgctgggattacaggtgtgagccaccgtgcccagccctgctggttttgaatttctgacctcaaatgaccacccgcctcagcctcccaaagtgctgggattacaggcgtgagccacagtgcccagccccttttttttttttttttttttttttttttgagatggagtctctgttgtttaggctggagggcagtggcatgattttggctcactgcaacctctgcttcccgggttcaagcgattctcctgcctcagcctcccaagtagctgggattacaggtgtgcatcaccaggcctagctaattttttgtatcttagtagagatgggatctcatcaggttggccagcctggtctcgaactcctgacttcaggtgatccgcctgcctcggcctcccaaagtgctgggattacaggcgtgagccaccgcgcccgacctacaattccgtagttttagtaaaccattgcagtaacctacaaaacacattttgatgtttaacttttatctctcagatttttttttgtctgaaaatgacaaagaaatcctttgttctgagttttggtttaaaacataatctctatctgtgtgacatttaaaagaagcagaagacatagttctaacctcaggaagtttagaatcttaattgggaaaacaaccataaatatatactttttggaattggagcttgaaggattcacaggatttgatagattgtgagggaagaagtggaagtagaataacatattctgcaaacatgtagaaatgctgtgtttgtgtgggaaagtactaaggcttcaggtagaaagagtagatccagattatggagagccttgaagctttccccttaagaccttaagatttagaataggatgctggcagtaagggtagagaagaatgggtacaccatagacacattacaaagaaatgattaacactgctcagagactgacatgtaagatatctggggtaggggatggtgatgcatgccttcatagggaaggtatttgagagtttgaatatgagttcagatttgggtatgagttatgcaggtgaaccccaaaattggggctcagcccaggggggttcttggctttgtgcaagattcatttgcaagccaatagagaaaaaggaaagcaagtttattagagcagcagagtacaggaaatggctgccccatagacacagcaatagcagcagcccttgtgaatagatagctattccttgattatatactaaataagggcaggttattcatcaattttctagaaaaggggcagggagttcccagaaccaagagatcctcccattttaaaccatataaggtaacttctaggggttgccatggcatttgtaaactgtcatggcagtggtgggacttttcttctttgtatgtatgtatgtatatatttatttattgtttatttattttgagacagagtctcactctgttccccaggctggagtgtagtggcacgatcttggctcaccgcaacccccgcctcctgggttcaagggattctcctaccccagcctttcgagtacctgggactacaggcatgcaccaccacactcagctaattttttttgttttttgttgttttgagatggagtctcgctctgttgcccaggctggagtgcagtggcgccatctcagttcactgcaaccaccacctcctgggttcaagcgattctcctgccccagcttcctgagtagctggggttataggtacccgctaccatgcctggctaatttttgtatttttagtagagacggggtttcaccatgttggtcaggctggtctcaaactcctgacctcatgatctgccctcctcagcctcttaaagtgctggaattacaggcttgagtcactgcacctggctttttttgtatttttaattgagatgcgtttttgccatgttggccaggctggtcttgaactcctgacctcaggtgatcatctgcccgcctcagcctcccaaagtgctgggattacaggcatgagccaccatgcccagcctgtttttattttttaaaaccaatccatttaattgtgtctttcaaggtaaacaatttatggagcctggatcccaagcctgagagtgctagagctatgggtccaaaacttgtggtattctgagttcagaagggttcgaactcacggtgttcaactcacggagtcagagaacatgcggaatttgtgtattccatttagcaattttgtaaattaccagaaacagactgaaagagtctttcaagatggggaaaattcaactcctgtgttttttttgtttttttgtttttgagacagagtttcactcttgtttcccaggccgtagtgcaatggcacaacctcaatggcccctgctcggttgaagcgattcttctgcctcagcctcctgagtagctgggactacagccgtgtgccaccatgccaagctaatttttgtatttttagtagagatggggtttcaccatgttggccaggctgtctcgaactcctgacctcaagtcatccacccacctcggcctcccaaagtactgggattacaggcgtgagctaccgtgcctggcccaggacagctttttaacaagcagttaaagtggaaaagaaccccccagtagcacgctggtttagtttataagattttagtttacaaattaaaaaatctatatgttttacattttctctttatatcacttttttcctttatctttctctttgtcgtcttttgtatccttttttgctctcttctttttcctatctttttttttttttttggtgacagagtcttgctctgtcacccaggctggagtgcagtggcgcgatctcggctccctgcaagctccgcctcccgggttcacgccattctcctgcctcagcctcccgagtagctaggaatacaggtgcccgccaccacacccggctaatttttttgtatttttagtagagacggggtttcactgtgttagacaggctggtctcgatctcctgaccttgtgatccgcccgcctcggcctcccaaagtgctgagattacaggcgtgagccaccgcgcctggccggtttctttttcctgtctttcttctctgcatcccagttggcaatcttgttgatgaggttgtgtagggtgatcacagaatggatcagcgaggccaagtacactgctaccatttggttattggtcttcaggtaaaaggccttgacaaactcctataggctaatgactggcagcagcttgaagacctgcagctgatagatgaattggtggttggtggacagtttgcctgtggcaactttttccaggtagcttctggtacccagaagcttggagttcagtcccttcaaatccaggacctggtttgtgatacactgggaaagagtgcccactgtagtgtctttgatgtcttgtaacaagtgtttaactccaatttccttagcttcctctgctgcagtttcactggtcacatgctcaaatgttttcaaggctgaagttccatcttcatagacttctactgaaatatatgcttctgtaggcagccctaagtcctttggcttcatgtcactagtgaccaatactgagttacggcagtatcttttcatgatttcattgaaggcagtgtcattcttgtgtagtttagggcctatgtggtaccactcaactattctttccctggcattcaccctcttaaacattctgtatgtgtttttcaaataatcgtgggctaaaaaacaattatctttgtcatcttcattaaaagggactgtaaaactgctggatacatcaagtactttcatttgccatgaccgcaaaagcacatgaagaatgcatttctggtttccaaccttgctgattctgttgaaatgatccaccacattgagcagtacctgggggtggactaccaccttctgcaccaccaggtccagcctcatgatacactctggccaccaggcctggctccctgtgacccactggagtttcttttagcatgcaaattcattataattagtgtataataagcagtgagagcaaccgaatgtcacttttgttgccatcttggttgtaactggttttggctgctttctttgctgcatcctgttttgatcagggttttgttcttgttttgttcagcaggctctctggccagtgcttggaaaacaaatcctgcttctctcctacctcactccccccacagagattatatactccccttcaatcttacagggttttagaagggtggaagtccatcttctgtgactgcttcctgttgattttatgggcattggccctgcctagcactggaggagtaaaaatctcttgatgcctcatctaaggggtcagaacaaggatgtgttggaagccacttgctagcattatcttcacatggaaattgttgcaatctagaagacacacactacaaggaggctaaaagaggcagggccaaagattcatagttacaagatagctgctagaggtcctaaaaagagtagaaaccaggtgagacttgggagggttttttttgttgttgttattttttgggttttttgagacaggatctcgctctgtcacccaggctggagtgcagtggtgtgatcatggcccactgcagctttaacctcccaggctcaagtgatcctcctgccttagcctcctgagtagctgggaccacatgtgtttgccagcaacacccagctgatttttaaatgtttttatagagacacagtctcactatgttgcccgggctggtcttgactcctgagctcaagtgatcctcccactttagcctcccaaagtactggtattacaggcgtgagccactctgcctggccaggagggtgttttttatggtcaaccagatatagttggggtcagttccctggttatatatatgtaaccaggtggcttgctcttagaacttttgaatgttaacctcagcctgtccagagttgttaatatatgtgcagtcggtcttattgataacagtgcagactctacctttttcagtcagtaaacaatccaagactagtctgttgtcagggctacaattgccaaagagtccagagattcctgaatttttcttaatgtctgactagtgttggtggccagagattctagggcctgagttatgtttcttagcattgacttgtggtatgcaaagcccctgccaaggggccaccacccctattgctgccccaattcctgtaaaaattaatcctattgctcttttacttcttgtttttctagattttatggggttatgaatggataccccctgaagggataatggtggccaaaatacattcactggtgtttcaagtttttgataagcaaaatggaaagctattcctagaagaataaatggttccctacagggttgggagtgggtatggggtaggatttcttcccctaaaggtgagcccagatgggtcacaaattgaatccttgcaagttatgccgtccattttttattgccaaactgggtctatagagataccttttccaggttccaatgggggtgattgagtagccctcgttttccaccagagggtggtacctccatcttcccaaattaagcagtcgtttctcccttgcatgtattggtcctggaggaggcaccatgtatagtctccttgtttaccagtgggatcccgtttgccctcccatggccttgggaatttggctactagggttgggtcagagcatcgtggggaatttctgtctctgtgtcattgtcacaacaatttgtgcaaaagatagtatcattagtacactggagctgtagatacccaacatcctaggtccaggtaatagtagggggtaggagggtggttggagaggagtcaggtcaatctgttaagtgtgggagagagctgttttataagtaggggcctaggtaccaaaggaacactatggccaattaggaggtttggggagatggctgtgaggtttgcagggtgcaccagaaggtgatgctctctatcctgagggtgctgatgacagattctgcaatcatgcaggctatttcctgatgctataattctagaaatgtttactatggagttttgttcccattccacagcgagttagattgattaggagcagggagcaagaagaacagggacaactgagtatcacactgggctttagggtggtccctatactcaataaggacaagtaaggtgtttctcaggaggaggtggttgctacttatctgtcttgtgaaatagcaactttaagtcttccagaggtttgcaggtgtaggtcatggtgtcctcctcttgtgcctgtagggattcaccaaaaacaggtttgtttaatccgggacaggtgtacctagctagtgattccccgaagtttaacagcagtgggagtgcttaacaatacctaatggggagtgggtgcccttccatattggttatattataattgatcttcaaggaatccttctttccaagttttttttttttgagatgaagtcttgctctgttgcctaggctggagtgcagtggtgctatcttggctcactgcaacctccgcctcccgggttcaagtgattcccctgcctcagccttctgagtagctgggactacaggcatgtgccactatgcccagctaaattttttgtattttactagacacagggtttcaccatgttggccaggatggtcttgattccctgacctcgtgatccacccacctcggcctcccaaagtgctgggattatgggtatgagccactggcccggccctttccaagttttttttttttttttttttttttgagatggagtctcgctctgtcgcccaggctggagtgcagtggcacgatctcggctcactgcaacctccacctcccgggttcacaccattctcctgcctcagcctcctgagtagctgggactacaggtgcctgccaccatgcccggctaattttttgtatttttagtagagacgaggtttcaccatgttagccagtaaggtctccatctcctgatctcgtaatccactcgccttggcctcccaaagtgctgggattacaggcgtgagccaccacccctgccccaagtttttaataggactaggtgtcctggttaaacagggaacaatcttttcctttgtgggaaagggcaatactttattttcatattcttagagtgccttttgaacctggtctcttaagttccaaaggggagcggggggaaggtatagtgaggcttgtccaaccccttgtttcttgtcatggcctgaattagtttttcaagtttctttttttttttgagacggagtcttgctctgtcactcaggctgtagtgcagtggcacgatctcagctcactgcaacagccgccttccaggttcaagtgattctcctgcctcaggctcccaggtagttgagattacaggcgttcgccaccacgcccagctactttttgtatttttagtagagatggggtttcaccatgttggacaggttagtctccaactcctaacctcaggtgatctgtctgccttggcttcccaaagtgctgggattacaggtgtgagccactgcatccagctgccagaggcaatattgctggccaagcttttattttgttccataccaatgctgaggtggtgtgctacctgccccaggtccctcatgtcccttggtgggacgctgatggccaagggacttagattcaagtgacttatagccaattaaacattgtaggccagatggaagtggaggtaggcaggcactcattattatctcttaaaaccccttttaagcaatataagagccaaaaccagaagccaaaaaataaggttataaaactgacttatctataaattctgtgcattgagctattgtaatcttggcttgcagcaattaggtttacaaaacacaaacattttgttcagctatttaggtatctgtgtgcctgtccttgatttggaaggtctgaattaattatatccctcaaaacccagcccctataatctctcatgcccacctcttcagtagtccttgggcctggaggaattgaatagttttaaattctgtagataaaacaacacataaagaattagcaatgtttcaaacaaaaaagtcataagccctgccctagttttgagaatgacaggaaaggaatcttacaggtacctaaacatttaaattatttagtatcaaggcatagaataagttatattaattcatatagaggcaaaattattaaatgaatacaagcttgtccctgtgtctcattaaagcagtttactttttttttgagactgagtttcactcttgttgcccaggccggagtgccatggcatgatcttggctcaccgcaacctccgcctcccgggttcaagcgattcccctgcctcagcctcccgagtagctgggattacaggcatgtactaccacgcccagctaatttttgtgtatttttgatagggacggggtttctccatgttggtcaggctgatcttgaactcccgacctcaggtgatccacccacctcagcctcccagagtgctgggattacaggcgtgatcaactgcgcccgtcctaaagcagtttactttgccccttttgcccaggtctaaagacaaggctttggttaacttgagtttggtgttagatcctggcaagagttggtgccttctctagatgagctgtctgtacccaggagtcaaagccctgtaactcaaaagcacattgattagttaatagcacccgataaggaactttttaaagggctggcagtggtaatgctggagtccacaacctgtcaggaggctgtaaaaatatatcacaaccttgcagtgattagtttttatagctttgataaagcccagcaacaagccagacaatcaagctaggattcgattctgggggcatttgtaaaagatgttaaaaagcccaaaatactgtattgacacagaaccacaggttactgtaagtaatagttacttatttacccaaagtggtaatctctctgcagtgtaattgtctctccttatgggaagcccacttaactaatcttgaagttaaatttgatgaagagaaaaataatacttgaatttaatcggacaaagtatgttcaaggttttgaatatagcaggtgaacatgaaaagttttctggttactctgaaaatttagacatgtcaagaaaaaccaagagtatagaatcaagttatactggaggaaaacattgcttttatagacctctaagctaaaatatttcagcatctgactgtaaaaacagaactggaagagaaaaagttacagcaactgatgaaaaggttgaaggagagactaatgtctcaggctttctcaaggggagaaaaagctgaaagcagtgagatagaacaattgaacttatgagatatgaatctgagaaattttcaaaagaaacaagttatagaattgaaaagcaaattttcttgtaatttcattaagagcaaatcaataccttgaaacccttactttaacataggagaccattctttagaaagattccacttttaattatagctaacttaatcacataaacaattctttttataaattctcctttataaatcttatgacctgcacagaccatgtatgatatggttgaatgaactttctgacttgtccaatactacctttttttttttttttttgagacagagtctcattctgttgcccagactggtgtgcagtggtgtaatcttggctcactgcaacctccgcctcccgggttcaagcaattctcctgcctcagcctcaaaagtagctggaattaacaggcgtgtgccaccacacccagctaatttttgtattttttagtagagacaaggtttcaccatcttggccaggctggtctcaaactcctaacctcaagtgatccacccaccttggcctcccaaagtgctgggattacaggcataagccactgtgcctggcctatactacttttcctaaataactagtcattctactactctagaacaataccatataagatccttttttttttcccactgagatctgcaggattctttcttatgtagaattattctcttttatttataacctttcttaccaaaaatacctctgaacatccataactttctttacctatctctcccctacttactggttcctttctacctggttatataaataaccttttcaagtccataatttgaatcaacctttagataacttttgaattagacacaattattctttttctcaataaaaacacatcttctttggtaagttttatataaacctaagaaggaagaaatcctgaactatcagatattagcattttatagatgagaaccattccacagtttttaaaattttttattttattgtaaaatgtttccctatataatattcctttcttaattggaaatgacccaggcatccaataagcatccaaaacgattttaagattttaaattatacaaaaagttcacttataagcatttatctcattatatttacctaatttattattattatttataattttttttctttttttttttttgagacagagtctcactctgtcacccaggttggagtgcaatggcataatcttagcttactgtaacctctgcctcccggattcaagagcttcttgggcctcagcctcccaagtagctgggatgcatgcaccaccacgcctggctaatttttgtatttttagtagccatggggttttgccatgttggccaggctggtctcaaactcctgacctcaagtgatccacctgccttggccacccaaagtgctgggattacaggtgagagcccctgtgcctagctggaactatattagacaaaattggtcattattcaaagttatttcctggttaaccatttttaaactctgaacattaggtgaacccctaagtaagaatcttaaacacatgggcattttgccagtaactgagaagattcagctattttcattgagccaacaatcttaaattcgtcttatttatacaattctgaagacatttctatttccatcaattatttaatttaattaattaattttttgagacaaggtttctgttgcccaggctggagtgcagtggcatgatcacagctcactgcagcttccgcctcttggggtcaagtgatcttccacctcagcctcctgagtagctgggactataagtgtgtgctgtcacacctggctaattttttttgttttgttttagagatggagtctcactatgttgcccaggctggtcctgaactcctgggctcaagcagtcctcccaccttagcctcccaaaaggttgggaggtgtgagcgacagcacccagtctttattaataatttgaaaacaagttttatttaccaaaggattcatgtgaacttgaaaagcctttggactttattaaagatagctggatttaaatatttctgacaattttgaaacctgttcacatggctaaactttttttttctaataggtaatccaaggaaactgtagactagaatttgggtaaggtagttttcataacagttttaattttaaaaccctcttttatccttttttcccccttcagcttcagaggaggaggagatgatttaaaagggcaggaaagaaaaagagggaaaggagggagagtagggggatgaggggtacctttccctttgtttctctggtgggggagagagagagagagagatacagcaagccagaacactcattgatggatgaagggtcaccttaccatgacaacttcaatatcagatatcttggacccaagaccttgggactgtcccagggacccacaatcctagagagacatgaaccagtagaagtataataaaagaagactgaaaaggcagaaagggaaaggaagctaggaaaaacaggctcccgtagcagcaaatgtgaattggggaagagaggggttgttgttcagggcgtgtccttggagtccctgagacagtggagaactcacccatcagtggagacaccaaaaaaagtgttcaggcggctgcttttctgccattgcagggagtcgtcattaggtcaggggttcagggcctccagaaaaatgggcttgaacaaggcagctcatttgggaccctcattttgagcagaaagaaagacaggaagagacctgttgcagaaaagaaaatttatgattttaggagggactagaagaagttgctgaagtggatggaatgacagagtaaggaaaaaaatgaaacggcaccaaatgctgaaaaacctggagtatctagacattggccagtgagggtccccataccaaatgctgaaaacctgggggtggccaacagtgaggcccaaaggcatgagacctaacacagttggggccatagaataatgtgactctgacatcccagagtcagcacaaaggaatacctctcaaaataacaaaagcctgccttacatggaatagaaacaactgcccaaattgccaaaacagggactacaaacatgacaactggataaacataagtgtgcatttaggcactaagagcagaaaagtaaaatgactggtcattagaagctaaagagaaaaggtctgagagagaaggtgacaaagtaaattacaaaggacgtggatgtccaggtgtgcttctgtctggggcacccagatgatgggggacaacgaactgactaacaacccagagacactattccccatttcctgattgatttgaaaaggtaaagggagaggagagtgaaagagaaagtaaatcagttaaagaacaccacatcggccaggcgtggtggctcacgcctataatcccagcagtctgggaggccgaggcggggggatcacgaggtcaggagttcaagaccaacctggccaatgtggtgaaaccctgtctctactaaaaatacaaaaattagctgggtgtggtggcaggcacctgtcatcccagctactcgggaggctgaaagcaggagaatcgcttgaacccgggaggcgaggttgcagtgagccgagattgtgccactgcactccaccctgggtgacagagcaagatgtcgtctcaaaaaaaaaaaaaaaaaacgaaaacaaaacacacattgagggggaacaaaggggacactcatcttttcgtggaggccaaatggtgccagtcagtctttgggttcaagcaattctcatgcctcagcctcccaagtacctgggactacaggcgtgcaccaccatggctggctaattttttgtatttttagtagagccggggttttgctctgttgcccaggctagtatcgaactcctgagctcaggcaatccacctgccttggcctcccaaagtgctaggattacaggcgtgagccacggtgctcaacccaatcagtcttaatttagggtctggctaaaggtctccctcagttccttttggcttattattggtctcttcatggtcaccaaggaatgacgcaggtgaaccccaaattggggctcagcccaggagcattcttggcttcgcactggaaggaatcatgaatgggccaacagtgaattgaaagtaagtttattagagcaacagaggaagggaaatggctgctctgtaagagaagcagccgcagcagcagacctgcggattgctggctagctgtatgtatacaaagacaacatggaaaaaaaatgaaacggtgccaaatgccaaaatacccagagtatccaggcatcagcccatgagggtccccataccaaatgacgaaaatcccagagcacctagggggtggccaacagtgaccctcaaaagcatgagacctgtatagccatatatatatgggtatactttgattatatgctaaaataaggggcagatttttttttttttttaattgatcattcttgggtgtttctcgcagagggggatttggcagggtcataggacaatagtggagggaaggtcagcagataaacaagtgaacaaaggtctctggttttcctaggcagaggaccctgcggccttccgcagtgtttgtgtccctgggtccttgagattagggagtggtgatgacttaacgagcatgctgccttcaagcatctgtttaacaaagcacatcttgcaccgcccttaatccatttaaccctgagtggacacagcacatgtttcagagagcacagggttgggggtaaggtcacagatcaacaggataagaatttttcttagtacagaacaaaatgaaaagtctcccatgtctacctatttctacacagacacggcaaccatccaatttctcaatcttttccccacctttcccccctttgtattacacaaaaccgccattgtcatcatggcccgttctcaatgagctgttgggtacacctcccagacggggtggtggccgggcagaggggctcctcacttcccagtaggggcggctgggcagaggcgcccctcacctcccggacggggcggctggctgggcagaggggctcctcacttcccagtaggggcagctgggcagaggcgaaggggcggatttttaatggattttctggaaaaggggcgaggacttcccggaactgagagtccctccccttttaaaccatataaggtaacatctgggggttgccatggcatttgtaaactgtcatggtgctggtaggaggttcttttagcatgcagataaaaggagggcaacaggaggtggctttcatcaccatcttgcttttagctggttttggccagtttctttgatcagctcctgttttgttcagcggggtctttcgaacagtgcttggaaaacaagtcctgctgatctcctacctcaaatggaatgtgaggtgacaatagggccagcaagcaaaaatagaaatctgagattgaagtttagtaagaggcaaggactagaaatgttcagtgttagtcatggttcttctccatggaaacagacatggagggggaagagcagtggattgaagacaaccttgccttgaggaagaagataacagagaaggaacaactggagaagtaatagtaaaagtgaaaagaggaaggagagctttaagaacaaggtactttaaaatgtaaatttaaaatttagtagcaaaggagggataaggataatacctgagaaaaaggttacatttgaagattgatgatcttggagagtagattcaggagtttgttggggaaaggacattatatgaagcagttaaagaggaaggaatggggctgggaacagtggctcacacctgtaatcccaacactttggaaggccaaggtgtgaggatcttgtggccaggagttcaagaacagcctgggcaagatagctaggttccatctctacagaaaattttaaaaattagccaagtgtggtagtgcatccctgtagtcctagctactcaggagtagctagggggatagcttgagcccaggagttcaaggttgcagtgagctctgatcgcaccactgcattgcaacctgggtgacagagcaagaccttgtctgtaaaaaaaagaaaaaggaggaggaatgaaaccccagagatttttctttctttcctctcccccatccccctcctcccctcctcccttcctcccctcctcctctcctcccctctcctccccactctcctcttccctcttatccccttccctcacctcccctccccttccttccctttttttttttttttttttttttttttggagacagagtctcgctttgttgaccaggctggagtgcagtggtgtgatctcggctcactgcaagctccacctcccgggttcacgccattcttctgcctcagcctcccgagtagctgggactacaggcacctgccatcatgcctggctaattttttgtatttttagtagagatggggtttccccgtagccaggatggtcttgatctcctgaccttgtgatctgcccgcctcggcctcccaaaatgctgggatcacaggtgtgagccaccatgcctggccttccttcctttttttgcagtgggagaatgggtgagaaatagctagagaaggcagcgagattattgcatattttttcaagataagttgtcagaaggaactggaggaaattataagattaaaatgctagagaaggaatggataaataactatgggttcatagtcactcagttattgataagtgtaattaagagattttaaaaatcagttcacagatatccggatttaaataaacatttattgtttagtattatctgtgatatcactccccttcattaatctggagaactgaaaattgattatactactttgcactttaattagttgtatatacaagtaatagcaataaaagtacactatgagtgtctctccagaatttttcttcaagtaactttttttttttttttttttgccaatcagataatgtaacacaaaacagagaggaagaaagaaagattgacaattcacatatatctactttggaaaatattgaaaactttaaaggagaaaataaaaatcacccgtagccctgctgtttagtatgtgtttttgttgttttactttcttttaagtaacattttagttttctgattatgaaagcagcagcatcatatacactgtagaaaaaatgaaaatacatagaaagatagttggattattttcaagtattgacattttgttacaattgatacctttttgttgttgttattgtttgtttgtttgtttgtttttgagacagagtctcgctctgtcacccaggctggagtgcagtggcatgatcttggctcaccacaacctccacttcctaggttcaagcaattctcctgcctcagcctcccgagtagctgggattacaggcgcctgccaccacacctggctaatttttgtattttcagtagaggtggggtttccccatgttggtcaggctggtcttgaactcctgaccttgtgatccacctgcctcggcctcccaaagtgctgggattacggtgtgagccactgcgctaggcgcaccttgccgggcaatacattgttaaatcatgtttcttttttctttttttttctttctttttttttttttttttttttttgagacggagtcttgctttgttgcccaggttggagtggagtgtagtggcgtgatcttagctcactgcaacctccacctcccgggctcaggtgattctcttgcctcagcctcccgagtagctgggattacaggcatgtgccactgcgcctggctaagttttgtatttttagtagagatagggtttcgccatgttggccaggctggtcttgaactcctgatctcaagtgatccacccacctcggccttccaaagtgttgggattacaggctggagtgcagtggtgtgatttcggctcactgcaagctccgcctcctgggtttgcattgtccagcctaaatcatgtttcttgactgcaggtattagtgtttaaaccttttctttatttattttttttaaagagatgaggtctcaccctgtcatccaggctatagtccagtggtacgatcatagctcactgcagcttctaactcctgggctgaactgatcctaccaagtaactggcactataggcaggagccacatcatccagctaaaaaaagctgcgactacagacctgcaccaccacacccagctttttttttttttgactttttgcagacacaaggtctctataagttgcccagcatagaaatgttttttgtttgtttgtttgtttaacaggtgaggtctcataattcactgcaacctacaattcctggccttaaatgatcctgctgcttcagccttctaaagtgctgggcttacaggtatgagccactgggctcaactagaaataactttttatttatttatttatttatttatttatttatttatttatttatttttaacgagacagagtcttactctgtagcccacgctagagtgcagtagcacaataatggctcactacaacctctaactcttggcttcaagtaatctttctgccttggcctcccaaaacgctggaattacaggcatgaagccacacataacttttttttagacagggtcccaccgtgttacctaggctggagtacagcagtgcaattacggctcactgctgccttgacctcctaggctcaagtgattctcccaccttagcctcccaagtagctgggactacaggtgtgcaccaccatgcctggctaatttttgtattttttgtcgagatagcgtttcaccacattaaccaggctggtatcaaactcctgagctcaagtgacctgtccacctcagcctcccaaagtgctgggattacagccatgagccaccatgcccagcccacaaattactttttaaacaagcataccagaacttttaaatctaagcaagtattgcccttcaaaacacagagattcactttggtaggcagagcctcttccactgacatttttactacttaaaaaatatttggggtcaggcatggtggttcacacctatccctgtacattgggaggctgaggtgagaggattgcttaaggccaggagttcaagaccagacttggcaacatagtgagaccccatctctacaaaaataaaataaaattagctgggcatggtggcaggaacctgtagtctcagctacttgggatgctgaggtggaaggatcacttgagcccaggaggttgaggccgcagtgagctgagatcgtaccactgcacttcagcctaggggacagagcgagaccctgtctcagcaacaacaaaaaaattggaactacttggccaagtgcggtggctcgtgcctgtaatcccagcactttgggaggcagaggtgggcggatcacctgaggtcaggagttcgagaccagcctgaccaacatggagaaaccccatctctactaaaaatacaaaattagctgggcgtggtggtgcatgcctataatcccagccactcgggaggctgagccaggagaatctcttgaacccgggaggcggaggttgcggtgagctgagatcgtgccattgcactccagcttaggcaacaagaatggaactccgtctcaagaaaaaaaaaaaattggaactgctttttaaaactgtccctgcagggctgggtgcgtggctcatgcctgtaattccagcactttgggaggcctagagggacagattacctgaggtcaggagttagagaccagcctggccaacatggtaaaaccccatctctactaaaaataaaaaattagctgggcgtggtgacacacgcctgtaatcccagctactcggaaggctgaggcaggagaattgcttgagcctaggatacggaggttgcagtgagctgagatcatgccaccgtactccagcctggcccacagagcgagactctgtctggaaaaaaaaaaaacaaaaaaactgtccctgcaagcacattatcagctgcaccacaaaatcatttttcatactctagaggaaatgttccttttttctacaacctttttttcccctctgactccacaatgcttttcaatttatttccccttcctagagccctttaggaccccaccttcctttatagatatgctggatgctaaaagacctcagaaagagaagctgagcagaataagagaaatagagaaagcaaaccttattcagagcatatctgtaacttatgtactgccagcctgagaactgtatgttgataacatcaaaattattattttttaatttatattgtttattttttggagacagtgcctcgctctgtcgcccaggctggaatgcagtggtgcaaccttggctcactgcaaccttggctcactgcaacctctgcctccccggttcaggtgattctcgtgcctgttgaatagctgggattacaggcacctgccaccacggctggctaattttttgtattttagtagagacgaggttttaccatgttacccagcatggtctcaaactcctgagctcaggcagtccgcccaccttggcctcccaaagtgctaggactacaggtgtgaaccaccatgcctggctgatcataacatcaaaattagctgagaacagtacaaatcaactaattataagctaaaatcatgctactcacttttaggaggcaaagaaaggagaagcataagtggaaattagggtatgtaagtcaaattcagaagaacaagtaaaattctattagaataaacaccattaaagcagaagatttagctggatggtgtgatggaagtaagctataacaatgctactgcactccaggctaggcgacagagtgagacccaagtataaagactggccatgtgttttgaaagaaaatgttcaactaagtaatacacaaactagggaaaaaattcagaaatataaaaagtacacagtgaaaatttaggcatcctttcactttgtactcttgctccccaagtcctcttcccaggtaactgttaaacaattttttgtgtatagtccagggattttctgtatatatgcaagctatttccttgatagcctgatttctgatgtttaccatttttttttttttttttttttgagacagagtctctctctgtcgcccaggctggagttcagtggcgcgatctcggcacactgcaacctccgcctcctgggttcaagcagttctcctacctcagcatcctaagtagctgagattacaggtgcccgccaccatgcctggctaattttttgtatttttagtagagacggggttttgccgtgttggccaagctggtctcaaactcctgacctcaagtgatccacccatctcagcctcccaaagtgctgagattacaggcgtgagccactgtgcccagcattcttttttggtttgtttgtttgttttgtttgagatggagtttcgctctgttgccctggctggagtgaagtggcactactatcttggctcactgcaacctctgcctgccaggttcaagcgattctcctgcctcagcctcccaagtaactgggattacaggtgcctgccaccatgcctggcttatttttgtattctttttttacagccgaggtttcatcatgttggccaggctggtctccaactcctgacctcaagtgatctgcctgcctcagccttccatagtgctgagattacagatgtgagccactgcgcccagcctacttttaatactacatgaatatttctttgcgtgtgtgtgtgtgtgtgtgtgacagtgtcttgctctgacacccaggctggagtgcaatggcatgatcacagctcactgcagccttgaactccagggtccaagtgattctcccaccacaccctcctaagtagctgggaccacaggtgtgtaccaacacacccagctaattttagagctctatatttttgtagagacaaggtatctccaaatgttgctcaggctggtcccgaactcctggatcctggctaaagcgatcttcctgccctggcctcccaaagtaatgggattacaggtgtgagccacctggcctagcctaattttttatttttatttttagtagagacaaagcctcgatatgttgctcagactggtctcaaactcctgggttcaagtgatcctcctgcctcagcctcccaaagtgctgggatgatagtcatgagccacctcatgactataagcacctggcttttttttttgtgtgtgtgtgtgtgtgacggggtcttgctgcgttgtccagtctggagtgcagtggtggaatcgtatctccctgtaacctcaaaatcctggcctcaagccatcctcccagctcagcccccccaagtaactaggactacaagcatgcaccatcaccccttttttctctgtctttttaatgctagcctcacctactcccctcacaaagggagtgtttatgaagtgttgaggtgagaaagttgtctaatgaactgtagaaccatatatttacaattttatggtgacagttactcttctgctctgccaaattgatttacaaagtcagggcattttatgattatatttatagttgatgaaatatggtgttaatggtcatctatataaaatgtcatcaggaatttcctttacaagtctgatttttcataggaaaaaatgcaaaactgaaagcatattagaaataaaaagacctcagcaattacctagtttaactccctgagtttacagatgagtaaattggatctgagctttgatttaagagaggaaaattcctatatagtatatgcttaattcatgaagttgtctacctaaaaacactataataagatgctaaattctacaacagagtatgactgagaatggtcaaagtgtggagcaatatttgtgattcttccagggaaacctcaaatgaattctgaaggggagataccttccctgccatcaggcagccaatctgcaaaaccagtaagccagcccaggaaatcaacccagccagatgtttgtgcctctcctcaagaaaagccactcaggactctgtttcaccaacctgaggaagagatagaagatggtggactcttcattccaatgggtaggctttctttttctttttaattaaatgaaacctctttattgaagtataatatgtagaaaactgcacatgtcctaagatatcctgaattcactatatttttacaaatttaatacacccttgtaagcaggacccagatcaagatagagaatgttatcaatacccagaagtccatcttgtcttccctttcaattaccctctacccataggttaaccactatcctgatgtctagcatcatatattggttcaatttttttttttttttttttgagacggagttttgttcttgtcgcccaggctgaagtacaggggcgtgatctcggctcacggcaaccgctgcctcctgggttcaagtgattcttctgcctcagcctccggagtagctgggattacaggtgcctgccaccacacccggcttaatttttgtatttttagtagagacagggttttgctatgttggccaggctggtctcgaactcctgacttcagatgatccacccaccttggcttcacaaagtgctgggattacaggtgtgagccactgcgcctagccagttgttctgtctttttgtcttttatttgaatggaatcgtgtgtacattttataactgcctttttttttttaaagacagggtctcactctgtcactcagactggagtgtagtggtgccatcacggcttactgtggccttgacctcctgggttaaagtgatctttttgtctcagccctaagtagctgggactataagcgcgtgccgtcacagccagctaattttttttctttttttttgagacacagtcttgctttgttgcccaggctgctggaatgcaatggcttgatctcaggtcactgcaacctccgcctcccaggttcaagcgattctcccgcctcagcatccctagtagctgggattacaggcacctgccatcatgcccagctaatttttgtattttttgtagagacggggtttcaccgtgttggccaggctggtcttgaactcctgacctcaggtgatctgcctgccttggctttccaaagtgctgggattacaggcatgagccaccgcacccggcccagccagctaattaaaaaattttttttgtagagacggagccccactatattgcccaggctggtctcaaactgctgtgctcaattgatcctcttgcctcagcctcccaaagtgttgggatgacaggtgtgagccaccgtgcctggcattgtgactgcgtttattctctcaattttttttttttttgttttgagacagagtcttgctctgtcacccagactggagtgcagtagcgcaatctcggctcactgcagtgtctgccttccgggttccagcgattctcctgcctcagcctcctgggtagctgggattactggcacggccaccatgcagggctagtttttttatttttagtagagacgggctttcaccatgttggccaggctggtctcgatctcctgacctcaggtgatctgcccgcctcggcctcccaaggtgctaggattacaggcgtgagccaccgtgcccggcctcaacattgttttatgaaattcatccatattcttggatgtacttgtagattgttcatttttattgctgtatatcattctgttgtttgaatagtttatgtatgttttcttttctttaattttttttttagagataggtactgctctgtcacccaggctggaagttcagtgccatgatcatagctcactgcaatttgaactcctaggttcaagtgatcttcccacttcagcctccccagcaactcggactctaggtgcacgccacaatgcctggctaattttcatttttattttattattattatttttttagagacggttttcactatgttgcccaggctggttttgtatttctgggctcgagcagtccctccttgatctctcaaagtgctgggattacaggcatgagcctcctcacctggtttgctttacgttttctttatccattcaactctttgttttttctttttgcttccttgtgcccattgttacccattcaattcttcttcttcttttttttttttttttttgcgacagagtctttgttttgaaccagagtctcactctgtcgcccaggctggagtgcaatggtgtgatcttggctcactgcaacctccgcctcccaggttcaggtgattctcctgcctcagcctcctgagtagctgggattacaggtgcgctccaccactcctctgctaatttttgtatttttagtagagatggggtttcatcatgttggtctggctggtctcgaagtcctgacctcatgatccgcctgcctcagcctcccaaagtgctgggattacaggcatgagccaccgtgcctagccttttttttttttttttttttttttttttgatgtggagttttgctctcgtcacccaggctggagtgcaatggtgcaatctcggctcactgcaaccgcttcctcctgggttcaagcaattctcctgcctcagcttcccaagtagctgggactacaggcacgtgccaccatggccggctaatttttgtattatttttttttttttagtagagacagggtttcaccatgttggtcaggctggtcttgaactcctgacctcaaatgatctgcccgccttggcttcccaaagtgctgggtcacaggtgcaaaccactgcacctggccccattcaattcttgatgagcatttggatacttttcagttgtgggctactgtgagtggtgctgctgtgaacattctatagattttttgctgaacatgtgtacttctttttcgttgggtggaaatgctagcttataagtttgggcatccttaaaattcttttgaaatactaaattttttattgtgaaacataacacagacacatgactaaagacttctttatttgatttagcaaatggtttttttgtgtgtgtgtgtgaatcttgctccgtcgcccaggcttgagtgcagtggtgtgatctcggctcactgcaacctccgtctcctgggttcaagtgattctcctgtctcagcctcatgagtaattgggattacagggacacaccaccatgcccggctaatttgtattttcagtagagacgaggtttcaccatgttggccaggctggtcttgaactcgtgacctcaggtgatccacctgccttgggctcccaaggggctggaattataggtgtgagccactgcgtccagcctcactttggcaaatgcttttaaaatggacacgtaatttttcttattgcatattctagaccttcattgctatgtaggttgtaagtagtagtggtagtcgacatctgtgtcttatttctggacaaaacaggaaaatgttcagtattccttcattatatatgaggatagttataggcttttcatagaaatattttttaggttaaggaaataattttcctaagttttctgagttttttcatatattgaatttcatcaaatgctttttcctatctctattaagatcatgtttttttctctttcattttgttaatgtggtaagtttcattaggtttattgagatataaaataaaatgtatctgatgagttttgaaaaatatgtacagttgggccaggtacggtggctcacacctgtaatcccagagctttgggaggctgaggcgagtggatcacctgaggtcaggagttcaagaccatcgtgagcaacatggagaaaccccatctctactaaaaatacaaaattagccgggcgtggtggcacatgcctgtaatcccagcactttgggaggctgaggcaggtggatcacctgaggtcgggagttcaataccagcctgaccaacatggagaaaccctatctctactaaaaatacaaaattagccgggcatggtggcacatgcctgtaatcccagctactcgggaggctgaggcaggagaatcacttgaacccaggaggcggaggttgcgctgagccgagattgcaccattgcactccagcctgggcaacaaagagcgaaaactccgtctcaaaaaaacaaaagaaagaaaaatatatacagttgtgttaactgctaccacaaccaacgtggaacatttctgtcaccccaaaagttgcctaattcccctttgctatccccctttctcaaacattggcaagcactgatttctatttccatagttttgcatcttctatgcaaatgttctatacttgttataccgtcatataatatgtgtccttttacatctggtttctttcacagcataatgcttttgagatttatccactttactgttggctttctgggctaagttcctggagcagctattttggaattctgatgatgttcttggtttatttgcagaagaacaagacaatgaagaaagtgagaaaaggagaaaaaagaaaaagggtaccaagaggaaacgagatggaaggggtcaagaagggaccttggcatatgacctgaaactggatgacatgcttgaccgtaccttggaggatggtgccaagcagcacaatctaacagcagtcaatgtccgaaacatccttcatgtgagtaagactggggcagttatgtaaatggaagggaactttttcatggaaagcatataaaaatgttcagcaaattcttgactcttgatacgtgaattaccgattttgtgggttacccgtgacagaacattttacatttttacatatttaagatagctttctccttgcactcagtacaagtttgaaatatgaacacatgttaaagaagaatttaattggaaagataaactgttcctgtttccttccactgattttcatatttactgtattgtttagtagattcaatgttgataatgttcatagtgggtttactcttgtgggtcgatatgtctaaaaagatgcctggttaatagtttattgcactttgtacatatgtaaatacttttcttgatatgtagcaacacagctatttgcagagcctttgctcttgttactctttctcttaagcatatagttacttacctcaggatctccttttatgtgagccattcctgttcctagtagcagctaatgagattggttcatttgctgctacattgtttgaaactgtgtggttctggccaaaacttacttctgccttctttgctttcagttgccttgctttaccccagtctgatgctattcgagtatatggttctcatttgtcctgtacataggtctgacagttacatggagagatgagtattgtctaggtgacaaacccttgttgcataaagtgaaatttcatctttctccaggaagtaatcacaaatgaacacgtggtagctatgatgaaagcagccatcagtgagacggaagatatgccaatgtttgtgagtagttgattatcactcttttaatgtcttggaacagagttatctctaaactggctaagggtaggaggtcacttaggagtttgtaaacagtttggcagctggggttaaagttagcatttcaaaacataagaattacttggtaatttttacttattttatttgttattttattattattattattttattattattatttttttttgagacggagtcttactctgtcacccaggctggagcgcagtggcgcgatcttggctcattgcaagctccgcctcccgggttcaggccattgtcctgcctcagcctcctgagtagctgggactacaggggcctgcaaccacgcccggctaattttttgtatttttaatagagacggggtttcaccacgttagccaggacggtctcgatctcctgaccttgtgatccgcccgcctcggcctcccaaagtgctgggattacaggcgtgagccaccgcgcccggccttgttattttattattattatttttttagagacagggtcttgctctgtcaccaaggctggactcaaactcctaagctggactcagcgatcctcccagttcagcctcttgagtagctgggactacaggaacatgcgactatgcccagctaatttaaaacaatttttttgtagggagggtgtctcactctgttgctcaggctggtctcaaactccttgcctcaagccatcctcccaccttggcccctaaagtgctaggattataggcatgagccacctcactgagctgtgatttttattgaggatttcctttctgtttttttctccttaggagcctaaaatgacacgctctaaactgaaggaagtagtggaaaaaggagtggtaagtattctgtttttttgttgttggtttttttttagcttggtgaataggatctaattcacccatagggaaaaatataggaaagattgtggtctgaatttgcctctttaaagaaatatttataaaagacagtagaattgtttctacatgatcataagctatgataatcatagtttattttagtagatatgaagcattgctttttggaattgctagatagataaccatttggaatagttgaaatcaataggtgagaccagtttttctatttatgttacaacacatgttgcaaagtgtttagtatttttcatagtgtgttccaggggccagttgcataaaaatcactttggtgtgggatccctcaggcatgcttattaaaaatgcatacttttggctgggtgtagtggctcatgcctgtaatcccagcactttgggaggccgaggcagatggatcacttgaagtcaggagttcgagaccagcctggccaacatagtgaaactctgtctctactaaaaatacaaaaattagctgggtgtggtggtgtgcgcctataatcccagctgcttgggaggctgaggcacaagaatcacttgaacccgggggcggaggttgcagtgagtggagattgcaccactgcactacagcctgggcaacggagtgaaactgtctcaaaaaaacaaaaacaaacaaaaaaatctccatacttttgagcccaccccagacctgagaatcaggacccatgggcagggccttggaatatgcattggcaaaaacacaacagttaattcttttgaatactaaagtgttgagaaccacttgaagacatctgaagtattctgtgcagcaagctctttggtgcttggagctgtgctatatccttcttaataagcacttgactagtttgtgcttacaaggcaggtaatagtcatgagggagttcattatatttctgatagtaaggaagatttgccttacagaccgaaaatatgtatcataggttttatctgtcctggttttattccttggagactgatagaagaaacaggtctaggctgggcttggtggctcatgcctgtaatcccagcactttgggaggtggaggtaggaagattgcttgaagccaggagttcaagaccagcctgggcaacgtaatgagaccgagaccttgtctagaaaaaaaagcaagaaaaggaattggtgtattcttccacattacttttcctacagttgaagaaaactagtatgttatttcataacattcttttcttggctatacatcccccaatttctccccccctttttattttgggagtcttgcttcatcgtccaggctggagtgcagtggcacaattctggctcactgcaacctctgcctcccaagctcaagtgattctcctgcctcagcctcctgagtagctgggattacaggtgcgtgccaccatgcccggctaatttttttgtattttttaaaatttttattagagatggggttgcaccatgtttggccagcctggtttcaaactcctgacctcaaatcatctgcccgccttggcctcccaaagtactgggattacaggcatgagccactgtgcctggcctttttgttttgagatggagtctcactctgtcacctaggctggagtgcagtggtgcgatctcagctcactgcaacctctggctcccaggttcaagcgattctcatgcctcagcctgctgagtagctgggattataggcatgcaccaccacacgcatctaatttttgtagttttagtagagatggggtttcaccatgttggccaggctggtttccaattgacccatgtgatcgcccgccttgtcctcccaatgtgctaggattacaggcgtgagccactgtgcccgtcccatatccttttaaaagtatgccaaaagaagactctactgaaccagatatggtttgactagtagttagattatctccacagtgttccagattacatatttctcctaatgtagcctaaggtcaaattgacctttgtttttggcaatcacatcactttttttggtctggttgactaactcttgttgcataaattgaaatttcatctttctctaggatgtgttcacaaatgaataggtggtagctatgatgaaagcagccatcagtgaggaagttctatgaagtctacttgacatatagaatataattaacatggctgggcacggtggctcatgcctgtaatcccagcactttgggaggccgaggcagctggatcacctgaggtcaggagtttgagaccagcctggccaacatggcgaaaccccgtctctactaaaaatacaacagttagctgggcgtgtggtgggcgcctgtaatcccagctacagagacgagaggatcgcttgaactcaggagggagaggttgcagtgagcggagaccatgccactgcactccagcctgggtgatagagcaagactctgtcttaaaaaaaaaaaagaatataattaacattaattctttatttgatttggggaaaaaaaatccaaggagatcaaattaggctctgaattatgtttattggccatgaatatagatgtggagaagttgggccatccaagacggtatagtttacgtaggagagcaagtattaaaatgtaggtctcttgcttcttaattctttctttttttttttttttttttcagtgacttgctctgttgctcaggctagagtacagtggcctaatcatagctcactgcagccttgaactccttcctgtgctcaagggatcttcctgccttagcctcgcagacagctaggcctataggcatgtgccaccatgtccagctaattggtttttttgaaacattcttttgtagaaatagggtcttaatgtgttgcccaggctgaactcaaactcctgggctcaagtgatccttctgccttgatctcccaacatggggggattacaggcatgagccgctatacttggccttcttaattcttactagactgactccaacacacttctgaatgctggcttgcctttctaatggatttggcagtaggtaggaaagggaaatgggcctgaatcacatcattccctttaccctatattggtcccacctacacagcactagataaatggtcagaacatagcagggctgatttgatttgagaagctaagactccttttagagacagaacctaatggccagttggcttttgttcataaggtgcttttggttgggttacaattaaatggtcaagaaattatacatcctcaatggcattttatcagcagtatataagaactttaaaaaagttctttaggctagatgtggtggctcacacctataatcccagtgctttgagaggctaaggtgggaggattgtttgagcccaggattttgagaccagcctgggaaacctaatgagactccatctctacaaaaaatttaaaaaattagtgaggcctggtgaggaggcatgcctgtagtcctagctaattagtaggctgaggcaggaggatcgcttgagctcaggaatttgaggctgcagtgagctctgattgtgctgctgctctagcctaggcaacagggcaagatcctgtctcaaaacaaaaacaaaaacaagaaaaactttccccctagctcttataaaaattttcaaacattcaaaaagttgaaagattgttacaatgaatctaaattccaagagtaatattttgccatatttgctttatatctctctgtgttgttttttcctgtactattggaaaaataagtgtggacaacatgaaactttgccctaaatgccctggtaaaagcttttttttttttttttttttttaagaaaaaaaaaagcccataggcagagcagggctaccccataggcagaatagtccataaaagcttttcatggctggctttttggagttgtacttatggtggattcatgtaactgattacaaaaatatattgctgttaaaagactactgtaaccaaaatatcttaggtttgtgtagtttaatagtttataaatagttgtcacatctgttgttccatgtaaaccgcagctgtgatatgaacaaggtagacattgttttcttcatttatagaaagaagtgaggcttaccaggtgtaaggcagaaatgctaatgacagtaatagattctttcctggtttcttctttctaactctgacaaataattgagagtataccctcagggataatcaacacctctagatcactgcagttacttgttaagtatatggctgttagtgatggtacagaggaagtaaacatgaaaaacaattatttcagttaagataacttaattatttatattctttgttggtaggtaattccaacatggaatatttcaccaattaagaaggccaatgaaattaaggtaaacttggaagaaataattgttattcttttccagaaagacttcatcggttttgaaacttaagtacttcctctttaacttttcttgatcaatctttgttttaattccagctttgtttttttccattctattactcttaggtttgtatctcatggaattcactttaacctctgcctcgtgttatttgctttagctgtacattatgctcttaggattttttttttttctgccctgcttcttccccttattttccaaatacgtatgatttgtgtttcccattacttcatttctttctaattgtactaatgtagcctcctcagtttgtggatatccaccttgaagaagatgattcctcagatgaagaataccagccggatgatgaagaagaagatgaaactgctgaagaggtcagtgaatgttagttggtaatatttgtcttaatagagcagggtatactttgcttccttagtaatgtcacttgtagagaggattgagacatggttcttttttcagctcatttctgtgctttaagctgtttttctgccctttatactcccttaattttagaatttgttgtattatgaaatacagcatagaaacgtgcatagaataaaaatgtatagctttggttattataatgcaaatcctcatgaaactcatagcaaagtcaagaaatatatcattactaggacaacccctgtataccctccccagtcacaatcacctccctccccctaaaaataaccactaccctgccttttagtaattatttctttgcttttctttatagttgtatcacctcaatatgtatctctacacactgtagttcaattgttactgttttgaactttatataaatggacccatgtttatatgttttgttcctagctttttaaaattcaacattaagcttttgagattcatttatactattggttttagctatacttcgttccctttcattgctgtgttaatatgttctttgacttgtttcttaatgtgttctttgaattgttttgtaaaaggattttagaccaaggccttacactttgtaatgcagattaggatagtgatctgatccctgtccccacctttaggattttttttttgagtctcctctgttgcccatggagtgcagtgtgcgatgttggctcactgccatctccatctcccgggttcaggcaagtctcctgcctcagcctcctgagtagctggaattaacaggcgtgcgctaccatgcctggctaatttttgtatttttagtagagatggggtttcgccatgttggccaggctggtctcggacttctgacctcaagtgatccacccgcctcggccttccaaagtgctgggattacaggcataagacactgactgcacctggcctttaagtttctatttaaattttattttctgttactgtaactagttgagtgatggattttatttatttatttatttatttttgagacagagtctcgctctgccacccaggctggagtgcagtggcgtgatctcggctcactgcaacctccatctcctggattcaagtgatactcctgcctcagcctcccgagtagctgggattacaggtgcacgccaccgcgcctggcttatttttgtatttttagcagagacgggtgttcaccatgttggccaggctgagtgattgatattttatgattccttctcttgagatacttcagactttgtggaatgaggtaggggcataaatattaaggcgaactggatttattttgtagagcttattggaaagtgatgttgaaagcactgcttcatctccacgtggggcaaagaaatccagattgaggcagtcttctgagatgactgaaacagatgaggagagtggcatattatcagaggtaaatcggcatcatacaaaagagatgttagacataactgtctaagtagattttttaactgtataagtagattatttatccatggtgattctgggctgtcaccctttttcaaagtttcttaagttagtaaacagttcagagaaggctagaactcagtgatagccaaagaacttttctgagttctcattaaggggccaaaaatgtgcaactagcagagtttcttttctcctacccttctcttctttcatatctgtgctttttaatattgtcctaaagccattgttattaatttcccacattttggtaaactaagtagcattctgttgacttctctagaaataggatgaaaactaattagatcaatacacttggtgtctttgtttttatgtaactctaactagagaagagaaaggacaatggtgtatggaaagtctgcctctttttccctctctttttttcctttttttgctttctctttctttcttacctccttccttttttgatgcagtcacctcttttaatcaggctgagaaagtcaccacaccagccatcaggcacatcagtgctgaggtagtgcccatggggcccccgccccctccaaagccgaaacagaccagagatagtactttcatggagaagttacatgcggtagatgaggagctggcttccagtccagtctgcatggattctttccaggtaaatattaaaactgtacttaactgagaaagtcaagtggagtaatgtagttgttgctcaggctgggaagggagaggaaaagataactacaattttatataagtaagagttagtctttgatactttgtatttggctagtgctattttctgctcaaagtgacaatggcagtttggggttttttttgtttgtttgtttgtttttgagacagggtatcaccctgtcacccaggcttgagtgcagtggtgtgatcttggcccactgcaacctccgcctcccagactcaagtgatcttcccacctcagcctcccgaataggtgggacaggtatatgccaccacacctggctaatattttagttttttgtagagatgaggtctccctatatttttgctcaggctggtattgaactcctgggctcaagtgatcctcccaccttagcctctcaaagtggtaggactactggtgtgaaccaccgtgcctggctgagaatggcagtttctaaggaagaaatgaactatgtagcagagagcattttaaaatgtagaacataggaaaaagcttcacccaaattcccccaaattaaccttttaccacaattgcttgatggttctcttcctctttctctgtatatacacatagtgttttctaaatcattttagagtgtgatgcaggcatgatgccattttacctctgcatgcttttgtgtatattttctaaaaatgagtttattatcttgtattaacacagtataatagtgttaatcaaaatcaggatacaggctgtgcgctgtggctcatgcctgtaatcctagcactttgagaggccaaggttggtggatcacttgaggtcaggagttcgagaccagcctggccaacatggtgaaacccccatctcgactgaaaatacaaaaatttgccaggtgtcgtggcgcatgcctgtaatcccagctacttgggaagctgaggcaggagaatcgcttgaacccgggaggcagaggttgcagtgagctgagattgcgccactgcactccagcctgggcaatggagagagactctgtcccaaaaaaaaaaaaaaatcaggatacagtaatattacataatatattaaagtgcttattctggttttatctgttgtcccaacaatgccctttatgttggaggaaaaaaatttttttttccctattcagcattcaaccctggattaaatatctatttaattatcttgttctttagtctcctttaatctggaacagtttctcagtctttgtcttttataaccttgacagttttgaggagtatgcaccatttattttgtagaatgttcttcaatttttatttttctaatatttcctcttagattcaggttttgcacttttgttacaaatactggaagagtgatgtgtgtttctcattgcatcatatcagaaggcacgtgatccctgtaatgttaactttcatcacttggttaaggtggtgtgtgcttggttttcccattgtaaagttattattttccatttttaattagtatatatcatgtggggatatacttcaaagccgaattcctttctttctgtttttttttcctagatggagtctcactctcttgcccaggctggagtgcagtggcgcgacctcagctcactgcacctctgcttcctgggttcaagtgattctcctgcgttagcctcctgagtagctgggattacaggtgcccaccaccacgcctggctaatttttgtattttttagtagaaatggagtttcactgtgttagccaggatgatcttgatctcctgacccgcctcagcctcccaaagtgctgagatgacatgcgtcagccaccgcgcccagccttctttttttttttttttttttttttttgagacagagtcttgcctgtctcccaggctggagtgcagtggtgccatcttgggtcactgcaacctccacttcggggttcaagcgattctcctgcctcagcctcctgagtagctgggattacaggtgactgacaccacacccagctaattttttgtatttttagtagagatggggtttcaccacattggccaggctggtctcgaactcctgacctcaagtgatctgcccaccttagcctcccagagtgctgggattacagacgtgagccaatgcacccagcccaatcaatcaaattatttttctcacactaatattagcatccattgattattctttcttttttttttttttttttttttttttgagacggagtcttgctctgtcctctaggctggagtgcagtggtgcgatctcggctcactgcaagctccgcctcccaggttcacatcattctactgcctcagcctcccgagtagctgggactacaggcgcccgcaccatgcgcggctaattttttgtatttttagtagagatgggggtttcaccgtgttagccaggatggtcttgatctcctgacctcatgatccacttgcctcggcctcccaaaatgctgggattacgggcgtgaaccaccacgcttggcctgattttctttcttgaaacagtctttactatggtcgttgtcaaatgatgactttgtaattctaacatttagtgagtaattttttattttttggatatggagtcacagtctgtcacgcaggctggagttcggtggtgtgatctcagctgactgcaacatctgatctgcctcccgggttcaagcagttctcgtgcctcagcctcctgagtagctgggaccagaggcacacaccactacgccagctaattttttgtattttttagtagagacagggttttattgttggccaggctggttttgaactggccttaggtgatccacccttgtcaacctcctaagtgctgggattataggcatgagccactgcgcctggccttagccagtaaattttttttttttttttttgagacggagtctcactctgtcgcccaggctggagtgtgatggcgtgatctcggctcactgcaagctctgcctcccaggttcatgtcattctactgcctcagcctcccgagtagctgggactacaggcgtgcacaccatgcccggctaattttttgtattttttggtagagacggggtttcactgtgttagccaggatggtctcgatctcctgacctcatgatccgcctgccttggcctcccaaagtgctaggattacaggcgtgagccaccatgcctggccttagccagtaaattttaatgttccaagtttcccctatcattcttgcaggtcaatgaaaaatgtctgtcctaaaattttaaagtatgatataataatttaaaaagaaatcctaaaattaaaaaatataattaaggctgggtgtggtggctcacacctgtaatcccagcactttgagaggcccaggcgggtggatcacccgaggtcaggtttgagaccagcctggtcaacatggtgaaaccccgtctccactaaaaatacaaaaattagctgggcattgtggcaagtgcctgtaatcccagctactcgggaggctgcggcacgaaaatcgctttaacccaggaagcggaggttgcagtgagccgagatggcgccagtgcactccagcctgggtgacagagcaagactacatttcaaaaatatatatatatatataattatatatatatataatttataattatatatgtatataatttataattatatatgtatataatttataattatatatgtatataatttataattatatatatgtatataatttataattatatataagtatataatttataattatatataagtatataatttataattatatataagtatataatttataattatatataagtatataatttataattatatataagtatataatttataagtatatataagtatataatttataagtatatataagtatataatttataagtatatataagtatataatttataagtatatataagtatataatttataagtatatataagtatataatttataagtatatataagtatataatttataagtatatataagtatataatttataagtatatataagtatataatttataagtatataatttataattatatataagtatataattaaaaatagaatattgaatggaatagctctgagtcatttaatcaccatgctttggagtatgtagtagtaggagcagtaatagttttttatgtaatcatttatttaccaaacacatactgaatggttgaagttgagaaacaacagtgtagaagacagaaaaaattgttcttcatggaacttagtctgttgaggagagatagactataaacatataaacaagtaaattcggatgtggttaagtgctatgaactaaattaaaatgaggaaatatgaaacttcctgtcagagaactttagataggctgatcaaaaaagacctccttggctgtaattccatcactttgggagtcctaggctagaagattgcttgaggctaggagtttgagaccagcctaggcaatatagtgagactccatctctccaaaaactcagaaaaattatataggtgtggtggcgcatgcctgtattcttagctgcttggtggctgaagcaggaggattgattaagcctgggagcttgagactacagtgagccatgactgcacccctatactccagcatgggtaatagtatgagaacttttttaaaaaaaattttaaaaaacagggtccggtttggtggcttatgtccataatcccaacactttaggaggccaaggagagtggatcacttgagcccaggaggtcaagacaagcctgggtaacctagtgagaccttgtccctaccaaaaaaaacacaaaacttagctgggcatcctgttacacacctgtagcctcagctacttgggaggctgagcctaggagatcgaggctgcagtgagctgtgatcatgctacagcactctagcctgggccacagagcaagactgtcaaaaaaacaaaaaacaaaaagaaaaaaggcctctttgaggagatggcatttaaactgagatccgaatgagaggaagccaggcatgtaaaagatctggggagaaaaagtgctccatatggaagaaacagcacattctaagtcgctaagatagaaacaaccttggcatggttaaggaacagaaactacatgaagggtgggatcgtgaaaaagaggtagaaatgaggtcagagagcaaggcaagagctagatcatgaaggtcttaggaaaccatgataaggggtgtagattttattttaaacattagaacagatgcccagtgtggtggctcatgcctgtaatcccagcactttgggaggccgaggcgggtggatcacctgaggtcaggagttctagaccagcctggccaacatggtaaaaccccatctctaacaaaaaatacaaaaaatgtcctgggtgtggtggcgcacacctgtaatcccagttacttaggaggctgaggcaggagaatcgcttgaatgtggggagtggaggttgcagtgagctgagatcatgcccctgcactccagtctaggaaagagtgagactccatctcaaaaaaaaaaaaaaataaataaataagaaaagatttttgtgatatttttggattaatgttaaaaattccttttggttaacgtgtgggaaatggactagagtaaagcaagagggtaaacagaaacccattagcaggttgatgcagtgtagtctagggagagcttcccaaattgatctacagattcaatgcagtccctatccaaatcccagctaccatttttgtggaaattaacagtctaatcctaaaattcatgtggaattgcacaggcccagaatagccaaaacagtctttaaaaagtacaaagatggaggtctcacactttctgattttcttttttttttttttttttttttgagacggagtctggctctgtcacccagactggagtgcagtagtgcgatctcggctcactgcaagctctgcctcccgggttcatgccattgtcctgcctcagcctcctgagtagctgggactacaggcgcctgccaccatgcccagctaattttttgtattttttatagagacggggtttcactgttagccaggaagttcttgatcttctgacctcgtgatccgcccaccttgtcctcccaaagtctgggattacaggtgtgagccactgcacccagcctcatttttttaaaataaatattttaaataagagtcttgctctgttgcccaggctggagtgcagtggtatgatctcagcttgctgcagcctcaacctcctcctgtgttcaagtgatcctcccacgttggctcttgcatagctggaactacaggcatatgccaccactcccatctaactttttattttttgtagagatgggggtcttgctgtgttgcccagctggtcttgaactcctagactcaagcgatcttgtcaccacagcctatcaaggtgctgggtttacagatgtacaaatgtgagcctctgtgcctggccctgttttttttttttttttgagatgtctctcttgcttaggttggagtacaatggtgcaatcatggctcactacagccttgatctcctagtctcaagagatccttctctttcagcctcctaagtagctgggactacaattggtgccaccacacgcaactaatttgtttgtttgtggcagagatgaggtctcactgtgttacccaggctggtctcaaactcctagcttcaagcagttcttcctgggcctcccacagtgttgggattgcaggtgtgagccaatgcattcagccagcggtattatacttaattgccccacagtggaaacaatctgaattccatcaacagataattggataaacaaaagtggtatatctatacaatgggatattattgggtgaaaaaaggaattcggggccaggcatggtgactggagtgcagtggtacgtgtctcactgtcaccttgaactcctaaacccaagcaattctcctgactcagcctcttgagtagctggtaccacaggcacataccaccatgcctttaatcccagcagttaggaaggccaaggcaggaggattacttgagcccagtccaggagtttgaaacttgcctgggcaacatagggagtccccccacccccatctctacaaaaaatgaaaaaaattagctgagtatggatccagtggctcacacgtgtaatcccaacactttgggaggctgagcaggtaggtcacctgaggtcaggaattcaagacaagcctggccaaccccatttctactaaaaatacaaaaatttgccaggtgtggtggcacacgcctgtagtcccaactatttgggaggctgaggcaggagaatcacccgaacccgggagatggaggttgcagtgatccgagatcgtaccactgcactccagaatgggtgacagagcaagactccatctaaaaaaaaaaaaaaaaattagccgagcatggtagagcatgccgatagtcccagctacttgggaggctgaggcaggagaattgcttgagcccaggagttcgaagctgcagtcagctctgattgtgccagtgctgtagcctgggtgagagattgagactctatctcttaaaaaaaaaaaaaaaaacaccaggcatggtggctcacagctgtaatccgaacactttgggaggctgaggtgggcagatacctgaggtcaggacttcgagaccagcgtgcccaacatggtgaagctccgtttctagtaaaaatacaaaaattagtcagatgtcgtggctggtgcctgtaatcccagctccctgggaggctgaggcaggagaatcacttgaacccaagaggcagaggttgcagtgagccgagatggcaccactgcattctagcctgggcaacaaagcaagactatgtctcaaaaaaaaaaaaaaagtattgatagatattacaacagggtgggatttaaatgcattatgctaactgaaagcggccagagacaggccacacattttatgattccatctaagtgaaatgtccagcagaaacaaatccatagagacagaaaatagattaatgcttaacaggggctgggaggagggggaaagggaagcgactactaatgggtatgggatttctttttgggttaatggaatgttctgaaattagataatggtgatggttgtataactctgtgaatatatgaaaatcctttcaattatacactttaaaagggtaaattttatggtatgtgaattgtatatcaataaagctgttataaattttcctaaaatgttggtttcaaactgatgtcatttattttatttcttttttatgtcgtgtttcttaaagtttctcaaacaataataaatccaaattgtttagaggaaggatcctgttacttaagctaagatgagaagaaaaggagtgatgatgaggtttggaaacatcactcactcagtgacttttctttctccattgtccagcccatggatgacagtctcattgcatttcgaacgcgttctaagatgcccctgaaagatgttcccctgggccaattagaggcagagctccaagctccagacatcactccagatatgtatgaccccaatacggcagatgatgaggactggaagatgtggctggggggacttatgaatgatgatgtggggaatgaaggtaagttttggtttgtgatttattatgtatactgtccattatctgttgtaaaatttttagtatttggaagggtatagaatggaatggtttgggttaattgatttaatttgtatttaactgataatttatcttaaatcagtagttaatttttctttttttttttttcctgagacagggtctcactctgtcacccaggctgagtgcagtgttgcagtcacggttcattgcagccttgacctcctgggctcaagcaatcctaccccttatcccactgagtagctgggactacaggcacatgccactgtgcccgactaattttttattttttgtagaaacgagatgtcactatgttgcccaggctgttcccaaactcctggcctcaaacaatcctcctaccttggcctcctgaatgctagaattataggcatgagccaccgtgcctgggccaattcttaacatttctttttctgggtaaggaatcttttgaatcctaagattgttgaatgctaagatttgaatcccttgaaacatacatgcacatgtagttttgttgttgtcttttgtttttgagacactgtcccaaaacagggtgttgcccagggtggatcacagtggggtgatcatagctcactgtagccttaaactcctgggctcaagagatcgtcctcaggtctcagcctcccaagtagctgagattataggcacgcaccaccttgcctggctaattttttaaaaatttctgtagagaaatgttgctcaggctggtcttaaactcctgcctcaagtgatcctcccaccttggcctcccagagagctaggattacaggcatgagccactgtgcctggcccactcaaaattttatgtatgatttcattagggttcagtgatttaccaaaagaacactgtgttagttaagggtcttcatgatgcaagtgaaagaatcctaactctatcttgctggggtgaaatgaaaccagactttgggaagtgtagtaaatcagcagtggaactgaggcactgttaggatccccctttcctctctattttacttccttttgtcactcagctccattctcacatttatttttctacaaggttagagctctgttcataaacactccgtgattactttttgctttgtctacacttcaggactctcccctgcaagctccagttataaaatccaggggaacaagtcagatcgacttggtttgatctcatgcccagtctcttggtactacatgggattgatagggagactgttcagcatggagtctggtgattgatagcacctcatagaacagtgtggttgaagtatgtggtgaccctaaagaagtaatggtattatcagaaatggggaagaaatattgatcagataaaagtttggatggaaacagactaagtaggctgggcgtggtggctcacacctattatcccagctctttgggaggccgaggcgggcggatcacaaggtcaagagattgagaccatcctggccaacagggtgaaaccctgtctctactaaaaataaaaaaatttgctgggcgtggtggtgcacgcctgtagtcccagctactcaggaggctgaggcaggagaatcacttgaacctggcaggcgaaggttgtagcgagccgagattgcgccactgcgctccagcctggcaacagagcgagactccatctcaaaaaaaaaaaaaaaagaaaaagaaatagactgagtaaatggctgggtaggtaatgctaggagtaagtcaggataagtgaatgaaagaaaataacaggtccttgaatgtaccttatgatactattaatagttatatagtatatcatttggcaaatgtttgagtactttctttatacaaggcattgtgctagaatctgtgagggataaaggagcataatcatttggtcatggaataaaagctttatgaatgacagggtgcctggcccattgttaggttcacaatacattgtacttttttgtgtgtgtgtgagacagggtctcactctgtcacccaggctggagtgcagtggtgagatcttagctcactgcagccttgacctccttggcgcaagcaattctcccacctcagccttctaaatagctgggaatacaggtttgtgccatcatgcccggccaatttttgtattttttgtagagttggggttttgccatgttgcccaggctggtctcgaactcctgcgctcaagcgatcctcctgcctctgctttccaaagtgctgagattacaggagtgagccatcgcgctcagccagtatattgtaaatgaatgaagttgttgaataaactcagatatgccatcaaagtggcataaatgctgttgtaagattttagaagaggacagggtaacttttgtttaggatgatcagagacagctacatgaaagagctggtaattgaaatggaccttggaaagatttttgaaaacagtgacagggaagagagaaggcatctgagtagaagtgacatgatatactctatatgctggattctgtaggatatattctttccagagttttctcttttttcactgtaaaactgtaagagtaatatatgcttggtataaagaaatcaaatattacagaaataaaacaattaaagccttccccccccccaaggaaaatgtacatatctacatacatgaaatttttcatatgatttttttggggtttatgtatctcttagagtttatttattggcacttcattttcctaccagtcatttccaaagcctttgacaccaaggttcaagtttggttccccagagggactactgataatactttggtatgcatctgtgagagttttcaatgtgtagttactttttagttttccacattaatgtggggataaaaataattaaattttagtcctaaatttaaatttaagacttttctcaaacatttagaaaagatagtccaggcgtggtggctcatgcctgtaatcccagtactatgggaagccaaggcatgaggattgcttgaggccaggaagtcaagaccagcctgggaaacacagtgagacctcatttctattttttttttcttcgacagagtctcgctctgtcgcccagactggagtgcagtggtgtgatctcggctcactgcaacctctgcctactgggttcaagcgattctcctgtctcagcctccccagtagttgggattacatgcgcctgccaccttgcctggctaatctttgtatttttagtagagacagggtttcaccatattggtcagactggtctcaaactcctgacctcaggtgatccaccctccttggcctcccaaaatgctgggattacaggcatgagccaccgcacctggcatttctatttttaaaataaaataaaattttaaaaaagagagagaaaataacaagaagcaaattgttttaaatcttatcatatttcttttttttacccaccctctgtagtagaggggctaacaagccacaaaatgaaaaaaattgtgtaaggagaaaaagatggagtttgaagctgagtcattaacatgcaaagtatagaatcagttccttcataattagcaactgatatattatcccattagtcattctgataggagtctaagcttctgagttttccattactcacccctttgacaatctgatgaaaactatgcagccttcccccagaaaaaaatgtacatatccaaatacatgaaatttttatatgatttttgggagatacatatcttttaaagtttattgacacttcctgtttctaccaggttcagaaatctccacaaaaaggaatagacaggacagagagttctttttttttttttttttttttttgagcagcagcaagatttattgtgaagagttaaagaacaaagtttccacaacgtggtaggggacccgagtgggttgcccaaggacagatagttctaaccactttgtaggcagtgaaatctcagagaaattcattgtcttgctcaaagttacagaatcaatttgttatactcctaggagtagaacccagtttaatattctaggaacatgtctcaatcagacaggtttcacggtaagttaaacctttttttttttttttttttttctgagacagagtctggctctgttgcccaagctagagtgcagtggcacaatccctgctcactgcaacctccacccgggttcaagcgactcttctgcctcagcctccagagtagctgggactacaggtacgcgctaccatgcccagctaatttttgtgtttttagtagagatggggtttcaccatattggccaggcttgtctcgaactcctgaccttctgttccactcgcctcagcctcccaaagtgctgggattacaggcttgagccaccgcacctggcctaaaccatttttttttgagagagtttcactcttgtcccccaggctggagtgcagtggcgcgatctcggctcaccgcaacctccgcctctcaggttcaagcgattctcctgtctcagcctcccaagtagctgggtttacaggcatgtgccaccatgcctggctaattttgtatttttagtagagtcagggtttcaccatgttggtcaggctgttcttaaactcctgatctcaagtggtccacccaccttggcctcccaaagtgctgggattacaggtgtgagccaccacgcccggcctaaaccattttttaaaagtatatgacttttcataatgagctgtgttttttgttttgttttgttttgttttgtttttgagatggagttttgctcttgttgcccaggctggagtgcaatggcacgatctcagctcaccgcaacctctgcctcccaggttcaagcgattttcctgcctcagcctcccaagtaactggattacaggcatgtgccaccacgcctggctaattttgtatttttagtagagatggggtttctccatgttggtcacgctggtctcgaacttccaacctcaggtgatccgccctcctcggcctcccaaagttctgggactacaggcatgagccactgctcctagccttcataataagctgtgctttttatctttggcacaggctaatacaaaataattacagtaagaaagtcaggttctcctagcgttattggtagcagcagctttggtgctcattttcatcactttggttcaaaggcctaagatggtagctattgggaaggaaaggccaggcagaactgactttcaggattttgtttctcataatttggttccgagaacttgaatcagaattgaagagtgtatggatatgtagggtgatgtttattaaagatacagatttcagggcttcaccccttacctactgaatcagaatctaatgagtatggtctagggatctaattctgatatatctaaaggattggaaactactggtctgggaaaggtaagagtgcatgataaaggttgattggggaattggactaatggttagggggagggtgaaaatcctcttttcttaaaataaaacttcagtttgttttgttttgttttgagacagggtctcactcttgtcacccaggctggagtacaatggtgtgatcttggctcactgccacctccacctctcaggttcaagcacttcttctgcctccacctccctagtagctaggattacaggcacatgccaccatacccagctaattttgtatttttagtagagacggggtttcaccatattggtcaggctggtcttgaactcctaacctcaggtgatccgcccgccttggcctcctaaagtgctgggattacaggcgtgagccaccacgcccagcaacttcagtatttttgtatgtgcctattcggacagatttttaaaagagcacacaaagccaatgattaggatgggtgtggcctccagatctaccagttgagttaaaagacaatacaggaggggtatatcagctgggtaaatactgacattgttaataagtcaaaaaagtgattaagctcagaggacatattccacaatcagggtactaaaagctaagcagaactcagaagaatccccctaaatgatttttcagcatctttgttaaatgagtgctctgagaataatattcgctgacccatttgtgtggtgtgggcagaactatctattgcagttcttgcatccaaacagatggagtccaaacctgtgcacactactcattattatgggctcttccagaactttcgttattcagcaatgtttgttaagaactttttgatcaggcgcagtgtctctcacacttctaatccctgcgctttgggaggctgaggcaggcagatcatgaggtcgggagatcgagaccatcctggctaacacagtgaaaccccgtctctactaaaaaaaaaaaaaaaaaaaaaaaattagcctgacgtggtggcgggtgcctgtagtcccagctacttgggaggctgaggcaggagaatggcgtgaacccgggaggcagagcttgcagcgagccgagatcgcccctctgtgctccagcctgggcgacagagtgagactccatctcaaaaaaaaaaaaaaaaaaagaacttgctgtgaagagacttatatagaaagtactatagagattatgaattatgaagacagtattctattcctaaagaaataaagaatctgtactgataagttaaacccacaaatagatgaaaaagatttgataattagttatgtgtaaagaatgcaaattaatatattataagctgagtataaatgttgagtaaagaattatcaagttagattagggtttaatcagcacagatttttcagtgattgtgaattttaaatgtgtgtctgtataagtatatatatatttatatatatttatatttatataaaaaatatatatttgtttttgagacagggtctcactctgtcaccctcgctggagtgcagtggcgtgatcatgactcactgcagcctcaaactcctgggctcaagcagtccttccagctcagccttctgagtagctgggactataggcacacaccacgacacttggctaatttttaaaaagtcatttgtagagattggttcccactgtgttgcccaggatatatatatgtgtttttttttttttttcttgttagatggagtctcactctcgcccaggctggagtgcagtggcatgatcccagctcactgcaacctctgtctcctgggttcaagtgattctcctgcctcagcctcccaagtagctggaattacaggcacgcaccattactcttggctaatttttgtatttttggtagagacgggagggggggggtctcaccatgttggccaggctggtctcgaacccctgacctcaagtgatcttcccacctcggcctcccaaagttctgggattacaggcgtgagccaccatgcttggccccaggctgtatatgtctgtttataacaaaagatgtttatttatggccaggcacggtatccagtctgggcaacaagagcgaaactccctctcgaaaaaaaaaaaagatgctcatttattatgaaaagttaaaacattatggaagaggcgccagactctgtggctcacgcctgtaatcccagcactttttaggggccgaggcaggtggatcacctgaggtcaggagtttgagaccagcctgaccaacatggtgaaacgccgtctctactaaaaatataaaaattagctgggcatggtggtgcacatctgtagtcccagctactcgggatgctgaggcaggagaatcgcttgaacccagcaggtggaggttgcagtgagctgagatcgagccactgcactccagcctgggcgacagagcgagactccaccttaaaaaaagaaagaaaaaaaaaatattgtgggagggtacacagagaaatctttgttaatagttttatgtgtttctttctagatactctgtgggtgttcagtcaagcatgtatttatctcaaacaagaatttttttccacaaaaagaatcatactatacatattggtcttcatctgcaacttgcttctttcacttagcagtataacatatatttttccattataatacatagagatcacctcttctatttaatggatacatgatagtaagaaatttaggtattctctttttggtctttttttttttaaatcagttcctcagtcacactagctgcatttctcaagtcacatgtggctaatggctactgtatgatacaatacaatacatgtatagatcatttccatcatcacagaaagttctgttagacaacactgatctaaaattatctggagaaaaatattaccttaatatataataattccataatttaatgactccttcataatttttacttagtaattgaaaagacagtttagcattaacattaaagaaaattaggctgggccctgtggttcactcctgtaatcctagcactttcggaggccaatgcaggcggatcacctgaggtcaggagttcgagaccagcttggccaacatggtgaaaccttgtctctactaaaaatagaaaaattagccgggcgtggtggtgggcatctgtaatctcagttacttggtaggctgaggcaggagaattgcttgaagctgggaggcagagtttgcagtgagccaagatcatgccactgcactccaacctgggtgacaaagtgagactccatgtcaaaaaaaaaaaagaaaaaagaaaattaaaagggagaagaacatccatatttctattattctaacctaacaaatgtttattatttttgtatatttttagttatttatgattcttattgtaaggatataatttttcatgcttatgattattatgtatatattgtacttttgtcatacatgtattgaacttttatagaatggttacatattcacattttatatgtgtacgtgttgagtatccccttcatccaaaatgctcaggaccggaagtattttggatttcagattttttcagatattagaatatatgtattattatacttaacagataagcatactaaatttgaaaatttgaaatctgggcagggtgcaatggctcacactgtaatctcagcactttgggaggccgaggcattcagatcgcttgagcccaggagttcaagaccagtctgggcaacataccaaaaccctgtctctactaaaaatacaaaaattagttgggcatggtggcatgtgcctaatcccagctacttgggaggctgaggtgtgacaatcgcctgatcctgggcagtcaaggctgcagtgagccatgatcgtgccactgcacttcagcctgggtgacagagtgagaccctgtctcaaaaaaaaggaaaaagaaaatttgaaatctgaaatgctccaatggctattccctttgagagtcatgtttgcactcacagagtttcagattttggagttttggatttggaatgctcaacctgtactattttatactaagaaattataattatatagtcattctctaattgttgggaatttgggccactccttttttcactgtcagcttcactgtacaagtagcttttacagaaagtattattttcatggaatatactacacaaaattagctgggtgtggtggcgtatgcctgtggtcccagctactcaggaggctaaggtgggaggatcacttgagcccgggaggtggaggttgcagtgagctgaggctgtaccactgcactccagcctgggcgacagagtgagaccctgtctcaaaaaaataaagaataaatgtgctttattggaacagattcttagaagtttgagaacagagttaatgagcatctgaaacacttttttttcctagatgaagcagatgatgatgatgatccagaatataatttcctggaagacctcgatgaaccagacacagaggatttccggactgaccgggcagtgagaatcaccagtgagtctgtgtttattctaagtcctgctcttgactgctttgcagctgtctttgtttactttgtagatttttaggggtgaagtttgcagctcatccatgttaagacatttaggtttcctttacccatttattgatctgattctttaaatttaggtacatattcagaaagcccatcagttattcatttgtatatcccacagtcgtgtattcagtccttactgtttggcagggattgtgcaagatgaataagacatggcatctgtgctgtaggagttcagcctagtagggtgatagaaacagaaaaagttacaatacaaagtgataaatgctgtaacaggttttacataaggtataataatgacctaaaagagagtgtcatctcctagtgtatgatatggactaggataggagaacttaggaaagaatttgcagaatgaaatggctttttatcttagttttgaaggaggaataagaaatttggtgaatagggacagagaggaatattgcaaatagaagagcatctgcaaaccacagaattgtaaaacatcaaaaaagtatgtttggaaaatactaagtactttggtggtggtgtatgagtgaaaagacagagaagtggtagataagattaggtagtgtttacatcatggaggatttttaagctctcaaaatgaggtttaagggcgggcatggtggctcacgcctgtaatcccagcactttgggaggtggaggcaggcagatcacctgaggttaggagttcaagaccagcctggccaacatggcgaaaccctgtctctactaaaaatacaaaaattagccaggcgtggtagtaggcacctgtaatcccagctactccggaggctgaggcagaaaaattgcttgaactcaggcgggagaggttgcagtgagccgagatcacgccaatgcactccagcctgggcgacagagcaaggctccgcctgaaaaaaaaaagaggtttaagcagtaaatcagtaggaactgatttggattttagaaagatcactttgatttaataccagtttaatgtattaatttgttaggtaaagtgaacaagactggaggtatggaaaacaattatgataacttagcttgagttatttctataaaaaattatatcattgagctaggagtggtggcttacacctgtaatcccagcactttgggaggctggggcaggaagattgcttgagcttaggagttcgagaccggcataggcaacatagagaaactttgtctgtactaaaaatttaagaaattagcctaatgtattggcacgtacctgtagtcctagctactcaggaggctgaggcaggaggattgcttcagcccaggaggtcaaggattcagcaaactatgatagtgccactgcactccagccttggtggcagagggagatcctgactcaaaaaaaaattatatcattggctagtgtgtcaagcatagaaaacatacatttcatcctgaagaaattctacctatggggagaaagaaaaataaaaaatatatttcataagccattgatttttattgcatgtatgcatgaccctgtactggaataatatacacgacatggagaaggtaagatgctggctcttgaccaggttatgcagagagctttataaacatccaagatatacctaattaatgcagttctttgtgtaaagagaattatgtaaatacaatcctttagaacttacattttattttattgctttattgtgcctttcaccttgcttttaagattagaataccatttcctttgtgaagatctttcatttattttgatatactatgacagggatagtggaagcattgaaaggaaagcaccaggaattagagaaaatgtagaatgaaaaggtttgaggatttaggctttgagaaaactgaaaggagaatctaggaaggtacaagaaaaacctagaaaatctagtgtcgtagaaaccaaaggaagagtcttttggctggggcacagtggctcatggctataatcccggcacttgggaggctgaggcagaggcagaaggatcgcatgagcccaggagttcaagaccagcctgggcaagatagtgagacattgtctctacaaaaacattttaaaaataaaatgaaaattagttgtcgtggtgcatgcccgtagtcccagctacttgggaagctgaggtgggaggatcacttgagcccaggaggtggaggctgtagcgagcagagatcccaacactgtactccagcctgggtcagagcaagaccctgtttcaaaaaaagagtctttcaagaaggacagaatggtcaacagtaaagaaacaagtaaagaaacatctgcttaaagcacaaaagcagatcttaagttcagctatcatcctggaatatatttgccttccctttttgattgttactttcttcagtttacgtataatttctcagggagatcctccttcgttaggattgatcttcttgctttgcattcccgtaccactctttttgtccttttatatactgatcacctcataattgcttatttaatatctgtcttctcccctagactgtgaacttctcaagagctttgttttgtttattgctgtaaagctggtggcaatatttgccagtcgaatagagatgggtaaatgaagggcagtctttctagtcatacagttctgtaatgatagtgaaagctggagtagaatttttaatttttttttctgcctcttgtcctcttgtgtctcattgtcatatttgattataatctctttaaaaggacttatccttatatggataactaaaataaaaaaattaaaaagcatagaatcacagagtttgaaaagctccatgtggtcacatgttttttgcccgcttgagaatttgtttacacctcctctgaggtggcctttttagtcctgtttgtataccttcagtgacagggagctcaacaattctgcagatagtgtattgtaaacttgaacacctcctcaattaatactttccttattgaacccaaatctgaatgcaaattcagatactttccttattgaacccaaatttgaatgcaaagcaggaagatcaatccttttatattcctcctatttgtctttatgttatgttatgttatgtgatgttatgttatgttatgttatgttatgttatgttatgttatgttatgttatttttgagatggagtttcgctgttgtcgcccaggctggagtgcaatggtgcaatctcagctcactgcaaactctgcctcctgggttcaagcgattctcctgcctcagcctccagaatagctgggattacaggtgcccgccaccacgcccagctaatttttgtatttttagtagagacggggtttcaccaggttggccaggctggtcttgaactcttgacctcaggtgatccacctgcctcggcttcccaaagtgttgggattacagtcatgagccgcactgtgcccggcctcctatttgtcttttgttgttaagaaaaaaaaaagcaatttattcccaagtgtacatattaaaagatgtttcttaagtttttttttttttttccctatgcaaaacataggaaagtttcaagtttcttctgccaggtttcttcttctccaaagccttggtgtccagacctctcaccatgcacattactcttctctggattctagcatttattttctttaaacttttcccctgttacatcttattatgaaatttaaaaatatatatagaaaaattgaaaaattatacagctaacattcatatactcaccacctacttttttttgagacgaagtctcactcttgttccccaggctagagtgcaatggtgtgatctcggctcactgcagcctccgcctcccaggttcaagcggttctcctgcctcagcctcctgagtagctgggattacaggcgcctgccaccatgcccggctactttttgtatttttagtagagaagaggtttcaccatgttggccaggctcatctcgaactcctgacctcaggtgatctgcccgcctcagcctcccaaagtgctgggattacaagcgcgagccactgcgcccagcctcaccacctactttctatagtttgttggtttttttttgagaaggagtctcgctctgtctccaggctggagtgccgtggcgccatctcagctcactgcaacctccgactccctggttcaagtgaatctcctgcctcagcctcccgagtagctgggattatagtcacgcgccaccatgcccagctaatttttgtatttttagtagagacagggtttcaccatgttggccaggatggtctcgatctcctgaccttgtgatccgcccacctcggcctcccaaagtgctgggattacaggcgtgagccactgtgcccggccaaactttcagtagtgttaatataaactgtgcgcctttcatatgtgcgggtttcacagctgcagattcaaccaaccttgaaaatattctgagaaaaaaaaatgcaacagcaaaaaataatactaactgggcgtagtggctaacatctgtaatcccagcactttgggaggctgaggcaggaggatcgcttgagcacaggagtttgagatcggctgggcgacatactgagattccatctctacaaaaaactttaaaattatctgggtgcagccgggcatggtggctcacgcctgtaatcccagcactttgggaggccagggtgggcagatcacgaggtcaggagttcgagaccagcctggccaatatggtgaaaccccatctctactataaatacaaaaattagccgggtgtggtggctcacgcctgtagtcccagctactaaggaggctgaggcaggagaatcgcttgaacctgggaggcggaggctgcagtgagccgagatcgcgccactgcactctagccagggcaacagagtgagacgctgtctcaaaaaaaaaaaattatctgggtgcattggtgtgtgcttgtagtcccagctactctggagacagagtcaggaggatcccttgagcccagaagttcaaggttgcagtgagctgtgatcataccactaccactgcactccagcctgggtgacagagtgagagcttgtctcaaataaataaataaaaaataataaggtataacaagcatttacattgtattaggtgataagtaatctagagataaggtatacaggaggatgtgtgtagattatatgcaaatactacatcatttttatataagggacttgagcatcctcagattttggtatccatggatacgaaatggttccaggagattggctcctggaaccaacctccacagatactgagggatgactttatttgccttatcatgcagctgtccatctccctgtccgtctgtggatgcatcttagttttcaaatgcatttcagagtaaattatacttcacttttttttctttttttttttaaattcagacaaggtctatgttgcatgggttggtcttgaactcttgcggtcaagcgatcttcccacctcagcctcctgaccagctgagattacaagtgtgcacaatggcacctggctatatgtcactttttttttgtatttttagtagagacggggtttcaccatcttggccaggctggtctcgaattcctgacctcgtgatcctcccacctctgcctcccaaagtggtgggtttacaggcatgagcctatacttcacttttaaccacttcagcacgcatataatgaactagagctccatatttgtttatgatttctttttataggtaattttacacacagtgtatcacacacatctcaagtgtaccatttaatgaattttgacatgtgtgtacctatgtgacacaaatccctgtcaggatatagaatcctcaccccaggaagtttcctcatgccccttccaagtcaatccccacaccatcccttcagaggcaaccactgttctgatttttttttttttttttttccgagacggagtctcgctctgtcacccaggctggagtgcagtggtgcggctcactgcaagctccgcctaccaggttcacgccattctcctgcctcagactcccgagtagctgggactacaggtgcctgctaccatgcccggctaattttttgtatttttagtagagacggggtttcaccgtgttagccagggcgatctcgatctcctgaccttgtgatccacctgccctggactcccaaagtgctgggattacaggcgtgagccactgcgcccggctttttttttcttaatcacaggttatgtttgccagttttagaacctcacataaatggaatcatataggatgtgctttgtgtgtaaggcttctttcactcagcataatatttttgagattcatttgtgttgcatgggtcgttagtttgttcccttatattgttgagtagaatttcgttgtgtatatatactacagattatctatttttgtgttgatcacctgggctatttttaattttgggtaacgaataaagctgcgctgaacttttttgtgcaagtctttgtggaaatgcttcatttctctctctctttcatttgttcccacctatgagttagaaaagccgtatttcatttatcttgggtcagctgtataggagacaaatcactgggtcacagggtatgtttagttttataagaaattgccagaccattttccaaagtggctttccattttacattcttatcagagttctggttgctctacatcctcagtaacatttggattttaattttttttgttggctgggcatggtggcgcacacctgtaatcccagcactttgggatactgaggcaggcagatcacttgaggtcaggagttcaagaccagcctgggcaacatggtgaaacaccgtcgctactaaaactacaaaaaattagccaggcgtggtggcgcatgcctgtagtcccagctacttatgaggctgaggcatgagaattgcttgaagccggaaggtggaggttgcagtgagctgagaccgcgccaccgcgctccagcctgggcaacagagtgagactcagtctcaaaaaaataaaataaaaaataattaaattacttaaatgattttgtttttgtttttgttttgtgtttgagacagagtctcactctgtctctcaggctggagtgcagtggtactatctctggtcagcgtagcctctgcctcccgggtttaagagattcttgtgcctcagcctcccaagtagctgggattacaggcatgtgctaccatgactggctaatttatttatttatttatttttgagatggagtcctcgccctgttgcccaggctggagtgcattggtgctgtattggctcagtgcaacctccacctcctgggttcaagtgattctcctgcttcagcctcccgagtagctgggattccaggtgcatgccaccatgcctggctaatttttgtatttttagtagagacggggtttcaccatgttggtcagactggtctcgaactcctgaccgcagatgatctgcctgcctcggcctcctaaagtgctggaattacaggcgtaagccactgcccgtggcctggatcttaatttttttaatgtcctcttaagaagggcctttatagaattgttcacagtcctccagacatagtgttagactctgctctagttcagtgatatgtttgccttgttggttatgagccccgttttggagcaactgtgtcttattgaacttgatatcaaccaaaacttttttttttcctcagattcttgtaacaaccaaaactttcaggtcttgttcacattatttttaagccacgtcaccttttcatgcagttaataaactgatctttaaaactcttgctgggcgcggtagctcacgcctgtaatcccagcattttgggaggctgaggcgggtggatcacgaggtcaggagatcgagaccatggtgaaaccccgtctctactaaaaaatacaaaaaattagccaggcacggtggcaggcgcctgtagtcccagctactcaggaggctgaggcaggagaatggcgtgaacctgggagatggagcttgcagtgagctgagatcgcgccactgcactccagcctgggcgacagagcaagactccgtctcaaaaaaaaaaacgaaaaaactcttaactgtaggactgggcaccgtggctcacacctgtaatcccaacacttagggaggccaaggtgggaggatcgctggagcccaggagtttgagaccagcctgggcaacatagcaacatgctgcctctattaaaaaaaaaaattcttaaacatagaactttaaatttatccgtatatgttgcatccagttgatttgagaaaatataattttgaattttccgtctgttggattggcagtccctttcagctttacatcatctacagatgtgttaggtatgttctctgggtcttctaagtcaccgatggagttcttgaatagttcagatccaaagacagcgtcctgtgaaaccctgctggaaacttgtctttctctctctcttttttttttaagacaatatcttgctctgtcgcccaggctggaatgcagtggcatgatcttggcacactgcagcctctgcctcctggactcaagagatttctctcacctcagcctcttgagtagctgggactgcaggtgtgcgtcaccaagcccagctaaatttttttgtagagatatggtttcaacattttgcccaggctaggagactcatctcttgattccattcagtactgtgtggatttggataggtcatctaattataaaatcatctagctcacattttctcctgtcttcttccttttagaatttaagcttcatgagaatagaactctctctctctatctctctttcattctctcatatatcccaagcatctaaaacatggattgaagcatagtgctcaataaatgtgttttgttgttgttgttgttgttgttgttttttgagacagagtctcgctctgttgcccaggctggagtgcagtggcgcagtcttggctcactgcaagccctgcctcccgggttcacgccattctcctgcctcagcctcccgagtagctgggactacaggcgcccaccaccacggctggctaattttttatatttttaatagagacggggtttcaccatgttagctaggatggtctcaatctcctgactttgtgatccatctgtcttggcctcccaaagtgctgagattacaggcatgagccaccgctcccggcctcaataaatgtttttgaataaatgaatgaaggatagccagtcatggtggctcacacctgtaatcccaccattttgggaggccgagttgggctgatcacttgagctcaggagttcgagaccagcctggtgaaccctcatctctacaaaatatacaaaaattagccaggcatggtggcatgcgtctgtggtcccagctacttggggagctgaggtgggaggagcgattggaccagggaggggatgcggaggttgcagtgagctgagatcgtgccactgcgctccagcctgagtgacatagtgagacccatctcaaaaaaagaaggatagatatgaagaatttgtcatgccttgttgaaaacattatacattgtcttcatggaattcctccttattgtaaaatctaatttataccaacaatatactgtctggctttcttgcagaaaaggaagtaaatgagctgatggaagagctgtttgaaactgtgagtaatgatcctcgagtgagaacacgggattttaagtcagttctccagcaagatgtgtcatttggtctctgtgatgctccctctaggagagggggtctgactgaaccaattctccttttagtctacctgggaaagaatataatgacaagggaattttgctaactactagactcttgattatatacatgtatgttgttcttattaacattttccttgaaacttctttttgtttgagggggttcttgctccatcacccaagccagagtgcagtggtgaaattacagctcacagcagccttgaccttctaggctcaagcagtccttcgtctaagcctcctgagtagctgggacataccaacacacccagctaattattttatttgtagagacagggtcttaccacattgctcaggttgttctggaacttctgggctcaagcaattttcctgccttgggcctcccagtgctggaattataggtgtgagccagcatgcctggcccctggaaaacttttgatgacttcccctactgtcatttggtgtgtccttaaagattgtcaactagttttaaactactttgtgtacaaataattacctttttcataaatttgtttcaaaagatttttcattttaagagattgatcattttgaggctgggtgcagtggctcacgcttgtaatcccagcactttgggaggccacggcaggtggatcatctgaggtcaggagtttgagaccagcctggccaacatgatgaaaccctgtctctattaaaaatacaaaaattaggcatggtggcgggcacctgtagtcacggttactgcagaggctgaggcaggaaaattgcttgaacctgggaggcggaggttgcagtaagcccagattgtgccactgcactccagcctgggcaatagagcaagactgcaagactctgtctcaaaaaaaaaaaaaaaaaaaaaaaaaaaaaaaaaaaaaggagagagagattgataattttgagttatccacgctctgtccttactgttacaagttgactggttgaatgacttctttcttggcataatagccatcccaagtgtgggtttgtgggaatcctgaagtgagaaagttctgacattggctctttctgggtgccagcattattatagtcttgtaatctatagttttcactcttccttcccaatactggagcaacattcagaggcccattccccaggaaaaccctccctttcctttgcccacagttccaagatgagatgggattctccaacatggaagatgatggcccagaagaggaggagtgtgtagctgagcctcgtcctaactttaacacccctcaagctctacggtaggctagttgaagaccttgagatttggaatagaggaaaagtttatttctgaaaaggttttcagaagttgcaattgataatttttcatcccaaaccagcttctgttactgatgtaaggatgcagagccctgtcaggagttaggtgtcaagtgaagtctccttgttatggggcagtgcagctgtaggccaagctatatccgtttgggaagggagaaaaaacagtagctggcatccatatccacttctccgggtgagtggtgctggagaggtatgtaggactcaatgtggccagccacacaaactaccccatattgtaatatcctgtctgtcccttttgttctttttatgtgccattaatatctgctaaatgtgactgaaaatttgttagtcacctaggcattagtggagcaaaccctgaagcacctgcagtaaggagtctgaaacatacgtgctgacctttttgcctaaagttggcacttgtgttacagcatccagaaagtagaggctttaattttttcctcattttgtggtggatttgcatctgcactttattgtattgttatccattgcgagtagcagcatgtagtcattagatggatggctagatgtcaggatgcagtttgtgccataagtggaacaaagcaaagagaatagtccctgtaattcgtcctgggtttgaacctaacagcattactaagcagagagcttgggatccatctgaaagctagacctttagagatttttcaatttagtgaaaaaagataagatatgccaaccaatgtctaaaaactagaaataccagtaattctccattacaacaaatatcacaatacaactacatcaaaaacctcaagattgctaagtcagtatttgacccattattttaagttacagctcatacaacaaaattctgttatagcagaatggaaccattcatcctgggaacatataatgggatttgatctataaacgtgttttggttctgctgattgactctttgtaacttcttaaaatttgggaagtgtaggctgggcgcagtggctcatgcctgtaatccctgcactttgggaggcggaggcagggggatcacctcaggttaggagtcgagaccagcctggccaacatggtgaaaccccatctctactaaaaatacaaaaattagccaggcatggtggcgggtgtgtgtaatcccagctactcaggaggctgaggcaggatactcacttgaacccggaaagcggaggttgcagtgagctgagatgacagcctgcttgacagagagagactctgtctcaaaaaaataaaataaaataaaataaataaaatttgtaaagtatagaaataatttaaaactcttgttagaattcagttaccttctggtattcagtagaatacagtcatatatcatctcatggtgatacattctgtgaaatgttatcattaaacgatttcatcattgtgtagaaagcacttggataaacctagatggtttagcctactgcatacctaggctatacggtataacatattgctcccaggccacaaacctgtatagcatgttattctgctgaatattgtaggcagttgtaacacaatggtaagtacatatgtatgtaaacatagaaaaggtacagtaatcttatggagccatctctgaatatgtggttcattattgactgaaacattatgtggcacatgactgtacttgggcagctgctgcttctctttcagttgcaaatgcaaacctgttataatctttgactaaataaagcatcctggattctgtaagtccatagatagtaaaaacttcttaaaacacaataaagaagagagaggaaaaaaaagaacaaaacaaaaaccctgggaaagtgagttatctgtgcttcccttgtcagttatccaagtaatacttattaaaactaggtgcaaggccacgtgtggtgactcacacctgtaatctcagcactttgggaggctaaggcaggcagatcactttaggtcaggagttcagaccagcctggtcaacatggtgaaaccccatctctactaaaaatacaaaaattagctgggtgtggtggcacacgcctgtaatcccagctacttgggaggctgaggcaggagaaacacttgaaccctggaggcggaggttgcactgagctgagattgtgccactgtactccagcctgggcaacagagtgaaactgtctctcaaaaaataataataggccgggtgcggtggctcacgccagtaatcccagcattttgggaggccaaggcaggcggatcacaaggtcaggagtttgagaccagcctgaccaacatggtgaaaccccgtctctactaaaaataaaaaaattagccaggcatggtagcactcgcctgtaatcccagctactcaggaggctgaggcaggagaatcgcttgaacccaggacgcagaagttgcaatgagccaagatcatgccactgcactccatcctgagagagagaaaaagactccatctcaaaaaataataataataataataataataattatagatcaggcgtggtggctggcacctgtaatcccagcactttgggatgccgaagcaggcatatcacctgaggtcaggagttcgagaccagcttggccaacatggcgaaaccttgtctctactaaaaatgcaaaaaaaattagtcggacgtgttggcaggtgcctgtaatccccgctacttgggaggctgaggaaggagaattgcttgaacctgggaggcagaggttgcagtgagccgagaccactccattgcactccagcctgggcaataggaacgaaactccatctcaaaaaaaaataatagtaataataataataataataaaaaatacaactacgtgcaggctatgttttcattacctacttttttatgcttctggtcttctgttccttcagtggtagtagtgcaggtgatcaggttttcagttctcagaagattgcataagacagtcccacaggctttaggtttttaccctgtgctgcccaaacccacagtaaatactataaaagaaagaatgatttttatccccaatagataaatgataacttttaaaaattaactattgaaaacacttatttatctattgctgtaatattggagattacttgaaatatgataacctgcttgttgtaactacatcagcaggtcttatcctgattgcatagggtatcagcacgtgcttaatcacttaagtatctttttctccttttacttcagaactgtcatgctgggtttttcagtttttgcttcagccctggaaacagtctctcaggagggtaggggtgggaagttagggttaggaaccttagaagaggaatttattttatttatttatttattttattttatttttttgaaatggagtcttgctctatcgcccaggctggagtgcagtggcgcgatctcggctcactgcaacctctgcctcccgggttcaagtgattctcctgcctcagcctcccaagtagctgggattacaggcacgcatcaccacggccagctaattttcgtattttttcatagagacagggtttcgccatgttagccaggctagtctcgaaccactgacctaaagtgatccacctgccttggcctcccaaattgctggcattactggcttgagccaccacgcccgactgtttcttgaccttttaataattgtcattctgactggcaaggcttgctttcttaacaagtcaaaaatcttctagcatgaagcaggaaaaggatatactaaaataactaaagtaatgatagtttacctgaacagaactgagtggttggttcaaatattaccctactgctctccatgaaggtattttattttagccctttaaattcctcttcctggctgggtgcagtggctcacgcctgtaatcccagcaatttgggaggccaaggcaggtggatcactttaggtcagtggttcgagactagcctggctaacgtggcgaaaccctgtctctacaaaaaaatacaaaaattagctggccgtggtgatgcgtgcctgtaataccagctactctggaggctgaggcaggagaatcacttgaacccaggagacagaggttgcagtgagccgagatcatgccactgcagtccagcctgggcgacagagcaagactccatttcaataaataaataaataaataaataaattcctcttctaaggttcccaaccctaacttcccacccctaccctcctgggagactttttccagggctgaagcaaaaattcaaaaacccagcatgtcagttctgaagtaaaaggagaataagatagctaagtgattaagcatgtgctgataccctatgcagtcagggtaagatctgttggccaggcctggtggcttacgcctgattccagcactttgggaggccgaggcaggtggatcatgaggtcaagagatcgagaccatcctggccaacatgatgaaaccccgtctctactaaaaatacaaaaattagctgggtgtgatggcgtgtgtctgtagtcccagctactcaggaggctgaggcaggagaatcacttgaacctgggaggcggaggttgcagtgagccgagatcatgccactgcattccagcttggcgtcagagcgagactccgtctcaaaagaaaaaaaaatctgtttatgtagctacaacaagcaggttatctttctttcttttttctttttttttttttttttttttgagacagagtcttgctctgtcgcccaggctggagtgcagtggcgggatctcggctcactgcaagctccaccttctgggttcacgccattctcctgcctcagcctcctgagtagctgggactacaggcccccacgactgcgcccagctaattttttgtattttcagtagagacggggtttcaccatggtcttgatctcctgacctcgtgatccgcccacctctgcctcccaaagtgctgggattacaggcgtgagccaccgcgtccggccaacaagcaggttatcatatttcaaggaatccccgatattacagcagtagataaataagaaaatgtagtatcccaccagggaatactatacagccataaaaaggtatgatatcatgtccgtttcagggacatggatggaggtgaagccatcagcaagctaacgtaagaacagaaaaacaacactgcatgttctcacttataagtaggagctgaacaatgagaacacatgggcacagggtggggaacaacacacactggggcctgttgggggagcgggggaagggagaggatcaggataaactgctaatgcagctgcacttaataccaaggtgatgggttgataggtgcagcaaaccaccaaggtgcacgtttacctgtgtaacaaacctccatgtcctgcacatgtattctgaaacttaaaattaaaattttgagggctaggcatggtggcttacgcctgtaatcccagcactttgggaagccgagatgggtggatcatgaggtcaggagatggagaccgtcctggctaacacagtgaaatcccatctctactaaaaatacaaaaaattagctgggcgtggtggcacgtgcctatagtcccagctacttgggagggtgaggcaggagaattgcttgaaccctggaggcggaggttgcagtgagctgagatcgtgccactgcactccagcctgggcgacagagcgagactgtgtctcaaaaaatatttaaattttgaaaaaaaaatgcaaggcagtgcagcctgagtggatagggaaatgggacaagctgaacctgggatgggagtaacaagtaaatgagagaagaaatgagaatgatgagttcccaccagctccttggctgctttcttatccagatatttctctgttcctagcattttaattttttctttatttgtatattatttagaagaggaattttagaggaatgggatagagtgtaatatagaatcatcatatttgatgcatgctaactactttggcaaaagatttgtaaaaggctgagagtttgactgttggctaaagtgagatgggggattagtagggaatgaaaattgttcaggctctttgctcatcattggaacgaattggatgtgttgtggacctacggaaacactcaaattcagtcatctccctgttgggaataggtttgaggaaccactggccaacctgttaaatgaacaacatcggacagtgaaggagctatttgaacagctgaagatgaagaaatcttcagccaaacagctgcaggaagtagagaaggttaaaccccagagtgagaaagttcatcagactctgattctggacccagcacagaggaagagactccagcagcagatgcagcaggtaggacttttcttggtcatgttaacattggatttttttttttgagacagagtctggctctgtctcccagcctggagtgcagtggcccgatatcggctcacttcaacctctgctttctgggctcaagcatttctcctgcctcagcctcccaagtagctgggattacaggcatccaccaccacacccagctaatttttgtatttttagtagagacagggtttcaccatattggccaggctggtctcgaactcctgaccttgtgatccgcccgcctcggcctcctaaagtgctgggattacaggcgtgagccactgcgccctgctgttaatactggattataccaaggcctaactctgaggccagaaattaacagctttgtaaaagtcagagatagttaccttaccacctcctaaaaccatagtatcttcacatcattaggagctcgagaagtcatcatgttcatgccttatggctcaaggaagagagcacacaaggacactaatggtattcagaaatatagatttcaaagagtccttagtaatctattctgaaatttaacaaccttcactgtgagaagtaggtttgtttttcctttttctaacctcagtccctctggattgaggttaagcttcctctggttctgtcattttgttcaagggaacatgtctgagagatttatgccaagatcctatgttattttcatactcctttcagaaagcaaaatatatgtgataaagttgcaaacatcttggttattgtctctctgggggctgggttacggtggctcacacctgtaatcccagcactttgggaggctgaggtgggaggattgcttgagccagggagttcgagagcaacctgagcaacatagtgagaccctgtctctgcaaaaaataaaaataaattagccaggcatggtgccatgcatctgtggtcccagctactcaggaggctgaggtgggaggattgcttgagcacaggaagttgagagggcgtggagccatgattgcatcactgcacatcagcctgagtgacagagagagatcctttctccaagaagaaaaaaaaaaaagatctctctggattcctgaaatgacaatgtggtaacatgtcacttcatcattttctttccatccccagcacgttcagctcttgacccaaatccaccttcttgccacctgcaaccccaacctcaatccggaggccactaccaccaggatatttcttgtaagtttccaaatatccataactctaaagactagagtatgaaattagcttggcaggttatttctcagttattcactgatcataatctatatttattcttctctcgggtatttttgattgttttgcctgctttctgttaaggcttcctgtgtttgctgagagaacgtaagccactgattcccatgaaaggacaaggagtgtattcaattttcttaatactgtctttctgatatttttattgaatcctcctcatctttagatccaacctaacttcttaggtttttggtaccactgttcgttttatagatgttgagactgggcacggtggctatgcctgtaatcccagcactttgagaagccaaagcaggcagattatatgaccccagtagttccagactagctggggcaacatgccgaaagcccgtctctacaaaatacaaaaattaaccagatgtggtggtgcgtacctgtagtctcagctacttgggaggcagaggtggaaggatagcttgagcctaggaggtgagggttacagtgagctgagatcgcgccactgcactcaagcctgggcagcagagtgagacccagtctcaaaataaataaataaataaaataaaagtaatagtcctaattcttggctgggtgcggtgacttgtgcctgtaatctcagcactttggtaggctgaggtggctggatcacttgaggtcaggagttcgagaacagcttgaccaacatggtgaaatccagtctctacttaaaatacaaaaaatagccgggcgtggtagcgggcgcctgtaattaatcccagctactcgggaggtagatggagaagaatcgcttgagcccaggaagtggagacttcagtgagtcaagatcgcaccactacgctccagcctgggcgacagagcgaaactccgtctcgaaaaaaaaaaaaaaaatgagtcctcattcttcataatcttacttctagttcaggagctagaccatatattccttagtgtttctcactaagtctaaaagtaaaacaagaatacaatccctgaatatctgggaactcaggcataatcttaacagagtagtttattgtgaaagactttatgatgatttttacctgtttttatcctgtagtaggaaggtcagcttctcatttagattctgaaggctactggtattaattgtctggaattgtcttaaatctttcttgtgtcctgttttcccagaaagagctgggaacctttgctcaaagctccatcgcccttcaccatcagtacaaccccaagtttcagaccctgttccaaccctgtaacttgatgggagctatgcagctgattgaagacttcagcacacatgtcagcattgactgcagccctcataaaactgtcaagaagactggtaggagacagatgtgtcagctttaagtttttacttgcggtgagaggtggtgggaatcttatcccatagataactaaggatacttgcctaggaatggaggacacaggacatttgtaatttcttccttctctcttttatcctccctttgtactcattatccaagttctagaattacatgataatctctgggcctgggtaaagtgtggaggcagtggacagtataggaatatgggaggtagagatctgaggctcagtgctaagaattggactacagcaatatgaggggtaagtattaggagtcagatcgagataaactggggcctggtaaagatgaaagtcaggtggtaaagtttggtcatgtttagctttttactgtcttcattaagatcaactaaggccaggcgcggtggctcacgcctgtaatcccagtactttgggaggccgaggcacggggaacacaatgtcaggagatggagaccatcctggcgaacacagtgaaaccccgtctctactaaaaatacagaaattagccaggcatgggggcacgcgcctgtagtcccagctactcgggaggctgaggcaggagaatcgcttgaacccaggaggcagagtttgcagtgagccaagatagcatcattgcactccagcctgggcgacagagcgagactcagtctcaaaaaaaaaaaaaaaaaaatcaactaactttatttaccatactgactgcagcataagtgatatctccattctgaatgaaatattgacttgcaagttaggcataagttagagattatacatttgccatgttcagtattttaaagaaatttgcaagtttagattctaccttgcattagtttagtattttttagaaaatacttgctatttacttaagccaaatatttgcttctgatttgtttcttgatttagcaaattagttgtggtttgttctggatttgggtttgtctttggattctattttaaatccctgagtcttatcgttaagttgaaaatagttgtatttaagtgtattatatcatagacacggatcccaaactgctttaacagctatattaaatgatatgaaatggtaatgaaaacttgatttaacaccaaattataataatatcttacacatctgttgacctgttgctttcttctggggatataaaaataacacttatggaaggagaaatatggatatagtagttttgtctctagaaatgcagaggtgcctgaaagtgagaggctgagagagggagagagaaatgaatgagactgaattgtctccttccttttatggttcttttgttcccagcctcaggaggaatctgggagaacttaagtaagaatcaaataaaagtaaaatttggaataccagatttgtgagggagattaaagaagttggaatcttattctggaagaaagaaagcattgttgaaggtctcttatccttcaagtatttaaggggggaaggaggtaaaacatttttgagcatacgctattgttagcaccttattttactaggtgctttttaagtgtttgttttacttagtgaataaagtgttccacataagaaagaatgagtcaacttttattgccattgaatgggactccctttagatataatgttagcttaagaaagactggaaacttttggggggatggtgggcagatgggagggaatcaagttaggtaaggatagctcctacctaaatgcaaaaatgcattcacaggcttttatgaagccctcttttgtcctagaagttgatttatccgagatttattttcttatagcgaatgaatttccctgtttgccaaagcaagtggcttggattctggccacaagcaaggttttcatgtatccagagttacttccagtgtgttccctgaaggcaaagaatccccaggataagatcgtcttcaccaaggctgaggacaagtaagtgtttactctgggggatcaaaacagcagaacatcccaaggagaagatgtagttcctttgaggagtttaggggaagtaagacttgtataataagacacggacacaaaagacaaaaggaaaagcaatatagatgagcagagccctctaggacgtgcttgttctagcagtgccaaatactgctttttgggagatgtcacacacatttttaaagcattttagaccggacatggtggctcacacctgtaatcccagcactttgaaaggccaaggcaggaggttcgcttttattttattttatgttatttatttatttatttagaggcagaatcttactgtgtcacccaggcagtcacagctcactgcagccttgaactcctgacatcaagcgatccttgcacctcagcctccacggagcagctgagaccacaggcgtgtgccaccatacatggctaaatttttttttttttttttgtagagatgagggtctctctgtgttatccaggcatctctcaaactcctggactcaaggcatcctcccaccttggcctcccaaagtgctgggattacaggcatgagccaccacacccaccagattatgaacatttttatggccctttgtgtgtattgccacactgttatcagcacatatgtgtatatgtaaccacgatcatatatgttgttagagggtagtattggtgccggtttaagttgtctgacagggtacctattcattttgtattagttttattagaattattctccttcctttctattctctttgaacttcctttgtattgttagtatacagctcgtcatgatacagctcatcatgatctcacgtttattaatgatttatgcctagtttcttatgttcccacataattgtgaagtatttgattttttttttttaaacagagtttcacttttgtcacccaggctggagtgcaatggtgcgatctcggctcactgcaaccttcgcccccggtttcaagtgattctcctgaccaagtagctggcattacaggcacctaccactacacctggctattttttgtatttttagtagagacgaggtttcaccatgttggccaggctggtctcgaactcctgactcaggtgatctgcctgcttcggcatcccaaaatgctgggattacaggcgtgagccattgcgcctggccttattcttattcataatacttaatcagtactcactaagtatctgaaattttctgttgagtagtcaccaacttgtacaagaattagatttacaaaaagtagattgaccaggcatggtgggcttacaactgtaataccagcactttgagaggctgaggcaggaggatcgcttgaggccaggagtttaagattagcccaggcaacatagtgagaactggtctctacaaataatggaagaaaaaaattagcccggcatggtggtgaacgtctgtggtcacagatacttgggaggatgaagtacgggaatcgcttgagcccaggcattcaaggctgcagtgcgctgtaatcatgccacccgctctccaacccgggcaacagagcaagaccctgtctgaaaaaaaatgaaaaggtagattgggccacacaccatggctcatgcctgtaatcccagcactttgggaggctgagactggagaattgcttcagcctaggaagtagaggttgcagtgagctgcgatggtgccactgcactccagcctgggtgacagcgtgagaccttgtctcaagaaaaaaatgaaagagtagattgtaaaatgtgttagtctggggagaccctttagaaggaaggactgtgaagtgagatttagtgttattctcctttctcagtttgttagctttaggactgaagcattttgaaggaactgagtttcctaatcctctaatcagcaagtaccttctaacctgcaaaactgcccaccaactgacagtgagaatcaagaacctcaacatgaacagagctcctgacaacatcattaaagtgagtgtttcctgcatgcgccatccgggcacctcaccaatatgtacccattcttttatcttgttattctcaaagaaaagaggaaccttcttttatctaaagctaatttctcccactttacactagattaattcccctattgccttttgggcaatattccgctggcagtattccacttatttgctttttgttgttgttgttgttagacagactcttgctctgtcactcaggcttgagtagagtggcgcaatcttggctcactgcagtctttacctcccaggttcaagcgattctcctgcctcggtgtctcctgcctcagcgtcccaagtagcttggattacaggcatgcaccaccacacctggctaatttttgtattttcagtagagatgaggtttcaccatgttggccaggctggtcttgaacctctgacctcaagtgatccacccgccttggcctcccaaggtgctgggattacaggcatgagccaccgcacctggtttcttcttttttatttagatatttatgttgtgtttttagagacgggttcttgctctatcatcctgtttggagtgcattggctcagtcataggtcactgtagcctcaaactcctgggttcaagtgatccttccactttagccttccaagtatcctggactacaggcgtgttccaccaaggctagctcattattttattttgtgtggagatgctgtgtcactttgttgcccagactggtcttgaagttttgacatgtgtcagtccgcctgcctcagcttggcctcccaaagtgttgggattacaggcgtgagccactatgcccagccttttgttttgttttgtttttgtttttttcttgagaaagggtcttactctgctacccaggctggagtacagtggtacagtcatagctcactgtaagctccagctactgggctcaagcattcctcccacctcagcctcccaaggagctggggattatatgcatgagccaccatgcttgcctattaatttttttttttttttttttttttttttttttttttaagaaatggagtgtccctatattgcccaggctggtctcgaatttttggccttaggcattctcctgtctcagcctctaattgctacttcctggtatattggatttaggccttatttattaaccattaaccataagccaaggaagctgaggatttacctgtctcctcactcccttactcccaccacaaacatgcacattttctgctctccaatctcctcgctagtaattatgtcacaattttggttaggttgtattcagggtttacactataagattttaaggactgtataaatactcttcacagctatgttattgtgataccttgcctttcctgctgaacattttgtttttcttggagtaaataatcgcatttttagggggatggggctggacttgattttattatgtaattattcccaggtcaacagtaaaggttacttaaattttcttaatctcctttcagcgtgtctggccttctagatattccgtcactttcatcttgaaggaattgctccttgagccctctgacactattccactctaagcgtgttgctctctgggcttgctgcactgatgttttgggctttttcctccccatcatcctgggaattctttttgcctcttactgtgttggatcttcttatttcctgaattctacatctgtgtttttgttttacttccttcctttagtgaaacacattctagtagcattttttattttaatttttttctaaatttttaaaaattgaggccgtacacggtggctcaggcctgtaatcccaggtctttgggaggctgaggcaggcagatgacctgaggccaggagttcaagaccagcctgggcaatatggtgaaaccccgtctctactaaaaatacaaaaattgaccaggtatggtgccactcacctgtaatcccagccactcgggaggctgaggcacaaaactcacttgaactagggagacagaggttcagtaagcgtggatcactcccctgcactccagcctgggcgacagaggagtctctgtctcaaagatcaagaagcagagaaacaaacaaaaagtacaaagatgtgcacagaaaatgacacacaactcaaacgtgaaggaaaaagatttttctgcagcagaatacggtttatcaagtgccttagcaccacggatgaaactagacaaattctaagccatattatcatgaattttcaaaacattggagccaaaggaaaaatcttacatgctatcagaggttgggagaaacaggtgttacatgaatattcaagagttaaatggggccgtggctcacgcctataatcccagcactttgggaggccaaggtgggagaattacttgagcccaggagttcaagaccagcctgggcaaaaaagtgagacctgtctcaatttttttttttttttttgagatggagtcttgctgtgtcatccaggctggagtgcagtggtgtgatctcggctcactgcaagctccgcctcccaggttcatgccattctcctgcctgagcctcctgagtagctgggactacaggcaccagccaccacgcctggctaattttttgtattttttagtagagacggggtttcaccatgttagccaggatggtctcaatctcctgacctcgtgatctgcccacctcaacctcccaaagtgctgggattacaaggtgagccactgcgcctggcctattctttttttttttttttgagacggagtctcactgtgtcacccaggctggagtgcagtggcactgtctctgatctcagctcacctcaacctccacctcccaggttcaagcaattctcctgcctcagcccgctgagtagctgggattacaggtgcgtgccaccatgcctggctaatttttgtatttttgtaggaataggggttttgccatgttggccagtctggtcttgaactcctgaccttaggtaatctgcccacctccgaaagtgctgggattataggcatgaaccaccacgcccaaccttcatttactcttaaaattgaactttctcaggctctttttttccccccttctcttctaatgcctttcacaccaccatttgcttaaaaggaagctttcatgtgtccaaggtatagattacgatgttgtctttgcagctgttgatcaagaacaaatcttacataagattgctctgagcatctgcttccttttctctctgtgacctaaactctccccttcctggcaaccagaatggagatcatcagttagaaaatattgaataattgtgaaatatttaaatagagattagtttaatttgaaatgtacaagtattcagcatatgctatttatatatgtgcgttcatggatgtttgtgtatgtggtcttgtgtgtgtgtgtgtgtgtgtgtgtgtgtttctcttgatccaccaccaccccattcaccagcctgacaggggacagtgtttccagaaggaatgtaattcatgcgcatttttttcatgttaagttttataagaagaccaaacagctgccagtcctaggaaaatgctgtgaagagatccagccacatcagtggaagccacctatagagagagaagaacaccggctcccattctggttaaaggtacagccctcttcctcgaagtctgtaggaggcagaaggtcactgaaagttctgagagaatatcaagggcttccttaatcgtctaatgctttagttgtagaactaggactttagaaatcttcctgattcacctttcttcccttacttttctgcccttctctgggtgattctacagcattttcaaaataataggtaaaataataatttgctaaaggaaattcacagaagtttctaaagtgtataattagaatgtggtctttgtagatttgatatgcagagagacccttcttggaaagatgccttgagactgtctaaggtctctaaaacctagaaagccctattgtttttcccaaattctttttttgttgttgttttgttttgtttttgagacagagtcttgctctgtccacccaggctaaggtgcgatctcggcttctcgcaacctctgcctcccaggttcaagtgattctcctgcctccgcctcctgagtagctgggattacaggcacatgccaccacacccaactaatttttgtatttttagtagagacggggtttcaccgtgttggtcaggctcatcctgaactcctgacctcaagtgatctgcccacttcagcctcccaaagtgctgggattacaggcgtgagccactgtgccaagcctctttttcccaaattctgacatatgctggatcagagtgttcttgtttccaataggccagtctgccatccatccaggaagaactgcggcacatggctgatggtgctagagaggtaggaaatatgactggaaccactgagatcaactcagatcgaagcctagaaaaagacaatttggagttggggagtgaatctcggtacccactgctattgcctaagggtgtagtcctgaaactgaagccagttgccacccgtttccccaggaaggcttggagacagaagcgttcatcagtcctgaagcccctccttatccaacccagcccctctctccagcccagcttcaaccctgggaaaacaccagcccgatcaactcattcagaagcccctccgagcaaaatggtgctccggattcctcacccaatacagccagccactgttttacagacagttccaggtgtccctccactgggggtcagtggaggtgagagttttgagtctcctgcagcactgcctgctgtgccccctgaggccaggacaagcttccctctgtctgagtcccagactttgctctcttctgcccctgtgcccaaggtaatgctgccctcccttgccccttctaagtttcgaaagccatatgtgagacggagaccctcaaagagaagaggagtcaaggcctctccctgtatgaaacctgcccctgttatccaccaccctgcatctgttatcttcactgttcctgctaccactgtgaagattgtgagccttggcggtggctgtaacatgatccagcctgtcaatgcggctgtggcccagagtccccagactattcccatcactaccctcttggttaaccctacttccttcccctgtccattgaaccagtcccttgtggcctcctctgtctcacccttaattgtttctggcaattctgtgaatcttcctataccatccacccctgaagataaggcccacgtgaatgtggacattgcttgtgctgtggctgatggggaaaatgcctttcagggcctagaacccaaattagagccccaggaactatctcctctctctgctactgttttcccgaaagtggaacatagcccagggcctccactagcagatgcagagtgccaagaaggattgtcagagaatagtgcctgtcgctggaccgttgtgaaaacagaggaggggaggcaagctctggagccgctccctcagggcatccaggagtctctaaacaaccctacccctggggatttagaggaaattgtcaagatggaacctgaagaagctagagaggaaatcagtggatcccctgagcgtgatatttgtgatgacatcaaagtggaacatgctgtggaattggacactggtgccccaagcgaggagttgagcagtgctggagaagtaacgaaacagacagtcttacagaaggaagaggagaggagtcagccaactaaaaccccttcatcttctcaagagccccctgatgaaggaacctcagggacagatgtgaacaaaggatcatcaaagaatgctttgtcctcaatggatcctgaagtgaggcttagtagccccccagggaagccagaagattcatccagtgttgatggtcagtcagtggggactccagttgggccagaaactggaggagagaagaatgggccagaagaagaggaagaagaggactttgatgacctcacccaagatgaggaagatgaaatgtcatcagcttctgaggaatctgtgctttctgtcccagaactccaggtgagagctggagaatattctcaagtatttcgtggactcagtaatatgtatcacttattgatatgccacctgcttgcttgctgcactatggatagtcctaaaatcatttgtatttgatttgtgaatgcattatgggacatgattgtggagttgaggtgaaatgagatggaaaggatgaaattttacttattatattaaactcgtttacacattaaattgaatcacctgaccatactttaaatgccttaaaaaatagtaataggctgggcttggtggctcactcctgtagtcccagcactttgggaggctgaggtgggtggatcacaaggccaggagtttcagactggcctggccgacgtggtaaaaccccatctatattaaaaataacaaaaattagccaggcatggtggcggacacctgtaatccctgctgcttgggaggcagaggcaggagaattgcttgagcccgagagacagaggttgcagtgagccgagatcacgtcattgctctccagcctgggcaacagagcaaggctctgtctcaaaaaaaaaaaaaaaaaaaaaaaaaaaaaaatagtaaataactgggcacggtggctcacgcctataaatcccagcactttgggaggccaaggcgggcagatcacctgaggtcgggagttcaaaaccagcctgaccaacatgaagaaactccatccctactaaaaatacaaaattagctgggcgtagtggcacatgcctgtaatcccagctactcaggaagttgaggcaggagaattgcttgaaccggggaggcagaggttgcggtgagccacgattgcaccatctcactccagcctgaaaactatcttcaggttacagaagtttgtaaaagggaacttcttcccctctcctgctgtcaggccgaatgtcagctatcactgggatttcttttttttgtcttgttttgtgtgtggttttttctgtgttttttttttgtttgtttttgtttttgttttgagatggagtcttactctgtctcccggattggagtgcagtggcataatttcagctcactgcaacctccacctcccgggttcaagcaattctcatgcctcaacctcccaagtagctgggattacaggcatgtaccaccatgcctgactaatttctgtatttttagtagagacgtggtttcatcatgttggcgaggctggtcctgaactcctggcctcaagtgatccacccacctcggcctcccaaagtgtcaggattacaggcgtgagccactgtacctggcccattgctgggatttcataactcaaggaattcccctcaggacagctgtagtgggctccccattgtttaacttcagattatcctgatatagctttgtgttgtttgcaattcatgagccactaagagccattataagtactctttggagggttttacaggaaacaatggagaaactgacttggctggcatctgaaaggcgcatgagtcaggagggtgagtctgaagaagagaattctcaggaggagaactctgagccagaagaagaggaggaagaagaagcagaaggaatggaaagcctgcagaaagaggatgaaatgacggatgaagcagttggagactctgctgagaagcctcctacttttgcttcacctgagactgctccagaagtggagaccagcagaactccaccaggtgagctaggcaaacctatactgaaggaccattctcacttaacctcattgtctagaggacagtgtgcagggtgggtagcttataaaccaggtggaggatttccagaggaaaccctctggatctcttctgcaacacccctcccccaaaacatgtttaatgtggtatctttgtggagaacagatactcagaaatttttaattcaattctcatccgttgctagatttatattagcttcgttcactttctttcttttttttatttttttattttttttttgagacggagtcttgctctgtcgcccaggctggagtgcagtggtgcgatcttggctcactgcaacctctgcctcccaggttcaagcgattctcctgcctcaccctcctgagtagctgggattacaggcatctgcccccacacccagctaatttttgtatttttagtagagatggggttttaccatgttggtcaggctggtatcgaactcctaaccttatgatccacccgcctcggcctcccagagtgctgggattacaggcgtgagccactgtgcctggcagttcactttgttaaactgattgttaccttatctgtcatgtgtggggctaagacccatgtttatttcagaaaacactgcttgttcctcatcaagacatagtctctcaaaagcactacagaagccacacttgctctttagacttcctttctcaatatgaagtagctgattatcttgttgtcatcccaattaaggcagttacactgcagactctgcgtagaactgacttgacggacttagttctcataccattttcccaaaaaccttttccttgaattgctccataatattgaataggatttggctggggtggtgcatgtggtggaatgggaagaacacaggttgcagggacagggaaacaatccttttcatgtgtgctacaaggagagagcatcaaagctgctggaaaaggccggaacaatcatcgagctcgcaacaagcggggaagtcgggctcgggccagcaaggacacctccaagctgctgttgctgtatgatgaggacattctcgagcgagatccactcagggagcagaaggacttggcctttgcccaagcttatctgaccagggtaggcaaatgctgcttcctgttattgccagtctctatgaatgtggctgcttcttcaagggagatgtttttcaacataaagtctgtttttcaggctatgcaacaggcttcatattcctctatcttggcttttctggcaaaagatctctgtgacagaaccacaaggagacatagaattcaatcataagtatgtttattgttagtaccctgccatcatccttctgttgaccagagattggcagaaagatgataccaccatcatcagtgggaggttgtgactttactgggtgcgctgataaggacctttatagaacctttggcttgagaagaaagatagtgggtacactggccagcaagtggatttcaggaaaatacattgctcttaagacatgaaccagctgggcgtggtggctgacacctataatcccagcactttgggaggccgaggtgggtggatcacctgaggtcaggagttagagaccagcctgaccaacatggtgaaaccctgtctctactaaaatacaaaaattagccgggtgtggtggtgggcgcctgtaatcctagctacgggggaggctgaggcacaagaatcacttgaacctgggagacggagtttgcagtgagccgagatcgcaccactgcactccagccttggtgacagggcgacactctgtctcaaaaaaaaaaaaaaaatgaaccaggctgggcgctgtggcccttgcatataatgccagcactttgggaggctggggtaggaggatccttgagtccaggagttcaagacaagacaagcctgggcaacacaggagacctccatctctacaaaaataaaaaaaaaatagtgagctaagcatggtggtgcatgcctgtggtcctaggtactttgggagtctgaggtgggaggatcacttgggcccaggtggttgagactgcagtgagccatgattgcatcagtgcactccatcctgggcaacagaatgagaccctgtctcaaaaaaaaaaaaaaaaaaaaaaaccacacataagctaaccacttcttggtagtgtcctggagaactgtgtccttctcttggtaaccacctgattcctttatccccctggaaagcagaatactggcaatgatagtcatagctttttcttatctcctaatgttttactgacattcctaacttatgtattatttactctcaaattacgcccatgctgaaatacatgtacaaacacatgttacctatttcattatggggctgtaatcagtaaggaaaggttagggctgtgacctagagaaaagcattgcttggttttgtgggtagaactgtggaacgtggaagatgatttttcacttgctcactcccagaaaaagatctttaccttgcctattgctctgtgtcttccattaacagtcagatgttaagatctgttggaggcacagcctctgatggataattcttggagctctctaaccataaccctgccttctcccttgtacccttattgcttgttgtggcccaaataaagggtgttgatgattgaaagtcttcccgtgtaggtgcgagaagccctacaacatatccctggcaagtatgaagacttccttcaagtcatctatgaatttgagtcaagtacccagagacggacggctgtagatctctacaaaagcctgcaaattctgctccaagactggcctcagctgttgaaagactttgctgctttcctgttacctgagcaagctctggcctgtggattagtaagtgaatggggaaaaaaagtacactgggactcctgggtcagagtgagactgggattgaatggggttgaataagactctttcagtctcccagctccttccagacacacagccatcccctagcccagagtgataaaagcctctgtcttttcagggtattatctttccaatcccattctcccattttctttacatgataaatgagagggttttacctatagttgccaaaggacaccttaggtgagtcatatgctctctgcttctcactggtatcaagccagacattcatttaacaaatatttgttaggtgcctcctaactgtcaggaattcctagcaattcctgacctcaattgctaggaatatagtaattacaaaagactaaaattcctgccctcgtggagcttacgttatcatgaggaaattcagatgatactccagaaaacatatatatatatatatcatatatatatatatataatatataaaatataaattataaaaataaatataaacagcaaaatatatagtatacaatgttttatagtgatcatgttttacagaaaaataaagcaggaaaggaaactagaggggtggttttatacacagcggtctgggaaggccactgtggtatggtaacgtgaaatgttgcagaataggaggctaaacatgagggatatcccagtagtcctggacttatcgtcataaaaataggaacaaagggaggaacgggattattctaagagttttattggggttaaatgacagtggggtagttctgcatataatgtgtgatgcccattttctcttctggtattatgaggttccaatcagtgtatacgtgaacaaaaaaaaaaatttttttttttttgagatggagtttcactcttgttgcccaggctggagtgcagtggcgtgatctcggctcactgcaacctccgcctcctgggttcaagcgattttcctgcctcagcctcccgagtagccgggattacaggcatgcgccaccaccacgcctggctaattttgtatttttagtaaagacggggtttctccatgttggtcaggctggtctcgaactccagacctcaggtgatctgcccacctcgacctcccaaattgctgggattacaggtgtgagccaccacacttggccaaaaaatttttttaaagagataatgtcagccaggtatggtggctcacacctgttatcccagcactttgggaggccagcctggacaacatagcaagaccccatctttacataaaataaaaaaattaactaactgggtgtggtggtgcacacctttggtcccagctatttgggtggctgaggtgggaggaccacttgagcctgagaggttgaggcttcactcagccatgattgctccactacactccagtttgggtgacaagagcaagaccttgtctcaaaaacaaaaaagagagagacaatggccagacacagtggctggcatctgtaatcccagcactttgggaggctaaggtgggaggatcccttgtagccaggagttttgttgttgttgttttattgttgttgttttttgaggcaaagtctgactctgtcacccaggctggagtgcagtggtgtgatctctgcttactgcaacctctgcctcccaggttcaagtgattctcctgcctcagccttccgggtagcagggattacaggcatgcatgaccgcacctatctaatttatgtatttttagtagagatggggtttcaccatgttggtcaggctggtctcgaactcttgacctcaggtgatttgcctacctcggcttcccgaagtgctgggattacaggcatcagccaccacagctggcctgtagacaggagtttgagatgagcctggacaacacaggcccctgggatcctcctgcctcagcctcccaagtagctcaagctacaggtgtacaccacggcccctgcctaatttttaaatttttttgtagagacatagtctcagtatgttgctgttcttgaactcctggccttaagcgatcctcctgccttggcctcccaacatgggattacagctatgagccaccttgtgcagcctgaaagttctttgtaatataaactctaaagtatcatatgaattttggtggctgatttcacaatccttaaaacagcaaacaacttgaaatatatacatctcttgaagctgttgctcacatcttaattgctttgggtggctacccaccagtggcccaaggtggatggaggttagggttttaaattagatctcaatagttgtaaactagaattttaaaccagggttctgtcatctcttgtgtcctagtccactagttcttatccttagaaccctcaagtcctgctctagctgtatcatgactcctcttttgcccactttccactctggtagtttgaggagcagcaggcttttgagaagagccgcaagttccttcggcagctggagatttgctttgcagagaacccctcacaccaccagaagattatcaaggtcctccaaggctgtgcagactgccttccccaggagatcaccgaggtattctttcctgtcctgctttcttcctgttgtcttccgggccttaggcctttcccttgtctctttccccaacctactccatacctttttgcctctggaggctcatgggcttcctggaggagatgaaaaaggcaaggacttttcaggctcacccaaagcataaagcactgggatagggagggattgctacctgaaaccggagcctgtctgatcttcacaggctcaggaatgccatggatgtgctggaagggatgttcagcgaaggaggttctgggacctgggaggggccttacctccttgctctgcttggaatagtgccctagctggagatcagtagggtggagtggagagtggaatcattaggaatcaaatccagtattagtacccttcccctataggcagctaaggaggaagagaaagttttagtattctttgttaccaggcagagtctctgtgtgtttcccagttgactgggaaagcagaacatggaagtatgtgggattgattgggaagggcagcctagagaggctctggagacttcctctttccctctgtgactctcctcagctcaagacacagatgtggcagctcctcaagggccacgaccacctgcaggatgagttttctatcttctttgaccacttgcgcccagcagctagccggatgggtgactttgaagagatcaattggactgaggaaaaggagtatgaggtataggacctaaggctgctgtagccttatgaagggggaaggccacacgtgggagggatattggcctggtgtctgtgctcagcagcaccaactccttctcagtttgatggctttgaagaagtggccctgcctgatgtggaagaagaggaggagcctcccaagatacccacagcctcaaagaacaagaggaaaaaagagatcggggtccaaaatcatgataaggtattttctttgtttatttgtttgtttttgagacagaatctcgctctgtcacccaaactagagtgcagtggcgtaatcttggctcactgcaacctccacctcccagattcaagcgattctcccacctcagcctctcaagtagctggaattacagacaggcgccagccaccacgcccagcaaatttttgtatttttagtagagatggattttcactatgttggccaggctggtctcgaactccttacctcaagtgatccacccgcctcggcctcccaaagtgctgggattacaagtgtgagccactacgcctggcctaaaatcatgataaggtatgccaagttattgaaaattatctatgtttcatgaatcaagccttgcgttttctcactgaacatttctgtggcttactatggcccaaggtttctagttcaaaggctctaggatctgagacgatcacggagaacaaaccaaaggtcaggctgatacagacatgcagagcctttgggaaaactgcagttgttgcaggggccccaggattccctagttagaaggatttgtttcttccccttttctgtctagctcagagttattacccttaattcaacttttttcatttttgctcatgtgagaaaatagagccaattgaggatgagcttgttattaaaaaaataaaatagaaccaagattccccatattaataataatgatagcagctaatacttagttgtattacaaagtgtcaggcattctgggaagtattttaatggattattgacacatttaattctcacagtaatcctatggagagattgctcttgtttgcattttacagaagacataactgaagtgcagagaggctgttgtcagggtctcatatttagtaagtggtggtgctaggatatgaactcctcaggtaagccatctgtggagtctactggttgtcactgctcttcaagcagtattttttttttttttttttaattcgtgtttcctgaccaagcgttttttctcttttctggggagaaactgcttcttagtagctgtatgaccttgggaaacgtatttaacctctctttgtttcagtttcttcatcataaattgggatgataatggtacttacttacgtcttgggtttattaaacagtgtcactgagtaggctttccatgggtacaaagttctctctgaaggggattggaagagatgggagagctgaagtcacagagagacagaaacaaagacattatatctcatgatggagctctccagtgattttgcctcagattatgtctgacttaaatatttcttgaaacatctggggcaattgggatatgtcagtctttaggtcatttagggattgtttcagggattcataataggccttaatctagtttgggctattgatttccccaggcgatgtgaggagttgatacataaaagaggatggggtccgggcgtggtggctcatgcctgtaatcccagcattttgggaggtcgaggtgggtggatcacttgaggacaggagttcaagaccagccagagtaacattgcgaattcctatctctactaaaaatacaaaaattagccataggctaggtgctgtggcttacacctctaatgccagcactttgcaaggccaaggcgggcggattacttcaggtcaggagttcgaaaccagcctggtcaacatggcgaaatcccatctcactgaaaatacaaaaaaaattaggcttagtggcatgcgcctgtaatcccagctacttgggaggctgagacatgggaatcgcttgatcccggggagtggaagttgcgctaagctgagatcacgccactgcactccagcctgggagaaagagcgagactccatctcaaaaaaaaaaaaaaaaaaaaattagctaggcgtggtggtgcgcagtcccagctacttgggaggctgaggtgggaaaatcacttgagcccaggaggcagaggttgcagtgagccatgaatgtgacactgcactctagcctgggtgacagagccagaccttatctcaaaaaaaaaaaaaaaaaaaaagcatggggagagggtgggctgtgttgtgttcatatggctcacaactttagcttcctctcttggtaccaaaaatacggccaggcacagtggctcatgcctgtaatcctagcactttgggacgctgagggagggcagatcaagaggtcaggagttcgagaccagcctgaccaacatggtgaaaccctgtctctactaaaaatacaaaaattagctgggtgtggtggcgcatacctgtaatcccagttactcaggagcctgaggcaggagaatcccttgaacctgggaggcagaggttgcggtgagctgacatcgtgccactgcaacccagcctgggccacagagcgagactctgtctcaaaaaaaaaaaaaaaaaaaaaaacaacttggcagctaatcaagcccaagtatctcctaggagactgaatggccagatggggccaaggactgtgcctgctcctgccatgaaggaggtccagattccaagctgaagaagagcaaaaggcggagctgtagccactgtagcagcaaggtgaggaaagtatcaagggtcccgagggtatcagagctgctgggggattgtttgctaccaagaattgtaccttactgaattcctaaaaaggcacatatataaataacattcagtatacacatatgtgtacatatgcaaaataaatggaatctgctagaaatacgtgatagattttgttttttaaagagaattctgtgagtaaagcttttggaattggaaaaacaaaataccagttaaaatatttccctcagatattagaaaatgaaataaacctctgtcgtgaaaatagtctctacaagtaatcctggttctctagaatggagttggttggcaggaaaaacacagttcttggtgagagaaggagttgtggaatccaatactctattcggggccatttaaaatccttggagcagggaggcagaggttgcagtgagccatgatgataccactgagctccagcctgggtgacagagtgagaccgtgtttaaaaaaaaaaaaaatcaaatccttggaggaatagctgggcaacagggcactcaggaggctcaggtgggaggatcacttgagcccaggagtctgaggctatagtgtaccaccatggtcatgcctgtgtaaacagccactgcactccagcctgggcaagataatctgtgtcatctgagaccctgtctctgtctatcttttctttttgtttgtcatttgagacagagtctcactatgttacccaggctgatcttgaacccttaggctcaagtgatgctcacaccttagcctcccaagtaactaggtttataggcatgtaccactgcacccagttgaaactctgtcaacaaaattgttggagcagacatgcatgtgggttgacttgatgagcatcaggcagggcttcttcctttggtgggccccaaccaaagacataggcagtcagaacacctttgacccggaagaccatccctgcaggtctgtgacagcaaatcctacaagagcaaggagccccatgagttggtgggcagcagcccccaccgagaggctagtcctatgcctggtgctaaggaagctgggcagggcaaggatatgatggaagaggaagccccagaggagcgggagagcactgaggccacccagagcaggactgtcaggaccaccagaaagggagagatgcctgtttcaggtgagtgatttgccaacgcagcccttctgttcctcagtctcgttatcctgtactccagacaggaacctccatgagcctggataaatagccttttcagggatggatataccacctctttcactgatggacccataggaagcccttctgctgttcaggctttttctatcatatggcctcactcctcttgcagaattaagaatgccacaaatttcatgcaattcaacattgtcttgtgttttattccaaaaacccttccccctgtctccaaatctagtgtaatctacatcctaaagactgggccgttctcagctttggcagtaggactttatatctttgcataagtgacattatgccccccacctccacccaactcttttattatttatattttcttgtagagatggagtctcaccatattgcccaggctagtctcaaacccctggcagtcccaccactttggcttcccaaagtgcggacattataggtgtgagccaccatgcccagccctcttttttattagaatttttgcacagtacctggccacaggtaatttctcgtgcttaggtgcatcttgaacctgacagtaccctgagatccttattttcctcctaagcaggattggcagtggggagcactttgccatcccctcgagaagtgactgttacagaacggctcctcctggatggcccaccacctcattcaccagagactcctcaatttccccccacaactggagctgtactgtacactgttaagagaaaccaggttgggcctgaggttcgctcctgccccaaggcatcccccagacttcagaaagagagggagggccaaaaggcagtgagtgagtcagaggctttgatgctggtctgggatgcatcagaaactgagaaattgcctggtaccgtggaaccccctgcttccttcctgagtcctgtttcctcaaagaccagagatgcagggagaagacatgtgtccgggaaaccagacactcaagagagatggctgccctcaagcagagctcgggtgaagacaagagacaggacgtgccctgtccatgaatctccatcaggaattgacacctcagagacttctcccaaagcccctagagggggtttggctaaagacagtggaacacaggccaagggtccagagggggagcagcagccaaaggccgcagaagctacggtgtgtgccaacaacagcaaggtcagctccactggggaaaaggttgtcctgtggacaaggtaggtaagggtggatgacgtgtgtttggaaaagagcatagaccacatccatgtggctccctagggttaatcatgatacctgggttacagggaagctgaccgtgtgatcctcaccatgtgccaggagcaaggggcacagccacagaccttcaacatcatctcccagcagctgggaaataagacccctgctgaggtaggtgcgggttggggtgaagacctggcaaaaagaggtcaaggtggccaactaacagacagaaaggccaaagaaggagttttgatatccaagataataagtggtttttgtaaaggtttgatctaaggaaaggcttgactcatcagggtggtagtggttctagaagagaaaggacactagattttgaggatttttaaatttttatttatttatgtattttagacgcagtttcacttgtcgcctaggctggagtgcagtggcacaatctcagctcactacaacctccacctcccaggttcaagtgattgtcctgcctcagcctctcccaaagtagctgggattacaggcacccaccaccatgccaggctaatttatttatttttagtagacacggggtttcaccatgttggcaaggctagtcttgaactcctgacctcaggttatccacctgcctcagcctcccaaagtgctgggaataggtgagatactgcgcccggccaggattttaaagtggaagccccagtttccattccagttttgtttttaggagttgtgtgactttgggcaaaacatttagcctcttgagtttccttatctataatgacatagctctcccaaccttgctgtgaggaataaacaagagatttttcaaatcagtatattgtgcttcataaatgttaacattgttacaaagcatcagtgaggctgggcgcagtggttcattcctgtaatcccaacactttgggaggccgaggtgggtggatcacctgaggtcaggaatttgagaccagcctggccaacatggtgaaaccccatctctactaaaaatataaaaactagtcaggtgtggtggtgggcacctgtaatcccagctactctgaaggctgaggcaggagaattgcttgaacccaggagacggaggttgcagtaagctgacacagtgccactgcactccagtctcagcaacagagagagactccgtctcaaaaacaaaaaaaaaagaccagtgaatacagccctcctcctttcttaggtttcccaccgttttcgagaactcatgcagctcttccacactgcctgtgaagccagctctgaggatgaggatgatgcaaccagtaccagcaatgcagaccagctgtctgaccatggggaccttctgtctgaagaggagctggatgaatgagactctgggaatcatctacacaggaccaaacccaacaggcgccctggcaccggggagggggtagttgtactctgcttgtacagtccttgagcccagtttacagatctggagagcaggaggccaggacaaggacaaaggctggaggatggagtaggacccaggggctctgccatcctaggcatcattcaaggtcttttatgaagactttacagatgtcctctgtaaatagcatcgagagtggagttcagctcctttctctacttttttttggtctgatggcacatatttattgttctgtggtctaatcacagtgtttctaaatgtaaaaagtgcatatgttggtgtagctagtcccgcgacattgagctcctctgcatgaagacactgggctcctgcatccagctgtttttattgcaaactagctcctttctcccacactgggaactttagtccacgaggctgtcaccaccctggtagcactgggccaggctttgtagctcctgcagcagctctgctacgtcatcgtgctccactccagcatccatgaagctggcccagcgccgcaagtcgagtttggtgaggtctctggccaaggcttccagggtctggtgcagggacgaagaggaacacagtgccccaaacactgggatgctctccactgctgtggagggagaggaaacagagacctgtagatggatgattattctgccctgggactcgccaaactgataaggaagtccaaccttagtagacttgattgtaaactcaacaaatttggtgtattgtccccttagtacaccagtactccagaggaagaatgcttttcttgggagccatagggtgaataaaggaatgtttaactgtggactttttcagcacttttaatccaggaatggagatagtaaaacctctcccatacttg

SEQ ID NO: 15596 - DNA, 109684 bp, Homo sapiens
ctctcccggaggggactcctcccaccgccgagttttcccgagaatgaggccgcgcccactgacgcgctgtggttccaaaacgagaaagtactgaagggtaagaagcataggtagattattatatgaaatcctctgatttcagttttctgggctttaatacagcagcaaaatgttctcggtcctgagttccagaattttgggaaaataaaattctgtactgcctggatttcagtatcgactgccatcattatgcatttctgagaccgctaaaggttattacagaacttttttttttggcttatatttcacagtggatggaaactgtcttaaacctcagaaactctgatgaaagaccaaacctggggatggttgcacaactctgaacatttactaattttaaaaaaacagccgggcacggtggctcatgcctgtaatcccaaacctttgggaggccaaggcgggcagatcacttgaggtcaggagttcgagaccagcctggccagcatggtgaaacccccatctctactaaaaatacaaagattagccgggcgtggtggcacacgctacttgggaggctgagacacgaggatcgcttgagcccaggaggtggaggttgcagtgaaccgagatcgcgccactgcactccagcctgggcaacagaacaagactccgtctgaaaaaaaaaaaaaaaaaaaaatttggttgtacacgtaaaacagatggatattgtggtatgcaaagctgtttaaaaaaaaaaaaaaaaacaactaatgaaaagtgccaaagttaatcagtgttgaatttttttcatgaacctcaagtgcttagggtttcgtatgagagaggccaaaccgaaagatctgtgtattctgtaggtcaaagaacaacacacatgaaactccgagcttctggagtcttccttggtatttgggagagttggtgtgattcaggttagtcagactactgccatgtttgcataaatttcaaccttcattttggctgtggataatttcatccgttggattctgtttacagataggattagttcaaatgtataaatttgtgttggtggtttacctgtaaaatgagggggttgaaagtatttttccaccttttgacattctgttttttattatttttttaatctccgtggattccagacattgtttttctagaaaagtggaaataacatcattttagaagtcattcattcattcgctcattcaaaaagcacgtattgaattattgaacatctgttacaccccaggcagcctcctggacactgggtcaatgcattattagctagagttaggagacttaatacctgattctccttgatagctgtctgtgtaccgttgtgaaatcacctactcagatgagccagaactttgtcctgtgcaaactggaatatgatataataatcttacagtctattgtggagaccaagtcacctaagaaaatgtgagagcattttgtaaaatgcagaatattgtacatatatgaataattactatagcctgagtccaagagtgccttagttttaatcaggagcctgcactatttgtaatttagagacttctttttctggcattttatgacttcttcagtcccttggtcctgtgttccaggtgactcgtagtgagaaaaattagttgttaatctttttttttttttgatacagagtctcactgtcgctcaggttggagtgcagtggcacgatgccggctcactgccacctccgtctcccgggttcaagcgattctcctgcctcagcctccggagtagctgggattacaggcgtgcgccaccacgcccagctaattttgtatatttagtagagacggggtttcaccatgttagccagggtgatctcgaactcccgacctcaggtaatccgcccgcctccgtctcccaaggtgccgggattacaggcgtgagccaccgcgcctggcccccaaattagctgttaatctaaaccactgaatcttaacctcagttttgagtaggataactccatgggcagagaaagctaagtagtgcctttaaatttttttgccaataactgacgcactaacgttgtggcttcactctgccctaaaatgggatggcgcatagtgttaggcgcatgctccttgatgcactgcggcgcggcgctccgaggctcggggacgcgcacgcaattcgctgttgttggctgacttccggtggtgccaaagccgtttccgtggaatcaggccggctggtgagggtacaggtttgtgtgtggtggggtgggaagaggcaggtgggagctgggacacctggacgaacgatgtccaggttgagaaggtcgggtctgagggtgggcgctgggtgcgtggcggaagttaagggcgtgaagtccagtgtctagttgggaatggggactggagccagccctgggcaccgaggtggaagcgcggttaggaccccttttgaaaatgttttcctaggagagggccgtgccggggctgcctccacattggcattcattcaccctgctggtccgacttgggttcccaaaaaagtggattctgtcgagctactgctgtgtttgaggtgcctggagctgaagtagctgtctttctttccttctttttctttctttctttttctttttttcccctttttttgatctcagtaattatctgtgaaataaaagagctgccctggctactcccattctatttcttataaggtcaccaccatctctcacaggaatcaacgaaatcttcatgttttattgagctttagttactgagttttaattacatcagttgattgaggggatggagaatctcccctaatgtcttggagaaacagaagggaggtttaaaactaactgtaggtcgggcgcggtggctcacgcctctaatcctagcactttgggaggctggggcgggaggatcgcttgaggccaggagtttgagaccagcctgggtaacaaatcgagaccccgtctctacaaaaaaaaaaaaagaaaaaaagtcgttgagggtggtggcaagtgccttgtagtcctagctactcgggaggccgaggccagagggtcactggagcccaggagtctgaggctgcagtgaactaggatcttgccactgcactccggtctgggcaacagagcgagaccttgtctctggaaagaaagagagagagagagaaagaaagaaaagaagaaagagaaatctaaccttagacgcttagagttacaaataacttttatttttcagttctctagttcaggctttcatctagtactctgataagtggacattcaggcttcgcttgaacattgccagtgatctaacacaaggcggcttattctattattggatctatttatgacagtaaagttttcctgggtaataagatgccttttttttttttttttttttttttttttgacagagtctccctctgttgcccagggtggagtgcagtggcatgatcttggcccactgcaacctccacctcccgggttcaagcgattctcctgcctcagcctcccaagaagctgggactacaggtgcccaccaccatgcccggctaatttttgtattttttagtagagacagcgtttcaccatattgaccaggctggtctcgaactcctgaccttgttatccgcccgccttggcctcccagagtgttgggattacaggcgtgagccactgcaccaagccactatcagtttttatataatgcttaacatttggcccaaatgctgcacagaataagttgtttaacctctgtttcatttattattcagggagcattcattgagtatctacaatattcagtgacacattgagtatcaatactcagtgatacattgagtatctacaatacccaaatactgaactggtgcagtggcttggatgggaccgtaatcccaatgacttgggaggctgaggtgggagcattgcttgagcccaggaggtcgaggctgcagcgaactatgttcgtgccactgcagtgcagcctgggtgacagagcaagaccttgtttcaaaaaaaaaaacccagatactgctggatattagggatatgagttgaaataatcccatttctcgaaaagctgatagttttggaggaaggagatgagaaagagaaagatgagagaccattacaaaactgataagtaccgtaaaagaggtttacaaacagatactaaaagaacatagaggataccctctggtttaggtcagtaatgcccttaaaatgtgataactagaattgaagcaaaaagccaagaagtaacatagcgcagaggatagtaggactcttatcttccttgtttcgacacaaagtttgttgttaatgtagcctaacctttttttttttttttgagatggagtttcgctcttgttgcccaggctggagtgcaatggggagtgatctcggctcactgcaacctctgtctccgggttcaagtgattgtcctgcctcagcctctggagtagctgggatcacaggcgtgtgccaccacgcccggctaattttgtatttttagtagagacagggtttctccatgttgatcaggctggtctcgaactcctgacctcaggtaatctgcccaccttggcctcccaaagtgttgggattacggacgtgagccatctcgtgcccagccaacatagcctaaccttttaaacaatcacactttgcttttgatttgtttctattaatggaaatacctgtttatgaaaacagcaatagcaaacatgtattgatcatttaccatctaatgaagtagatgctattatattccattttatagctgaagacactgagattcaggttgagtaacttccacaaggtcataaagctggagagaaggtgacttgggaaacatccagacagtctgattccacagtttactctcagcatcatgctagtctaccaccctgatggtaataataacaatgtttgctggacgcggtggctcacgcctgtaatcccagcactttgggaggccgaggcgggtggatctcaaggtcaggagttcgagaccatcctggctaacacggtgaaaccccatctctactaaaaatacaaaaaaaattagccaggcgtaggtggtgcacgcctgtagtcccagctattcaggaggctgaggcaggagaatggcgtaaaacgcgagaggcggaggttgcagtgaaccgagattgcgccactgtactccagcctgggagacagagtgagactctgtctcaaaaacaaaaacaaaaacaaaaaaacacaaaaataaacccacagtgtttattaatcacttactctttaattgtaacaattctatgaagtaagagcaattattttttactgttgagggtactgaagacttgcgaggttaaatcacttggcctaggtaacagtagtccatcagtagtaatcagtagagttgagatttgaactcagtcacttaaccactgtctctcaacttccacctaaagggaaattgtgcatttggtgtgaagtattgtgttcatgatcgaacatgaataaatgaaaagataattgagtaaatgttattacttttaattaatatgaaggcagtaagaactttttattctttcagaatggaacaaaagtgggacttttaaaatgttgccctgtaagaagagaagaactacagtgacagagtccctacagcataaaggcaatcaagaggaaaacaacgtagacctagaatcagccgttaaaccagaatctgaccaggttaaggacttgagttcggtgtcactatcctgggatccaagtcatggcagagtagctggcttcgaagtacagtctttgcaggatgcaggaaatcagcttggtatggaggatacatctctgagctctggaatgctcacccagaacacaaatgtaccaattctagaaggtgttgatgtggccatctctcagggaatcaccctaccttccttggagtcttttcacccccttaatatacacattggtaaaggaaaactccacgctactggctcaaagagagggaaaaaaatgacactcaggcctgggccagttacccaagaagacagatgtgatcatcttaccctaaaggagcctttttcaggagagcctagtgaagaagtcaaggaagaaggaggtaaggtatacaaggtctctaggttacattcttgtcaataccactttgccattgctatttctggatacctttacagagtagtatttctgaaaggggatattgatttggtacggaattggaactgctgtgttgctaagggtcaacagtgaactttttttttttcttgagacggagtcttgccatgtcaccagactagagtgcaatggtgggatcttgactcactgcagcctccacctcctgggttcaagcgattctcctgcctcagtctctcaagtatctaggattacaggcatgcgccaccacgccaggctaattttgtatttttaccagagacggggtttcaccatgttggtcaagctggtctcgaactcctgacctcaggtgatacgtttgccttggcctcccaaagtgctgggattacaggtgtgagccaccgtgcctggccagcagtgaactttatgaatggatatagactttcttttcccctcccattcgctatatccacttctgtacccctttcttctttcttttttgagacggagtctcgctctgtcacccaggccagggtgcagtggcgtggtctcggctcactgcaagctccgcctcccaggttcacgccattctcctgcctcagcctcccgagtagctgggactacaggcacccaccaccatgcccggccaattttttttgtatttttagtagaggcggggtttcactgtgttagccaggatggtctcagtctcctgacctcgtgatccgcccgccttggcctcccaaagtgctggattacaagcgtgagccactgcacccagccattgtatccctttcattccattctctcatcctttatttggtgtgtctggagatgtgtatggtcttttgtgattgggcagcagcttaaagggggagactactgcctgggacactgggaaaggctctactgagatgaatgacccttccaatttgaaagatgaattgcggtttaacagaaagtggtatgggcacataggccaagaacagtgcacagagatagactggcagaaaaggatggtgacatggttgcttggaacaggtggtgggagatgacttcttttttttttttttttttttttgtgacagtctcgctctgttgcccaggctggagtgcagtggtgtgatcttggctcactgcaacctccacctcccatgttcaagtgattcccctgcttcagcctcgcgagtagctgggattacaggtgcctgccaccacgtccagctaatttttttatttttattagagaggaggtttccccatgttggccaggctggtctcaaactcctgacctcaggtgatccacgtaccttggcctcccaaagtgctgggattacaggcgtgagccaccacgccctgccaagatgactttagagtagtagattgtactaaggttgtgaaaggttttgtttttcataccaaggcatttgagcttttcctgtaggtaggtgatagtcatttaaacgtctaagtagaacacatttatgctttagaaaagataccaacttctcttattcattttttttttgatacggagtctcgctttgtcgcccaggctggagtacagtggcgtgatctcagctcactgcaacctccacctcccctgttcaagtgattctcctgcctcagcctcctgagtagctggtattacaggcgcccgccaccgtgctcagctaatttttgtatttttagtggagatggggtttcaccaggttagccagcttggtcctgaactcctgacctcaggtaacccacctgcctcagcctcccaaagtgctgggattacaggcgtgagccactgcgcccggcctagattgtgaaggtttttgtttttcatactaaggcatttgagcttttcctgtaggtaggtgatagtcattttttttttttgagacgtagtctggctctgtcgcccaggctggagtgcagtggcgcagtcttggctcactgcaagctctgcctcctgggttcatgccattctcctgcctcagcctcccgagtagctgggactacaggtgtctgccaccatgcccagctaattttttgtatttttagtagagacggggttttaccgtgttagccaggatagtgtcaatttcatgacctcgtgatccacctgcctcgtcctcccaaagtgctgggattacaggcgtgtgccaccgcgcccggccctttttttttttttttttttgaggtggagtctcgctctgttgccaggctggagtgcagtggcacgatctcatctcactgcaacctccgcctcccaggttcaagcaattctgcctcagcctcccaagtagctaggactacaggcacacgctgccacgctcagctaattttttttttttttgtattttagttgagacagggtttcaccatgctggccacgctggtctcgaactcctgacctcgtgatccaccgacctcggcctcccaaagtgctaggattacaggcgtgaaccactgcacccggcctattcattcattttgactgttaagatgttttcttttttgccgcattttaagtccacttgttcttattttgtcctactggtacattctcagtatgtggttttttattgtgtcttgtgtgtgtttatattgaagaatttcatgtttctgactctgctgtatttgaaaactgatggagtgcccaagatgagggagtttagcaataatcttgatggtatactgtgttggtcacgccctctctggcatgagctgcctgaagcacattgtcaaagatgaaagctcttttggggaaaagtgctctcctgtggaatcatcccttgtcatagcatgtggctctaaattttcagcctcattcacagtagcttgcattgttgtattgcttttgggacacctgtgttttatctggaaatgtagacaggaatagcggttttttttgtatgtgtattatatattgtttcactgctaatcttctacacaattttttagaataaaaaagggtaaatagcttgtgccattttgctaattacatagatttgacttttgatcacataaataaaaaataaaacaaggcaggacattgtcctgcacatagttgatgtggacaaatactttttattactttgaaattcttattttgatagttttccacttaatgaggcaagtgcttaagcctcagtctttttgagttctcattatttagacataaggaaaggagaaatgaaggtttttctttattctccccatgcctttcctttttttctcttttattctttttttttttttttaagagcagaatatactagatcaggacaaattaaggtgatactggaatttaggtgtttttactggaaaaaaggcatttcctttgagatagtttaaagaaaatagtaaggagataagaatcagttcaactactaattcaggaagccgggagagatgtacattcaaagcataggacagaatcaagttttctttcttttttttttttttttttttttgagacggagtctcgttctgttgcccaggctggagggcagtggtgcgatcttgactcactgcaacctccgcctcatgggttcaagcaattctcctgccgtagcctcccgagtagctgggattacaggcacccaccaccacacccggctaatttttgtatttttagtagagacggggtttcaccatgttggtcaggctggttttgaactaccttttttttttttttttttttgagacagagtctttctctgtcagccaggttggagtgcagtggcacaatctcggctcattgcaagcttcacctcctgggttcacgccattctcctgcctcagcctcccgagtagctgggactacaggcgcccgccaccacgcttggctaattttttgtatttttagtagaggcagggtttcaccatgttagtcaggatggtctcgatctcctaacgtcgtgatctgcctgcctcggcctcccaagtgctgggattacaggtgtgagccaccgtgcccagccctgctggttttgaatttctgacctcaaatgaccacccgcctcagcctcccaaagtgctgggattacaggcgtgagccacagtgcccagccccttttttttttttttttttttttttttttgagatggagtctctgttgtttaggctggagggcagtggcatgattttggctcactgcaacctctgcttcccgggttcaagcgattctcctgcctcagcctcccaagtagctgggattacaggtgtgcatcaccaggcctagctaattttttgtatcttagtagagatgggatctcatcaggttggccagcctggtctcgaactcctgacttcaggtgatccgcctgcctcggcctcccaaagtgctgggattacaggcgtgagccaccgcgcccgacctacaattccgtagttttagtaaaccattgcagtaacctacaaaacacattttgatgtttaacttttatctctcagatttttttttgtctgaaaatgacaaagaaatcctttgttctgagttttggtttaaaacataatctctatctgtgtgacatttaaaagaagcagaagacatagttctaacctcaggaagtttagaatcttaattgggaaaacaaccataaatatatactttttggaattggagcttgaaggattcacaggatttgatagattgtgagggaagaagtggaagtagaataacatattctgcaaacatgtagaaatgctgtgtttgtgtgggaaagtactaaggcttcaggtagaaagagtagatccagattatggagagccttgaagctttccccttaagaccttaagatttagaataggatgctggcagtaagggtagagaagaatgggtacaccatagacacattacaaagaaatgattaacactgctcagagactgacatgtaagatatctggggtaggggatggtgatgcatgccttcatagggaaggtatttgagagtttgaatatgagttcagatttgggtatgagttatgcaggtgaaccccaaaattggggctcagcccaggggggttcttggctttgtgcaagattcatttgcaagccaatagagaaaaaggaaagcaagtttattagagcagcagagtacaggaaatggctgccccatagacacagcaatagcagcagcccttgtgaatagatagctattccttgattatatactaaataagggcaggttattcatcaattttctagaaaaggggcagggagttcccagaaccaagagatcctcccattttaaaccatataaggtaacttctaggggttgccatggcatttgtaaactgtcatggcagtggtgggacttttcttctttgtatgtatgtatgtatatatttatttattgtttatttattttgagacagagtctcactctgttccccaggctggagtgtagtggcacgatcttggctcaccgcaacccccgcctcctgggttcaagggattctcctaccccagcctttcgagtacctgggactacaggcatgcaccaccacactcagctaattttttttgttttttgttgttttgagatggagtctcgctctgttgcccaggctggagtgcagtggcgccatctcagttcactgcaaccaccacctcctgggttcaagcgattctcctgccccagcttcctgagtagctggggttataggtacccgctaccatgcctggctaatttttgtatttttagtagagacggggtttcaccatgttggtcaggctggtctcaaactcctgacctcatgatctgccctcctcagcctcttaaagtgctggaattacaggcttgagtcactgcacctggctttttttgtatttttaattgagatgcgtttttgccatgttggccaggctggtcttgaactcctgacctcaggtgatcatctgcccgcctcagcctcccaaagtgctgggattacaggcatgagccaccatgcccagcctgtttttattttttaaaaccaatccatttaattgtgtctttcaaggtaaacaatttatggagcctggatcccaagcctgagagtgctagagctatgggtccaaaacttgtggtattctgagttcagaagggttcgaactcacggtgttcaactcacggagtcagagaacatgcggaatttgtgtattccatttagcaattttgtaaattaccagaaacagactgaaagagtctttcaagatggggaaaattcaactcctgtgttttttttgtttttttgtttttgagacagagtttcactcttgtttcccaggccgtagtgcaatggcacaacctcaatggcccctgctcggttgaagcgattcttctgcctcagcctcctgagtagctgggactacagccgtgtgccaccatgccaagctaatttttgtatttttagtagagatggggtttcaccatgttggccaggctgtctcgaactcctgacctcaagtcatccacccacctcggcctcccaaagtactgggattacaggcgtgagctaccgtgcctggcccaggacagctttttaacaagcagttaaagtggaaaagaaccccccagtagcacgctggtttagtttataagattttagtttacaaattaaaaaatctatatgttttacattttctctttatatcacttttttcctttatctttctctttgtcgtcttttgtatccttttttgctctcttctttttcctatctttttttttttttttggtgacagagtcttgctctgtcacccaggctggagtgcagtggcgcgatctcggctccctgcaagctccgcctcccgggttcacgccattctcctgcctcagcctcccgagtagctaggaatacaggtgcccgccaccacacccggctaatttttttgtatttttagtagagacggggtttcactgtgttagacaggctggtctcgatctcctgaccttgtgatccgcccgcctcggcctcccaaagtgctgagattacaggcgtgagccaccgcgcctggccggtttctttttcctgtctttcttctctgcatcccagttggcaatcttgttgatgaggttgtgtagggtgatcacagaatggatcagcgaggccaagtacactgctaccatttggttattggtcttcaggtaaaaggccttgacaaactcctataggctaatgactggcagcagcttgaagacctgcagctgatagatgaattggtggttggtggacagtttgcctgtggcaactttttccaggtagcttctggtacccagaagcttggagttcagtcccttcaaatccaggacctggtttgtgatacactgggaaagagtgcccactgtagtgtctttgatgtcttgtaacaagtgtttaactccaatttccttagcttcctctgctgcagtttcactggtcacatgctcaaatgttttcaaggctgaagttccatcttcatagacttctactgaaatatatgcttctgtaggcagccctaagtcctttggcttcatgtcactagtgaccaatactgagttacggcagtatcttttcatgatttcattgaaggcagtgtcattcttgtgtagtttagggcctatgtggtaccactcaactattctttccctggcattcaccctcttaaacattctgtatgtgtttttcaaataatcgtgggctaaaaaacaattatctttgtcatcttcattaaaagggactgtaaaactgctggatacatcaagtactttcatttgccatgaccgcaaaagcacatgaagaatgcatttctggtttccaaccttgctgattctgttgaaatgatccaccacattgagcagtacctgggggtggactaccaccttctgcaccaccaggtccagcctcatgatacactctggccaccaggcctggctccctgtgacccactggagtttcttttagcatgcaaattcattataattagtgtataataagcagtgagagcaaccgaatgtcacttttgttgccatcttggttgtaactggttttggctgctttctttgctgcatcctgttttgatcagggttttgttcttgttttgttcagcaggctctctggccagtgcttggaaaacaaatcctgcttctctcctacctcactccccccacagagattatatactccccttcaatcttacagggttttagaagggtggaagtccatcttctgtgactgcttcctgttgattttatgggcattggccctgcctagcactggaggagtaaaaatctcttgatgcctcatctaaggggtcagaacaaggatgtgttggaagccacttgctagcattatcttcacatggaaattgttgcaatctagaagacacacactacaaggaggctaaaagaggcagggccaaagattcatagttacaagatagctgctagaggtcctaaaaagagtagaaaccaggtgagacttgggagggttttttttgttgttgttattttttgggttttttgagacaggatctcgctctgtcacccaggctggagtgcagtggtgtgatcatggcccactgcagctttaacctcccaggctcaagtgatcctcctgccttagcctcctgagtagctgggaccacatgtgtttgccagcaacacccagctgatttttaaatgtttttatagagacacagtctcactatgttgcccgggctggtcttgactcctgagctcaagtgatcctcccactttagcctcccaaagtactggtattacaggcgtgagccactctgcctggccaggagggtgttttttatggtcaaccagatatagttggggtcagttccctggttatatatatgtaaccaggtggcttgctcttagaacttttgaatgttaacctcagcctgtccagagttgttaatatatgtgcagtcggtcttattgataacagtgcagactctacctttttcagtcagtaaacaatccaagactagtctgttgtcagggctacaattgccaaagagtccagagattcctgaatttttcttaatgtctgactagtgttggtggccagagattctagggcctgagttatgtttcttagcattgacttgtggtatgcaaagcccctgccaaggggccaccacccctattgctgccccaattcctgtaaaaattaatcctattgctcttttacttcttgtttttctagattttatggggttatgaatggataccccctgaagggataatggtggccaaaatacattcactggtgtttcaagtttttgataagcaaaatggaaagctattcctagaagaataaatggttccctacagggttgggagtgggtatggggtaggatttcttcccctaaaggtgagcccagatgggtcacaaattgaatccttgcaagttatgccgtccattttttattgccaaactgggtctatagagataccttttccaggttccaatgggggtgattgagtagccctcgttttccaccagagggtggtacctccatcttcccaaattaagcagtcgtttctcccttgcatgtattggtcctggaggaggcaccatgtatagtctccttgtttaccagtgggatcccgtttgccctcccatggccttgggaatttggctactagggttgggtcagagcatcgtggggaatttctgtctctgtgtcattgtcacaacaatttgtgcaaaagatagtatcattagtacactggagctgtagatacccaacatcctaggtccaggtaatagtagggggtaggagggtggttggagaggagtcaggtcaatctgttaagtgtgggagagagctgttttataagtaggggcctaggtaccaaaggaacactatggccaattaggaggtttggggagatggctgtgaggtttgcagggtgcaccagaaggtgatgctctctatcctgagggtgctgatgacagattctgcaatcatgcaggctatttcctgatgctataattctagaaatgtttactatggagttttgttcccattccacagcgagttagattgattaggagcagggagcaagaagaacagggacaactgagtatcacactgggctttagggtggtccctatactcaataaggacaagtaaggtgtttctcaggaggaggtggttgctacttatctgtcttgtgaaatagcaactttaagtcttccagaggtttgcaggtgtaggtcatggtgtcctcctcttgtgcctgtagggattcaccaaaaacaggtttgtttaatccgggacaggtgtacctagctagtgattccccgaagtttaacagcagtgggagtgcttaacaatacctaatggggagtgggtgcccttccatattggttatattataattgatcttcaaggaatccttctttccaagttttttttttttgagatgaagtcttgctctgttgcctaggctggagtgcagtggtgctatcttggctcactgcaacctccgcctcccgggttcaagtgattcccctgcctcagccttctgagtagctgggactacaggcatgtgccactatgcccagctaaattttttgtattttactagacacagggtttcaccatgttggccaggatggtcttgattccctgacctcgtgatccacccacctcggcctcccaaagtgctgggattatgggtatgagccactggcccggccctttccaagttttttttttttttttttttttttgagatggagtctcgctctgtcgcccaggctggagtgcagtggcacgatctcggctcactgcaacctccacctcccgggttcacaccattctcctgcctcagcctcctgagtagctgggactacaggtgcctgccaccatgcccggctaattttttgtatttttagtagagacgaggtttcaccatgttagccagtaaggtctccatctcctgatctcgtaatccactcgccttggcctcccaaagtgctgggattacaggcgtgagccaccacccctgccccaagtttttaataggactaggtgtcctggttaaacagggaacaatcttttcctttgtgggaaagggcaatactttattttcatattcttagagtgccttttgaacctggtctcttaagttccaaaggggagcggggggaaggtatagtgaggcttgtccaaccccttgtttcttgtcatggcctgaattagtttttcaagtttctttttttttttgagacggagtcttgctctgtcactcaggctgtagtgcagtggcacgatctcagctcactgcaacagccgccttccaggttcaagtgattctcctgcctcaggctcccaggtagttgagattacaggcgttcgccaccacgcccagctactttttgtatttttagtagagatggggtttcaccatgttggacaggttagtctccaactcctaacctcaggtgatctgtctgccttggcttcccaaagtgctgggattacaggtgtgagccactgcatccagctgccagaggcaatattgctggccaagcttttattttgttccataccaatgctgaggtggtgtgctacctgccccaggtccctcatgtcccttggtgggacgctgatggccaagggacttagattcaagtgacttatagccaattaaacattgtaggccagatggaagtggaggtaggcaggcactcattattatctcttaaaaccccttttaagcaatataagagccaaaaccagaagccaaaaaataaggttataaaactgacttatctataaattctgtgcattgagctattgtaatcttggcttgcagcaattaggtttacaaaacacaaacattttgttcagctatttaggtatctgtgtgcctgtccttgatttggaaggtctgaattaattatatccctcaaaacccagcccctataatctctcatgcccacctcttcagtagtccttgggcctggaggaattgaatagttttaaattctgtagataaaacaacacataaagaattagcaatgtttcaaacaaaaaagtcataagccctgccctagttttgagaatgacaggaaaggaatcttacaggtacctaaacatttaaattatttagtatcaaggcatagaataagttatattaattcatatagaggcaaaattattaaatgaatacaagcttgtccctgtgtctcattaaagcagtttactttttttttgagactgagtttcactcttgttgcccaggccggagtgccatggcatgatcttggctcaccgcaacctccgcctcccgggttcaagcgattcccctgcctcagcctcccgagtagctgggattacaggcatgtactaccacgcccagctaatttttgtgtatttttgatagggacggggtttctccatgttggtcaggctgatcttgaactcccgacctcaggtgatccacccacctcagcctcccagagtgctgggattacaggcgtgatcaactgcgcccgtcctaaagcagtttactttgccccttttgcccaggtctaaagacaaggctttggttaacttgagtttggtgttagatcctggcaagagttggtgccttctctagatgagctgtctgtacccaggagtcaaagccctgtaactcaaaagcacattgattagttaatagcacccgataaggaactttttaaagggctggcagtggtaatgctggagtccacaacctgtcaggaggctgtaaaaatatatcacaaccttgcagtgattagtttttatagctttgataaagcccagcaacaagccagacaatcaagctaggattcgattctgggggcatttgtaaaagatgttaaaaagcccaaaatactgtattgacacagaaccacaggttactgtaagtaatagttacttatttacccaaagtggtaatctctctgcagtgtaattgtctctccttatgggaagcccacttaactaatcttgaagttaaatttgatgaagagaaaaataatacttgaatttaatcggacaaagtatgttcaaggttttgaatatagcaggtgaacatgaaaagttttctggttactctgaaaatttagacatgtcaagaaaaaccaagagtatagaatcaagttatactggaggaaaacattgcttttatagacctctaagctaaaatatttcagcatctgactgtaaaaacagaactggaagagaaaaagttacagcaactgatgaaaaggttgaaggagagactaatgtctcaggctttctcaaggggagaaaaagctgaaagcagtgagatagaacaattgaacttatgagatatgaatctgagaaattttcaaaagaaacaagttatagaattgaaaagcaaattttcttgtaatttcattaagagcaaatcaataccttgaaacccttactttaacataggagaccattctttagaaagattccacttttaattatagctaacttaatcacataaacaattctttttataaattctcctttataaatcttatgacctgcacagaccatgtatgatatggttgaatgaactttctgacttgtccaatactacctttttttttttttttttgagacagagtctcattctgttgcccagactggtgtgcagtggtgtaatcttggctcactgcaacctccgcctcccgggttcaagcaattctcctgcctcagcctcaaaagtagctggaattaacaggcgtgtgccaccacacccagctaatttttgtattttttagtagagacaaggtttcaccatcttggccaggctggtctcaaactcctaacctcaagtgatccacccaccttggcctcccaaagtgctgggattacaggcataagccactgtgcctggcctatactacttttcctaaataactagtcattctactactctagaacaataccatataagatccttttttttttcccactgagatctgcaggattctttcttatgtagaattattctcttttatttataacctttcttaccaaaaatacctctgaacatccataactttctttacctatctctcccctacttactggttcctttctacctggttatataaataaccttttcaagtccataatttgaatcaacctttagataacttttgaattagacacaattattctttttctcaataaaaacacatcttctttggtaagttttatataaacctaagaaggaagaaatcctgaactatcagatattagcattttatagatgagaaccattccacagtttttaaaattttttattttattgtaaaatgtttccctatataatattcctttcttaattggaaatgacccaggcatccaataagcatccaaaacgattttaagattttaaattatacaaaaagttcacttataagcatttatctcattatatttacctaatttattattattatttataattttttttctttttttttttttgagacagagtctcactctgtcacccaggttggagtgcaatggcataatcttagcttactgtaacctctgcctcccggattcaagagcttcttgggcctcagcctcccaagtagctgggatgcatgcaccaccacgcctggctaatttttgtatttttagtagccatggggttttgccatgttggccaggctggtctcaaactcctgacctcaagtgatccacctgccttggccacccaaagtgctgggattacaggtgagagcccctgtgcctagctggaactatattagacaaaattggtcattattcaaagttatttcctggttaaccatttttaaactctgaacattaggtgaacccctaagtaagaatcttaaacacatgggcattttgccagtaactgagaagattcagctattttcattgagccaacaatcttaaattcgtcttatttatacaattctgaagacatttctatttccatcaattatttaatttaattaattaattttttgagacaaggtttctgttgcccaggctggagtgcagtggcatgatcacagctcactgcagcttccgcctcttggggtcaagtgatcttccacctcagcctcctgagtagctgggactataagtgtgtgctgtcacacctggctaattttttttgttttgttttagagatggagtctcactatgttgcccaggctggtcctgaactcctgggctcaagcagtcctcccaccttagcctcccaaaaggttgggaggtgtgagcgacagcacccagtctttattaataatttgaaaacaagttttatttaccaaaggattcatgtgaacttgaaaagcctttggactttattaaagatagctggatttaaatatttctgacaattttgaaacctgttcacatggctaaactttttttttctaataggtaatccaaggaaactgtagactagaatttgggtaaggtagttttcataacagttttaattttaaaaccctcttttatccttttttcccccttcagcttcagaggaggaggagatgatttaaaagggcaggaaagaaaaagagggaaaggagggagagtagggggatgaggggtacctttccctttgtttctctggtgggggagagagagagagagagatacagcaagccagaacactcattgatggatgaagggtcaccttaccatgacaacttcaatatcagatatcttggacccaagaccttgggactgtcccagggacccacaatcctagagagacatgaaccagtagaagtataataaaagaagactgaaaaggcagaaagggaaaggaagctaggaaaaacaggctcccgtagcagcaaatgtgaattggggaagagaggggttgttgttcagggcgtgtccttggagtccctgagacagtggagaactcacccatcagtggagacaccaaaaaaagtgttcaggcggctgcttttctgccattgcagggagtcgtcattaggtcaggggttcagggcctccagaaaaatgggcttgaacaaggcagctcatttgggaccctcattttgagcagaaagaaagacaggaagagacctgttgcagaaaagaaaatttatgattttaggagggactagaagaagttgctgaagtggatggaatgacagagtaaggaaaaaaatgaaacggcaccaaatgctgaaaaacctggagtatctagacattggccagtgagggtccccataccaaatgctgaaaacctgggggtggccaacagtgaggcccaaaggcatgagacctaacacagttggggccatagaataatgtgactctgacatcccagagtcagcacaaaggaatacctctcaaaataacaaaagcctgccttacatggaatagaaacaactgcccaaattgccaaaacagggactacaaacatgacaactggataaacataagtgtgcatttaggcactaagagcagaaaagtaaaatgactggtcattagaagctaaagagaaaaggtctgagagagaaggtgacaaagtaaattacaaaggacgtggatgtccaggtgtgcttctgtctggggcacccagatgatgggggacaacgaactgactaacaacccagagacactattccccatttcctgattgatttgaaaaggtaaagggagaggagagtgaaagagaaagtaaatcagttaaagaacaccacatcggccaggcgtggtggctcacgcctataatcccagcagtctgggaggccgaggcggggggatcacgaggtcaggagttcaagaccaacctggccaatgtggtgaaaccctgtctctactaaaaatacaaaaattagctgggtgtggtggcaggcacctgtcatcccagctactcgggaggctgaaagcaggagaatcgcttgaacccgggaggcgaggttgcagtgagccgagattgtgccactgcactccaccctgggtgacagagcaagatgtcgtctcaaaaaaaaaaaaaaaaaacgaaaacaaaacacacattgagggggaacaaaggggacactcatcttttcgtggaggccaaatggtgccagtcagtctttgggttcaagcaattctcatgcctcagcctcccaagtacctgggactacaggcgtgcaccaccatggctggctaattttttgtatttttagtagagccggggttttgctctgttgcccaggctagtatcgaactcctgagctcaggcaatccacctgccttggcctcccaaagtgctaggattacaggcgtgagccacggtgctcaacccaatcagtcttaatttagggtctggctaaaggtctccctcagttccttttggcttattattggtctcttcatggtcaccaaggaatgacgcaggtgaaccccaaattggggctcagcccaggagcattcttggcttcgcactggaaggaatcatgaatgggccaacagtgaattgaaagtaagtttattagagcaacagaggaagggaaatggctgctctgtaagagaagcagccgcagcagcagacctgcggattgctggctagctgtatgtatacaaagacaacatggaaaaaaaatgaaacggtgccaaatgccaaaatacccagagtatccaggcatcagcccatgagggtccccataccaaatgacgaaaatcccagagcacctagggggtggccaacagtgaccctcaaaagcatgagacctgtatagccatatatatatgggtatactttgattatatgctaaaataaggggcagatttttttttttttttaattgatcattcttgggtgtttctcgcagagggggatttggcagggtcataggacaatagtggagggaaggtcagcagataaacaagtgaacaaaggtctctggttttcctaggcagaggaccctgcggccttccgcagtgtttgtgtccctgggtccttgagattagggagtggtgatgacttaacgagcatgctgccttcaagcatctgtttaacaaagcacatcttgcaccgcccttaatccatttaaccctgagtggacacagcacatgtttcagagagcacagggttgggggtaaggtcacagatcaacaggataagaatttttcttagtacagaacaaaatgaaaagtctcccatgtctacctatttctacacagacacggcaaccatccaatttctcaatcttttccccacctttcccccctttgtattacacaaaaccgccattgtcatcatggcccgttctcaatgagctgttgggtacacctcccagacggggtggtggccgggcagaggggctcctcacttcccagtaggggcggctgggcagaggcgcccctcacctcccggacggggcggctggctgggcagaggggctcctcacttcccagtaggggcagctgggcagaggcgaaggggcggatttttaatggattttctggaaaaggggcgaggacttcccggaactgagagtccctccccttttaaaccatataaggtaacatctgggggttgccatggcatttgtaaactgtcatggtgctggtaggaggttcttttagcatgcagataaaaggagggcaacaggaggtggctttcatcaccatcttgcttttagctggttttggccagtttctttgatcagctcctgttttgttcagcggggtctttcgaacagtgcttggaaaacaagtcctgctgatctcctacctcaaatggaatgtgaggtgacaatagggccagcaagcaaaaatagaaatctgagattgaagtttagtaagaggcaaggactagaaatgttcagtgttagtcatggttcttctccatggaaacagacatggagggggaagagcagtggattgaagacaaccttgccttgaggaagaagataacagagaaggaacaactggagaagtaatagtaaaagtgaaaagaggaaggagagctttaagaacaaggtactttaaaatgtaaatttaaaatttagtagcaaaggagggataaggataatacctgagaaaaaggttacatttgaagattgatgatcttggagagtagattcaggagtttgttggggaaaggacattatatgaagcagttaaagaggaaggaatggggctgggaacagtggctcacacctgtaatcccaacactttggaaggccaaggtgtgaggatcttgtggccaggagttcaagaacagcctgggcaagatagctaggttccatctctacagaaaattttaaaaattagccaagtgtggtagtgcatccctgtagtcctagctactcaggagtagctagggggatagcttgagcccaggagttcaaggttgcagtgagctctgatcgcaccactgcattgcaacctgggtgacagagcaagaccttgtctgtaaaaaaaagaaaaaggaggaggaatgaaaccccagagatttttctttctttcctctcccccatccccctcctcccctcctcccttcctcccctcctcctctcctcccctctcctccccactctcctcttccctcttatccccttccctcacctcccctccccttccttccctttttttttttttttttttttttttttggagacagagtctcgctttgttgaccaggctggagtgcagtggtgtgatctcggctcactgcaagctccacctcccgggttcacgccattcttctgcctcagcctcccgagtagctgggactacaggcacctgccatcatgcctggctaattttttgtatttttagtagagatggggtttccccgtagccaggatggtcttgatctcctgaccttgtgatctgcccgcctcggcctcccaaaatgctgggatcacaggtgtgagccaccatgcctggccttccttcctttttttgcagtgggagaatgggtgagaaatagctagagaaggcagcgagattattgcatattttttcaagataagttgtcagaaggaactggaggaaattataagattaaaatgctagagaaggaatggataaataactatgggttcatagtcactcagttattgataagtgtaattaagagattttaaaaatcagttcacagatatccggatttaaataaacatttattgtttagtattatctgtgatatcactccccttcattaatctggagaactgaaaattgattatactactttgcactttaattagttgtatatacaagtaatagcaataaaagtacactatgagtgtctctccagaatttttcttcaagtaactttttttttttttttttttgccaatcagataatgtaacacaaaacagagaggaagaaagaaagattgacaattcacatatatctactttggaaaatattgaaaactttaaaggagaaaataaaaatcacccgtagccctgctgtttagtatgtgtttttgttgttttactttcttttaagtaacattttagttttctgattatgaaagcagcagcatcatatacactgtagaaaaaatgaaaatacatagaaagatagttggattattttcaagtattgacattttgttacaattgatacctttttgttgttgttattgtttgtttgtttgtttgtttttgagacagagtctcgctctgtcacccaggctggagtgcagtggcatgatcttggctcaccacaacctccacttcctaggttcaagcaattctcctgcctcagcctcccgagtagctgggattacaggcgcctgccaccacacctggctaatttttgtattttcagtagaggtggggtttccccatgttggtcaggctggtcttgaactcctgaccttgtgatccacctgcctcggcctcccaaagtgctgggattacggtgtgagccactgcgctaggcgcaccttgccgggcaatacattgttaaatcatgtttcttttttctttttttttctttctttttttttttttttttttttttgagacggagtcttgctttgttgcccaggttggagtggagtgtagtggcgtgatcttagctcactgcaacctccacctcccgggctcaggtgattctcttgcctcagcctcccgagtagctgggattacaggcatgtgccactgcgcctggctaagttttgtatttttagtagagatagggtttcgccatgttggccaggctggtcttgaactcctgatctcaagtgatccacccacctcggccttccaaagtgttgggattacaggctggagtgcagtggtgtgatttcggctcactgcaagctccgcctcctgggtttgcattgtccagcctaaatcatgtttcttgactgcaggtattagtgtttaaaccttttctttatttattttttttaaagagatgaggtctcaccctgtcatccaggctatagtccagtggtacgatcatagctcactgcagcttctaactcctgggctgaactgatcctaccaagtaactggcactataggcaggagccacatcatccagctaaaaaaagctgcgactacagacctgcaccaccacacccagctttttttttttttgactttttgcagacacaaggtctctataagttgcccagcatagaaatgttttttgtttgtttgtttgtttaacaggtgaggtctcataattcactgcaacctacaattcctggccttaaatgatcctgctgcttcagccttctaaagtgctgggcttacaggtatgagccactgggctcaactagaaataactttttatttatttatttatttatttatttatttatttatttatttatttttaacgagacagagtcttactctgtagcccacgctagagtgcagtagcacaataatggctcactacaacctctaactcttggcttcaagtaatctttctgccttggcctcccaaaacgctggaattacaggcatgaagccacacataacttttttttagacagggtcccaccgtgttacctaggctggagtacagcagtgcaattacggctcactgctgccttgacctcctaggctcaagtgattctcccaccttagcctcccaagtagctgggactacaggtgtgcaccaccatgcctggctaatttttgtattttttgtcgagatagcgtttcaccacattaaccaggctggtatcaaactcctgagctcaagtgacctgtccacctcagcctcccaaagtgctgggattacagccatgagccaccatgcccagcccacaaattactttttaaacaagcataccagaacttttaaatctaagcaagtattgcccttcaaaacacagagattcactttggtaggcagagcctcttccactgacatttttactacttaaaaaatatttggggtcaggcatggtggttcacacctatccctgtacattgggaggctgaggtgagaggattgcttaaggccaggagttcaagaccagacttggcaacatagtgagaccccatctctacaaaaataaaataaaattagctgggcatggtggcaggaacctgtagtctcagctacttgggatgctgaggtggaaggatcacttgagcccaggaggttgaggccgcagtgagctgagatcgtaccactgcacttcagcctaggggacagagcgagaccctgtctcagcaacaacaaaaaaattggaactacttggccaagtgcggtggctcgtgcctgtaatcccagcactttgggaggcagaggtgggcggatcacctgaggtcaggagttcgagaccagcctgaccaacatggagaaaccccatctctactaaaaatacaaaattagctgggcgtggtggtgcatgcctataatcccagccactcgggaggctgagccaggagaatctcttgaacccgggaggcggaggttgcggtgagctgagatcgtgccattgcactccagcttaggcaacaagaatggaactccgtctcaagaaaaaaaaaaaattggaactgctttttaaaactgtccctgcagggctgggtgcgtggctcatgcctgtaattccagcactttgggaggcctagagggacagattacctgaggtcaggagttagagaccagcctggccaacatggtaaaaccccatctctactaaaaataaaaaattagctgggcgtggtgacacacgcctgtaatcccagctactcggaaggctgaggcaggagaattgcttgagcctaggatacggaggttgcagtgagctgagatcatgccaccgtactccagcctggcccacagagcgagactctgtctggaaaaaaaaaaaacaaaaaaactgtccctgcaagcacattatcagctgcaccacaaaatcatttttcatactctagaggaaatgttccttttttctacaacctttttttcccctctgactccacaatgcttttcaatttatttccccttcctagagccctttaggaccccaccttcctttatagatatgctggatgctaaaagacctcagaaagagaagctgagcagaataagagaaatagagaaagcaaaccttattcagagcatatctgtaacttatgtactgccagcctgagaactgtatgttgataacatcaaaattattattttttaatttatattgtttattttttggagacagtgcctcgctctgtcgcccaggctggaatgcagtggtgcaaccttggctcactgcaaccttggctcactgcaacctctgcctccccggttcaggtgattctcgtgcctgttgaatagctgggattacaggcacctgccaccacggctggctaattttttgtattttagtagagacgaggttttaccatgttacccagcatggtctcaaactcctgagctcaggcagtccgcccaccttggcctcccaaagtgctaggactacaggtgtgaaccaccatgcctggctgatcataacatcaaaattagctgagaacagtacaaatcaactaattataagctaaaatcatgctactcacttttaggaggcaaagaaaggagaagcataagtggaaattagggtatgtaagtcaaattcagaagaacaagtaaaattctattagaataaacaccattaaagcagaagatttagctggatggtgtgatggaagtaagctataacaatgctactgcactccaggctaggcgacagagtgagacccaagtataaagactggccatgtgttttgaaagaaaatgttcaactaagtaatacacaaactagggaaaaaattcagaaatataaaaagtacacagtgaaaatttaggcatcctttcactttgtactcttgctccccaagtcctcttcccaggtaactgttaaacaattttttgtgtatagtccagggattttctgtatatatgcaagctatttccttgatagcctgatttctgatgtttaccatttttttttttttttttttttgagacagagtctctctctgtcgcccaggctggagttcagtggcgcgatctcggcacactgcaacctccgcctcctgggttcaagcagttctcctacctcagcatcctaagtagctgagattacaggtgcccgccaccatgcctggctaattttttgtatttttagtagagacggggttttgccgtgttggccaagctggtctcaaactcctgacctcaagtgatccacccatctcagcctcccaaagtgctgagattacaggcgtgagccactgtgcccagcattcttttttggtttgtttgtttgttttgtttgagatggagtttcgctctgttgccctggctggagtgaagtggcactactatcttggctcactgcaacctctgcctgccaggttcaagcgattctcctgcctcagcctcccaagtaactgggattacaggtgcctgccaccatgcctggcttatttttgtattctttttttacagccgaggtttcatcatgttggccaggctggtctccaactcctgacctcaagtgatctgcctgcctcagccttccatagtgctgagattacagatgtgagccactgcgcccagcctacttttaatactacatgaatatttctttgcgtgtgtgtgtgtgtgtgtgtgacagtgtcttgctctgacacccaggctggagtgcaatggcatgatcacagctcactgcagccttgaactccagggtccaagtgattctcccaccacaccctcctaagtagctgggaccacaggtgtgtaccaacacacccagctaattttagagctctatatttttgtagagacaaggtatctccaaatgttgctcaggctggtcccgaactcctggatcctggctaaagcgatcttcctgccctggcctcccaaagtaatgggattacaggtgtgagccacctggcctagcctaattttttatttttatttttagtagagacaaagcctcgatatgttgctcagactggtctcaaactcctgggttcaagtgatcctcctgcctcagcctcccaaagtgctgggatgatagtcatgagccacctcatgactataagcacctggcttttttttttgtgtgtgtgtgtgtgtgacggggtcttgctgcgttgtccagtctggagtgcagtggtggaatcgtatctccctgtaacctcaaaatcctggcctcaagccatcctcccagctcagcccccccaagtaactaggactacaagcatgcaccatcaccccttttttctctgtctttttaatgctagcctcacctactcccctcacaaagggagtgtttatgaagtgttgaggtgagaaagttgtctaatgaactgtagaaccatatatttacaattttatggtgacagttactcttctgctctgccaaattgatttacaaagtcagggcattttatgattatatttatagttgatgaaatatggtgttaatggtcatctatataaaatgtcatcaggaatttcctttacaagtctgatttttcataggaaaaaatgcaaaactgaaagcatattagaaataaaaagacctcagcaattacctagtttaactccctgagtttacagatgagtaaattggatctgagctttgatttaagagaggaaaattcctatatagtatatgcttaattcatgaagttgtctacctaaaaacactataataagatgctaaattctacaacagagtatgactgagaatggtcaaagtgtggagcaatatttgtgattcttccagggaaacctcaaatgaattctgaaggggagataccttccctgccatcaggcagccaatctgcaaaaccagtaagccagcccaggaaatcaacccagccagatgtttgtgcctctcctcaagaaaagccactcaggactctgtttcaccaacctgaggaagagatagaagatggtggactcttcattccaatgggtaggctttctttttctttttaattaaatgaaacctctttattgaagtataatatgtagaaaactgcacatgtcctaagatatcctgaattcactatatttttacaaatttaatacacccttgtaagcaggacccagatcaagatagagaatgttatcaatacccagaagtccatcttgtcttccctttcaattaccctctacccataggttaaccactatcctgatgtctagcatcatatattggttcaatttttttttttttttttttgagacggagttttgttcttgtcgcccaggctgaagtacaggggcgtgatctcggctcacggcaaccgctgcctcctgggttcaagtgattcttctgcctcagcctccggagtagctgggattacaggtgcctgccaccacacccggcttaatttttgtatttttagtagagacagggttttgctatgttggccaggctggtctcgaactcctgacttcagatgatccacccaccttggcttcacaaagtgctgggattacaggtgtgagccactgcgcctagccagttgttctgtctttttgtcttttatttgaatggaatcgtgtgtacattttataactgcctttttttttttaaagacagggtctcactctgtcactcagactggagtgtagtggtgccatcacggcttactgtggccttgacctcctgggttaaagtgatctttttgtctcagccctaagtagctgggactataagcgcgtgccgtcacagccagctaattttttttctttttttttgagacacagtcttgctttgttgcccaggctgctggaatgcaatggcttgatctcaggtcactgcaacctccgcctcccaggttcaagcgattctcccgcctcagcatccctagtagctgggattacaggcacctgccatcatgcccagctaatttttgtattttttgtagagacggggtttcaccgtgttggccaggctggtcttgaactcctgacctcaggtgatctgcctgccttggctttccaaagtgctgggattacaggcatgagccaccgcacccggcccagccagctaattaaaaaattttttttgtagagacggagccccactatattgcccaggctggtctcaaactgctgtgctcaattgatcctcttgcctcagcctcccaaagtgttgggatgacaggtgtgagccaccgtgcctggcattgtgactgcgtttattctctcaattttttttttttttgttttgagacagagtcttgctctgtcacccagactggagtgcagtagcgcaatctcggctcactgcagtgtctgccttccgggttccagcgattctcctgcctcagcctcctgggtagctgggattactggcacggccaccatgcagggctagtttttttatttttagtagagacgggctttcaccatgttggccaggctggtctcgatctcctgacctcaggtgatctgcccgcctcggcctcccaaggtgctaggattacaggcgtgagccaccgtgcccggcctcaacattgttttatgaaattcatccatattcttggatgtacttgtagattgttcatttttattgctgtatatcattctgttgtttgaatagtttatgtatgttttcttttctttaattttttttttagagataggtactgctctgtcacccaggctggaagttcagtgccatgatcatagctcactgcaatttgaactcctaggttcaagtgatcttcccacttcagcctccccagcaactcggactctaggtgcacgccacaatgcctggctaattttcatttttattttattattattatttttttagagacggttttcactatgttgcccaggctggttttgtatttctgggctcgagcagtccctccttgatctctcaaagtgctgggattacaggcatgagcctcctcacctggtttgctttacgttttctttatccattcaactctttgttttttctttttgcttccttgtgcccattgttacccattcaattcttcttcttcttttttttttttttttttgcgacagagtctttgttttgaaccagagtctcactctgtcgcccaggctggagtgcaatggtgtgatcttggctcactgcaacctccgcctcccaggttcaggtgattctcctgcctcagcctcctgagtagctgggattacaggtgcgctccaccactcctctgctaatttttgtatttttagtagagatggggtttcatcatgttggtctggctggtctcgaagtcctgacctcatgatccgcctgcctcagcctcccaaagtgctgggattacaggcatgagccaccgtgcctagccttttttttttttttttttttttttttttgatgtggagttttgctctcgtcacccaggctggagtgcaatggtgcaatctcggctcactgcaaccgcttcctcctgggttcaagcaattctcctgcctcagcttcccaagtagctgggactacaggcacgtgccaccatggccggctaatttttgtattatttttttttttttagtagagacagggtttcaccatgttggtcaggctggtcttgaactcctgacctcaaatgatctgcccgccttggcttcccaaagtgctgggtcacaggtgcaaaccactgcacctggccccattcaattcttgatgagcatttggatacttttcagttgtgggctactgtgagtggtgctgctgtgaacattctatagattttttgctgaacatgtgtacttctttttcgttgggtggaaatgctagcttataagtttgggcatccttaaaattcttttgaaatactaaattttttattgtgaaacataacacagacacatgactaaagacttctttatttgatttagcaaatggtttttttgtgtgtgtgtgtgaatcttgctccgtcgcccaggcttgagtgcagtggtgtgatctcggctcactgcaacctccgtctcctgggttcaagtgattctcctgtctcagcctcatgagtaattgggattacagggacacaccaccatgcccggctaatttgtattttcagtagagacgaggtttcaccatgttggccaggctggtcttgaactcgtgacctcaggtgatccacctgccttgggctcccaaggggctggaattataggtgtgagccactgcgtccagcctcactttggcaaatgcttttaaaatggacacgtaatttttcttattgcatattctagaccttcattgctatgtaggttgtaagtagtagtggtagtcgacatctgtgtcttatttctggacaaaacaggaaaatgttcagtattccttcattatatatgaggatagttataggcttttcatagaaatattttttaggttaaggaaataattttcctaagttttctgagttttttcatatattgaatttcatcaaatgctttttcctatctctattaagatcatgtttttttctctttcattttgttaatgtggtaagtttcattaggtttattgagatataaaataaaatgtatctgatgagttttgaaaaatatgtacagttgggccaggtacggtggctcacacctgtaatcccagagctttgggaggctgaggcgagtggatcacctgaggtcaggagttcaagaccatcgtgagcaacatggagaaaccccatctctactaaaaatacaaaattagccgggcgtggtggcacatgcctgtaatcccagcactttgggaggctgaggcaggtggatcacctgaggtcgggagttcaataccagcctgaccaacatggagaaaccctatctctactaaaaatacaaaattagccgggcatggtggcacatgcctgtaatcccagctactcgggaggctgaggcaggagaatcacttgaacccaggaggcggaggttgcgctgagccgagattgcaccattgcactccagcctgggcaacaaagagcgaaaactccgtctcaaaaaaacaaaagaaagaaaaatatatacagttgtgttaactgctaccacaaccaacgtggaacatttctgtcaccccaaaagttgcctaattcccctttgctatccccctttctcaaacattggcaagcactgatttctatttccatagttttgcatcttctatgcaaatgttctatacttgttataccgtcatataatatgtgtccttttacatctggtttctttcacagcataatgcttttgagatttatccactttactgttggctttctgggctaagttcctggagcagctattttggaattctgatgatgttcttggtttatttgcagaagaacaagacaatgaagaaagtgagaaaaggagaaaaaagaaaaagggtaccaagaggaaacgagatggaaggggtcaagaagggaccttggcatatgacctgaaactggatgacatgcttgaccgtaccttggaggatggtgccaagcagcacaatctaacagcagtcaatgtccgaaacatccttcatgtgagtaagactggggcagttatgtaaatggaagggaactttttcatggaaagcatataaaaatgttcagcaaattcttgactcttgatacgtgaattaccgattttgtgggttacccgtgacagaacattttacatttttacatatttaagatagctttctccttgcactcagtacaagtttgaaatatgaacacatgttaaagaagaatttaattggaaagataaactgttcctgtttccttccactgattttcatatttactgtattgtttagtagattcaatgttgataatgttcatagtgggtttactcttgtgggtcgatatgtctaaaaagatgcctggttaatagtttattgcactttgtacatatgtaaatacttttcttgatatgtagcaacacagctatttgcagagcctttgctcttgttactctttctcttaagcatatagttacttacctcaggatctccttttatgtgagccattcctgttcctagtagcagctaatgagattggttcatttgctgctacattgtttgaaactgtgtggttctggccaaaacttacttctgccttctttgctttcagttgccttgctttaccccagtctgatgctattcgagtatatggttctcatttgtcctgtacataggtctgacagttacatggagagatgagtattgtctaggtgacaaacccttgttgcataaagtgaaatttcatctttctccaggaagtaatcacaaatgaacacgtggtagctatgatgaaagcagccatcagtgagacggaagatatgccaatgtttgtgagtagttgattatcactcttttaatgtcttggaacagagttatctctaaactggctaagggtaggaggtcacttaggagtttgtaaacagtttggcagctggggttaaagttagcatttcaaaacataagaattacttggtaatttttacttattttatttgttattttattattattattattttattattattatttttttttgagacggagtcttactctgtcacccaggctggagcgcagtggcgcgatcttggctcattgcaagctccgcctcccgggttcaggccattgtcctgcctcagcctcctgagtagctgggactacaggggcctgcaaccacgcccggctaattttttgtatttttaatagagacggggtttcaccacgttagccaggacggtctcgatctcctgaccttgtgatccgcccgcctcggcctcccaaagtgctgggattacaggcgtgagccaccgcgcccggccttgttattttattattattatttttttagagacagggtcttgctctgtcaccaaggctggactcaaactcctaagctggactcagcgatcctcccagttcagcctcttgagtagctgggactacaggaacatgcgactatgcccagctaatttaaaacaatttttttgtagggagggtgtctcactctgttgctcaggctggtctcaaactccttgcctcaagccatcctcccaccttggcccctaaagtgctaggattataggcatgagccacctcactgagctgtgatttttattgaggatttcctttctgtttttttctccttaggagcctaaaatgacacgctctaaactgaaggaagtagtggaaaaaggagtggtaagtattctgtttttttgttgttggtttttttttagcttggtgaataggatctaattcacccatagggaaaaatataggaaagattgtggtctgaatttgcctctttaaagaaatatttataaaagacagtagaattgtttctacatgatcataagctatgataatcatagtttattttagtagatatgaagcattgctttttggaattgctagatagataaccatttggaatagttgaaatcaataggtgagaccagtttttctatttatgttacaacacatgttgcaaagtgtttagtatttttcatagtgtgttccaggggccagttgcataaaaatcactttggtgtgggatccctcaggcatgcttattaaaaatgcatacttttggctgggtgtagtggctcatgcctgtaatcccagcactttgggaggccgaggcagatggatcacttgaagtcaggagttcgagaccagcctggccaacatagtgaaactctgtctctactaaaaatacaaaaattagctgggtgtggtggtgtgcgcctataatcccagctgcttgggaggctgaggcacaagaatcacttgaacccgggggcggaggttgcagtgagtggagattgcaccactgcactacagcctgggcaacggagtgaaactgtctcaaaaaaacaaaaacaaacaaaaaaatctccatacttttgagcccaccccagacctgagaatcaggacccatgggcagggccttggaatatgcattggcaaaaacacaacagttaattcttttgaatactaaagtgttgagaaccacttgaagacatctgaagtattctgtgcagcaagctctttggtgcttggagctgtgctatatccttcttaataagcacttgactagtttgtgcttacaaggcaggtaatagtcatgagggagttcattatatttctgatagtaaggaagatttgccttacagaccgaaaatatgtatcataggttttatctgtcctggttttattccttggagactgatagaagaaacaggtctaggctgggcttggtggctcatgcctgtaatcccagcactttgggaggtggaggtaggaagattgcttgaagccaggagttcaagaccagcctgggcaacgtaatgagaccgagaccttgtctagaaaaaaaagcaagaaaaggaattggtgtattcttccacattacttttcctacagttgaagaaaactagtatgttatttcataacattcttttcttggctatacatcccccaatttctccccccctttttattttgggagtcttgcttcatcgtccaggctggagtgcagtggcacaattctggctcactgcaacctctgcctcccaagctcaagtgattctcctgcctcagcctcctgagtagctgggattacaggtgcgtgccaccatgcccggctaatttttttgtattttttaaaatttttattagagatggggttgcaccatgtttggccagcctggtttcaaactcctgacctcaaatcatctgcccgccttggcctcccaaagtactgggattacaggcatgagccactgtgcctggcctttttgttttgagatggagtctcactctgtcacctaggctggagtgcagtggtgcgatctcagctcactgcaacctctggctcccaggttcaagcgattctcatgcctcagcctgctgagtagctgggattataggcatgcaccaccacacgcatctaatttttgtagttttagtagagatggggtttcaccatgttggccaggctggtttccaattgacccatgtgatcgcccgccttgtcctcccaatgtgctaggattacaggcgtgagccactgtgcccgtcccatatccttttaaaagtatgccaaaagaagactctactgaaccagatatggtttgactagtagttagattatctccacagtgttccagattacatatttctcctaatgtagcctaaggtcaaattgacctttgtttttggcaatcacatcactttttttggtctggttgactaactcttgttgcataaattgaaatttcatctttctctaggatgtgttcacaaatgaataggtggtagctatgatgaaagcagccatcagtgaggaagttctatgaagtctacttgacatatagaatataattaacatggctgggcacggtggctcatgcctgtaatcccagcactttgggaggccgaggcagctggatcacctgaggtcaggagtttgagaccagcctggccaacatggcgaaaccccgtctctactaaaaatacaacagttagctgggcgtgtggtgggcgcctgtaatcccagctacagagacgagaggatcgcttgaactcaggagggagaggttgcagtgagcggagaccatgccactgcactccagcctgggtgatagagcaagactctgtcttaaaaaaaaaaaagaatataattaacattaattctttatttgatttggggaaaaaaaatccaaggagatcaaattaggctctgaattatgtttattggccatgaatatagatgtggagaagttgggccatccaagacggtatagtttacgtaggagagcaagtattaaaatgtaggtctcttgcttcttaattctttctttttttttttttttttttcagtgacttgctctgttgctcaggctagagtacagtggcctaatcatagctcactgcagccttgaactccttcctgtgctcaagggatcttcctgccttagcctcgcagacagctaggcctataggcatgtgccaccatgtccagctaattggtttttttgaaacattcttttgtagaaatagggtcttaatgtgttgcccaggctgaactcaaactcctgggctcaagtgatccttctgccttgatctcccaacatggggggattacaggcatgagccgctatacttggccttcttaattcttactagactgactccaacacacttctgaatgctggcttgcctttctaatggatttggcagtaggtaggaaagggaaatgggcctgaatcacatcattccctttaccctatattggtcccacctacacagcactagataaatggtcagaacatagcagggctgatttgatttgagaagctaagactccttttagagacagaacctaatggccagttggcttttgttcataaggtgcttttggttgggttacaattaaatggtcaagaaattatacatcctcaatggcattttatcagcagtatataagaactttaaaaaagttctttaggctagatgtggtggctcacacctataatcccagtgctttgagaggctaaggtgggaggattgtttgagcccaggattttgagaccagcctgggaaacctaatgagactccatctctacaaaaaatttaaaaaattagtgaggcctggtgaggaggcatgcctgtagtcctagctaattagtaggctgaggcaggaggatcgcttgagctcaggaatttgaggctgcagtgagctctgattgtgctgctgctctagcctaggcaacagggcaagatcctgtctcaaaacaaaaacaaaaacaagaaaaactttccccctagctcttataaaaattttcaaacattcaaaaagttgaaagattgttacaatgaatctaaattccaagagtaatattttgccatatttgctttatatctctctgtgttgttttttcctgtactattggaaaaataagtgtggacaacatgaaactttgccctaaatgccctggtaaaagcttttttttttttttttttttttaagaaaaaaaaaagcccataggcagagcagggctaccccataggcagaatagtccataaaagcttttcatggctggctttttggagttgtacttatggtggattcatgtaactgattacaaaaatatattgctgttaaaagactactgtaaccaaaatatcttaggtttgtgtagtttaatagtttataaatagttgtcacatctgttgttccatgtaaaccgcagctgtgatatgaacaaggtagacattgttttcttcatttatagaaagaagtgaggcttaccaggtgtaaggcagaaatgctaatgacagtaatagattctttcctggtttcttctttctaactctgacaaataattgagagtataccctcagggataatcaacacctctagatcactgcagttacttgttaagtatatggctgttagtgatggtacagaggaagtaaacatgaaaaacaattatttcagttaagataacttaattatttatattctttgttggtaggtaattccaacatggaatatttcaccaattaagaaggccaatgaaattaaggtaaacttggaagaaataattgttattcttttccagaaagacttcatcggttttgaaacttaagtacttcctctttaacttttcttgatcaatctttgttttaattccagctttgtttttttccattctattactcttaggtttgtatctcatggaattcactttaacctctgcctcgtgttatttgctttagctgtacattatgctcttaggattttttttttttctgccctgcttcttccccttattttccaaatacgtatgatttgtgtttcccattacttcatttctttctaattgtactaatgtagcctcctcagtttgtggatatccaccttgaagaagatgattcctcagatgaagaataccagccggatgatgaagaagaagatgaaactgctgaagaggtcagtgaatgttagttggtaatatttgtcttaatagagcagggtatactttgcttccttagtaatgtcacttgtagagaggattgagacatggttcttttttcagctcatttctgtgctttaagctgtttttctgccctttatactcccttaattttagaatttgttgtattatgaaatacagcatagaaacgtgcatagaataaaaatgtatagctttggttattataatgcaaatcctcatgaaactcatagcaaagtcaagaaatatatcattactaggacaacccctgtataccctccccagtcacaatcacctccctccccctaaaaataaccactaccctgccttttagtaattatttctttgcttttctttatagttgtatcacctcaatatgtatctctacacactgtagttcaattgttactgttttgaactttatataaatggacccatgtttatatgttttgttcctagctttttaaaattcaacattaagcttttgagattcatttatactattggttttagctatacttcgttccctttcattgctgtgttaatatgttctttgacttgtttcttaatgtgttctttgaattgttttgtaaaaggattttagaccaaggccttacactttgtaatgcagattaggatagtgatctgatccctgtccccacctttaggattttttttttgagtctcctctgttgcccatggagtgcagtgtgcgatgttggctcactgccatctccatctcccgggttcaggcaagtctcctgcctcagcctcctgagtagctggaattaacaggcgtgcgctaccatgcctggctaatttttgtatttttagtagagatggggtttcgccatgttggccaggctggtctcggacttctgacctcaagtgatccacccgcctcggccttccaaagtgctgggattacaggcataagacactgactgcacctggcctttaagtttctatttaaattttattttctgttactgtaactagttgagtgatggattttatttatttatttatttatttttgagacagagtctcgctctgccacccaggctggagtgcagtggcgtgatctcggctcactgcaacctccatctcctggattcaagtgatactcctgcctcagcctcccgagtagctgggattacaggtgcacgccaccgcgcctggcttatttttgtatttttagcagagacgggtgttcaccatgttggccaggctgagtgattgatattttatgattccttctcttgagatacttcagactttgtggaatgaggtaggggcataaatattaaggcgaactggatttattttgtagagcttattggaaagtgatgttgaaagcactgcttcatctccacgtggggcaaagaaatccagattgaggcagtcttctgagatgactgaaacagatgaggagagtggcatattatcagaggtaaatcggcatcatacaaaagagatgttagacataactgtctaagtagattttttaactgtataagtagattatttatccatggtgattctgggctgtcaccctttttcaaagtttcttaagttagtaaacagttcagagaaggctagaactcagtgatagccaaagaacttttctgagttctcattaaggggccaaaaatgtgcaactagcagagtttcttttctcctacccttctcttctttcatatctgtgctttttaatattgtcctaaagccattgttattaatttcccacattttggtaaactaagtagcattctgttgacttctctagaaataggatgaaaactaattagatcaatacacttggtgtctttgtttttatgtaactctaactagagaagagaaaggacaatggtgtatggaaagtctgcctctttttccctctctttttttcctttttttgctttctctttctttcttacctccttccttttttgatgcagtcacctcttttaatcaggctgagaaagtcaccacaccagccatcaggcacatcagtgctgaggtagtgcccatggggcccccgccccctccaaagccgaaacagaccagagatagtactttcatggagaagttacatgcggtagatgaggagctggcttccagtccagtctgcatggattctttccaggtaaatattaaaactgtacttaactgagaaagtcaagtggagtaatgtagttgttgctcaggctgggaagggagaggaaaagataactacaattttatataagtaagagttagtctttgatactttgtatttggctagtgctattttctgctcaaagtgacaatggcagtttggggttttttttgtttgtttgtttgtttttgagacagggtatcaccctgtcacccaggcttgagtgcagtggtgtgatcttggcccactgcaacctccgcctcccagactcaagtgatcttcccacctcagcctcccgaataggtgggacaggtatatgccaccacacctggctaatattttagttttttgtagagatgaggtctccctatatttttgctcaggctggtattgaactcctgggctcaagtgatcctcccaccttagcctctcaaagtggtaggactactggtgtgaaccaccgtgcctggctgagaatggcagtttctaaggaagaaatgaactatgtagcagagagcattttaaaatgtagaacataggaaaaagcttcacccaaattcccccaaattaaccttttaccacaattgcttgatggttctcttcctctttctctgtatatacacatagtgttttctaaatcattttagagtgtgatgcaggcatgatgccattttacctctgcatgcttttgtgtatattttctaaaaatgagtttattatcttgtattaacacagtataatagtgttaatcaaaatcaggatacaggctgtgcgctgtggctcatgcctgtaatcctagcactttgagaggccaaggttggtggatcacttgaggtcaggagttcgagaccagcctggccaacatggtgaaacccccatctcgactgaaaatacaaaaatttgccaggtgtcgtggcgcatgcctgtaatcccagctacttgggaagctgaggcaggagaatcgcttgaacccgggaggcagaggttgcagtgagctgagattgcgccactgcactccagcctgggcaatggagagagactctgtcccaaaaaaaaaaaaaaatcaggatacagtaatattacataatatattaaagtgcttattctggttttatctgttgtcccaacaatgccctttatgttggaggaaaaaaatttttttttccctattcagcattcaaccctggattaaatatctatttaattatcttgttctttagtctcctttaatctggaacagtttctcagtctttgtcttttataaccttgacagttttgaggagtatgcaccatttattttgtagaatgttcttcaatttttatttttctaatatttcctcttagattcaggttttgcacttttgttacaaatactggaagagtgatgtgtgtttctcattgcatcatatcagaaggcacgtgatccctgtaatgttaactttcatcacttggttaaggtggtgtgtgcttggttttcccattgtaaagttattattttccatttttaattagtatatatcatgtggggatatacttcaaagccgaattcctttctttctgtttttttttcctagatggagtctcactctcttgcccaggctggagtgcagtggcgcgacctcagctcactgcacctctgcttcctgggttcaagtgattctcctgcgttagcctcctgagtagctgggattacaggtgcccaccaccacgcctggctaatttttgtattttttagtagaaatggagtttcactgtgttagccaggatgatcttgatctcctgacccgcctcagcctcccaaagtgctgagatgacatgcgtcagccaccgcgcccagccttctttttttttttttttttttttttttgagacagagtcttgcctgtctcccaggctggagtgcagtggtgccatcttgggtcactgcaacctccacttcggggttcaagcgattctcctgcctcagcctcctgagtagctgggattacaggtgactgacaccacacccagctaattttttgtatttttagtagagatggggtttcaccacattggccaggctggtctcgaactcctgacctcaagtgatctgcccaccttagcctcccagagtgctgggattacagacgtgagccaatgcacccagcccaatcaatcaaattatttttctcacactaatattagcatccattgattattctttcttttttttttttttttttttttttttgagacggagtcttgctctgtcctctaggctggagtgcagtggtgcgatctcggctcactgcaagctccgcctcccaggttcacatcattctactgcctcagcctcccgagtagctgggactacaggcgcccgcaccatgcgcggctaattttttgtatttttagtagagatgggggtttcaccgtgttagccaggatggtcttgatctcctgacctcatgatccacttgcctcggcctcccaaaatgctgggattacgggcgtgaaccaccacgcttggcctgattttctttcttgaaacagtctttactatggtcgttgtcaaatgatgactttgtaattctaacatttagtgagtaattttttattttttggatatggagtcacagtctgtcacgcaggctggagttcggtggtgtgatctcagctgactgcaacatctgatctgcctcccgggttcaagcagttctcgtgcctcagcctcctgagtagctgggaccagaggcacacaccactacgccagctaattttttgtattttttagtagagacagggttttattgttggccaggctggttttgaactggccttaggtgatccacccttgtcaacctcctaagtgctgggattataggcatgagccactgcgcctggccttagccagtaaattttttttttttttttttgagacggagtctcactctgtcgcccaggctggagtgtgatggcgtgatctcggctcactgcaagctctgcctcccaggttcatgtcattctactgcctcagcctcccgagtagctgggactacaggcgtgcacaccatgcccggctaattttttgtattttttggtagagacggggtttcactgtgttagccaggatggtctcgatctcctgacctcatgatccgcctgccttggcctcccaaagtgctaggattacaggcgtgagccaccatgcctggccttagccagtaaattttaatgttccaagtttcccctatcattcttgcaggtcaatgaaaaatgtctgtcctaaaattttaaagtatgatataataatttaaaaagaaatcctaaaattaaaaaatataattaaggctgggtgtggtggctcacacctgtaatcccagcactttgagaggcccaggcgggtggatcacccgaggtcaggtttgagaccagcctggtcaacatggtgaaaccccgtctccactaaaaatacaaaaattagctgggcattgtggcaagtgcctgtaatcccagctactcgggaggctgcggcacgaaaatcgctttaacccaggaagcggaggttgcagtgagccgagatggcgccagtgcactccagcctgggtgacagagcaagactacatttcaaaaatatatatatatatataattatatatatatataatttataattatatatgtatataatttataattatatatgtatataatttataattatatatgtatataatttataattatatatatgtatataatttataattatatataagtatataatttataattatatataagtatataatttataattatatataagtatataatttataattatatataagtatataatttataattatatataagtatataatttataagtatatataagtatataatttataagtatatataagtatataatttataagtatatataagtatataatttataagtatatataagtatataatttataagtatatataagtatataatttataagtatatataagtatataatttataagtatatataagtatataatttataagtatatataagtatataatttataagtatataatttataattatatataagtatataattaaaaatagaatattgaatggaatagctctgagtcatttaatcaccatgctttggagtatgtagtagtaggagcagtaatagttttttatgtaatcatttatttaccaaacacatactgaatggttgaagttgagaaacaacagtgtagaagacagaaaaaattgttcttcatggaacttagtctgttgaggagagatagactataaacatataaacaagtaaattcggatgtggttaagtgctatgaactaaattaaaatgaggaaatatgaaacttcctgtcagagaactttagataggctgatcaaaaaagacctccttggctgtaattccatcactttgggagtcctaggctagaagattgcttgaggctaggagtttgagaccagcctaggcaatatagtgagactccatctctccaaaaactcagaaaaattatataggtgtggtggcgcatgcctgtattcttagctgcttggtggctgaagcaggaggattgattaagcctgggagcttgagactacagtgagccatgactgcacccctatactccagcatgggtaatagtatgagaacttttttaaaaaaaattttaaaaaacagggtccggtttggtggcttatgtccataatcccaacactttaggaggccaaggagagtggatcacttgagcccaggaggtcaagacaagcctgggtaacctagtgagaccttgtccctaccaaaaaaaacacaaaacttagctgggcatcctgttacacacctgtagcctcagctacttgggaggctgagcctaggagatcgaggctgcagtgagctgtgatcatgctacagcactctagcctgggccacagagcaagactgtcaaaaaaacaaaaaacaaaaagaaaaaaggcctctttgaggagatggcatttaaactgagatccgaatgagaggaagccaggcatgtaaaagatctggggagaaaaagtgctccatatggaagaaacagcacattctaagtcgctaagatagaaacaaccttggcatggttaaggaacagaaactacatgaagggtgggatcgtgaaaaagaggtagaaatgaggtcagagagcaaggcaagagctagatcatgaaggtcttaggaaaccatgataaggggtgtagattttattttaaacattagaacagatgcccagtgtggtggctcatgcctgtaatcccagcactttgggaggccgaggcgggtggatcacctgaggtcaggagttctagaccagcctggccaacatggtaaaaccccatctctaacaaaaaatacaaaaaatgtcctgggtgtggtggcgcacacctgtaatcccagttacttaggaggctgaggcaggagaatcgcttgaatgtggggagtggaggttgcagtgagctgagatcatgcccctgcactccagtctaggaaagagtgagactccatctcaaaaaaaaaaaaaaataaataaataagaaaagatttttgtgatatttttggattaatgttaaaaattccttttggttaacgtgtgggaaatggactagagtaaagcaagagggtaaacagaaacccattagcaggttgatgcagtgtagtctagggagagcttcccaaattgatctacagattcaatgcagtccctatccaaatcccagctaccatttttgtggaaattaacagtctaatcctaaaattcatgtggaattgcacaggcccagaatagccaaaacagtctttaaaaagtacaaagatggaggtctcacactttctgattttcttttttttttttttttttttttgagacggagtctggctctgtcacccagactggagtgcagtagtgcgatctcggctcactgcaagctctgcctcccgggttcatgccattgtcctgcctcagcctcctgagtagctgggactacaggcgcctgccaccatgcccagctaattttttgtattttttatagagacggggtttcactgttagccaggaagttcttgatcttctgacctcgtgatccgcccaccttgtcctcccaaagtctgggattacaggtgtgagccactgcacccagcctcatttttttaaaataaatattttaaataagagtcttgctctgttgcccaggctggagtgcagtggtatgatctcagcttgctgcagcctcaacctcctcctgtgttcaagtgatcctcccacgttggctcttgcatagctggaactacaggcatatgccaccactcccatctaactttttattttttgtagagatgggggtcttgctgtgttgcccagctggtcttgaactcctagactcaagcgatcttgtcaccacagcctatcaaggtgctgggtttacagatgtacaaatgtgagcctctgtgcctggccctgttttttttttttttttgagatgtctctcttgcttaggttggagtacaatggtgcaatcatggctcactacagccttgatctcctagtctcaagagatccttctctttcagcctcctaagtagctgggactacaattggtgccaccacacgcaactaatttgtttgtttgtggcagagatgaggtctcactgtgttacccaggctggtctcaaactcctagcttcaagcagttcttcctgggcctcccacagtgttgggattgcaggtgtgagccaatgcattcagccagcggtattatacttaattgccccacagtggaaacaatctgaattccatcaacagataattggataaacaaaagtggtatatctatacaatgggatattattgggtgaaaaaaggaattcggggccaggcatggtgactggagtgcagtggtacgtgtctcactgtcaccttgaactcctaaacccaagcaattctcctgactcagcctcttgagtagctggtaccacaggcacataccaccatgcctttaatcccagcagttaggaaggccaaggcaggaggattacttgagcccagtccaggagtttgaaacttgcctgggcaacatagggagtccccccacccccatctctacaaaaaatgaaaaaaattagctgagtatggatccagtggctcacacgtgtaatcccaacactttgggaggctgagcaggtaggtcacctgaggtcaggaattcaagacaagcctggccaaccccatttctactaaaaatacaaaaatttgccaggtgtggtggcacacgcctgtagtcccaactatttgggaggctgaggcaggagaatcacccgaacccgggagatggaggttgcagtgatccgagatcgtaccactgcactccagaatgggtgacagagcaagactccatctaaaaaaaaaaaaaaaaattagccgagcatggtagagcatgccgatagtcccagctacttgggaggctgaggcaggagaattgcttgagcccaggagttcgaagctgcagtcagctctgattgtgccagtgctgtagcctgggtgagagattgagactctatctcttaaaaaaaaaaaaaaaaacaccaggcatggtggctcacagctgtaatccgaacactttgggaggctgaggtgggcagatacctgaggtcaggacttcgagaccagcgtgcccaacatggtgaagctccgtttctagtaaaaatacaaaaattagtcagatgtcgtggctggtgcctgtaatcccagctccctgggaggctgaggcaggagaatcacttgaacccaagaggcagaggttgcagtgagccgagatggcaccactgcattctagcctgggcaacaaagcaagactatgtctcaaaaaaaaaaaaaaagtattgatagatattacaacagggtgggatttaaatgcattatgctaactgaaagcggccagagacaggccacacattttatgattccatctaagtgaaatgtccagcagaaacaaatccatagagacagaaaatagattaatgcttaacaggggctgggaggagggggaaagggaagcgactactaatgggtatgggatttctttttgggttaatggaatgttctgaaattagataatggtgatggttgtataactctgtgaatatatgaaaatcctttcaattatacactttaaaagggtaaattttatggtatgtgaattgtatatcaataaagctgttataaattttcctaaaatgttggtttcaaactgatgtcatttattttatttcttttttatgtcgtgtttcttaaagtttctcaaacaataataaatccaaattgtttagaggaaggatcctgttacttaagctaagatgagaagaaaaggagtgatgatgaggtttggaaacatcactcactcagtgacttttctttctccattgtccagcccatggatgacagtctcattgcatttcgaacgcgttctaagatgcccctgaaagatgttcccctgggccaattagaggcagagctccaagctccagacatcactccagatatgtatgaccccaatacggcagatgatgaggactggaagatgtggctggggggacttatgaatgatgatgtggggaatgaaggtaagttttggtttgtgatttattatgtatactgtccattatctgttgtaaaatttttagtatttggaagggtatagaatggaatggtttgggttaattgatttaatttgtatttaactgataatttatcttaaatcagtagttaatttttctttttttttttttcctgagacagggtctcactctgtcacccaggctgagtgcagtgttgcagtcacggttcattgcagccttgacctcctgggctcaagcaatcctaccccttatcccactgagtagctgggactacaggcacatgccactgtgcccgactaattttttattttttgtagaaacgagatgtcactatgttgcccaggctgttcccaaactcctggcctcaaacaatcctcctaccttggcctcctgaatgctagaattataggcatgagccaccgtgcctgggccaattcttaacatttctttttctgggtaaggaatcttttgaatcctaagattgttgaatgctaagatttgaatcccttgaaacatacatgcacatgtagttttgttgttgtcttttgtttttgagacactgtcccaaaacagggtgttgcccagggtggatcacagtggggtgatcatagctcactgtagccttaaactcctgggctcaagagatcgtcctcaggtctcagcctcccaagtagctgagattataggcacgcaccaccttgcctggctaattttttaaaaatttctgtagagaaatgttgctcaggctggtcttaaactcctgcctcaagtgatcctcccaccttggcctcccagagagctaggattacaggcatgagccactgtgcctggcccactcaaaattttatgtatgatttcattagggttcagtgatttaccaaaagaacactgtgttagttaagggtcttcatgatgcaagtgaaagaatcctaactctatcttgctggggtgaaatgaaaccagactttgggaagtgtagtaaatcagcagtggaactgaggcactgttaggatccccctttcctctctattttacttccttttgtcactcagctccattctcacatttatttttctacaaggttagagctctgttcataaacactccgtgattactttttgctttgtctacacttcaggactctcccctgcaagctccagttataaaatccaggggaacaagtcagatcgacttggtttgatctcatgcccagtctcttggtactacatgggattgatagggagactgttcagcatggagtctggtgattgatagcacctcatagaacagtgtggttgaagtatgtggtgaccctaaagaagtaatggtattatcagaaatggggaagaaatattgatcagataaaagtttggatggaaacagactaagtaggctgggcgtggtggctcacacctattatcccagctctttgggaggccgaggcgggcggatcacaaggtcaagagattgagaccatcctggccaacagggtgaaaccctgtctctactaaaaataaaaaaatttgctgggcgtggtggtgcacgcctgtagtcccagctactcaggaggctgaggcaggagaatcacttgaacctggcaggcgaaggttgtagcgagccgagattgcgccactgcgctccagcctggcaacagagcgagactccatctcaaaaaaaaaaaaaaaagaaaaagaaatagactgagtaaatggctgggtaggtaatgctaggagtaagtcaggataagtgaatgaaagaaaataacaggtccttgaatgtaccttatgatactattaatagttatatagtatatcatttggcaaatgtttgagtactttctttatacaaggcattgtgctagaatctgtgagggataaaggagcataatcatttggtcatggaataaaagctttatgaatgacagggtgcctggcccattgttaggttcacaatacattgtacttttttgtgtgtgtgtgagacagggtctcactctgtcacccaggctggagtgcagtggtgagatcttagctcactgcagccttgacctccttggcgcaagcaattctcccacctcagccttctaaatagctgggaatacaggtttgtgccatcatgcccggccaatttttgtattttttgtagagttggggttttgccatgttgcccaggctggtctcgaactcctgcgctcaagcgatcctcctgcctctgctttccaaagtgctgagattacaggagtgagccatcgcgctcagccagtatattgtaaatgaatgaagttgttgaataaactcagatatgccatcaaagtggcataaatgctgttgtaagattttagaagaggacagggtaacttttgtttaggatgatcagagacagctacatgaaagagctggtaattgaaatggaccttggaaagatttttgaaaacagtgacagggaagagagaaggcatctgagtagaagtgacatgatatactctatatgctggattctgtaggatatattctttccagagttttctcttttttcactgtaaaactgtaagagtaatatatgcttggtataaagaaatcaaatattacagaaataaaacaattaaagccttccccccccccaaggaaaatgtacatatctacatacatgaaatttttcatatgatttttttggggtttatgtatctcttagagtttatttattggcacttcattttcctaccagtcatttccaaagcctttgacaccaaggttcaagtttggttccccagagggactactgataatactttggtatgcatctgtgagagttttcaatgtgtagttactttttagttttccacattaatgtggggataaaaataattaaattttagtcctaaatttaaatttaagacttttctcaaacatttagaaaagatagtccaggcgtggtggctcatgcctgtaatcccagtactatgggaagccaaggcatgaggattgcttgaggccaggaagtcaagaccagcctgggaaacacagtgagacctcatttctattttttttttcttcgacagagtctcgctctgtcgcccagactggagtgcagtggtgtgatctcggctcactgcaacctctgcctactgggttcaagcgattctcctgtctcagcctccccagtagttgggattacatgcgcctgccaccttgcctggctaatctttgtatttttagtagagacagggtttcaccatattggtcagactggtctcaaactcctgacctcaggtgatccaccctccttggcctcccaaaatgctgggattacaggcatgagccaccgcacctggcatttctatttttaaaataaaataaaattttaaaaaagagagagaaaataacaagaagcaaattgttttaaatcttatcatatttcttttttttacccaccctctgtagtagaggggctaacaagccacaaaatgaaaaaaattgtgtaaggagaaaaagatggagtttgaagctgagtcattaacatgcaaagtatagaatcagttccttcataattagcaactgatatattatcccattagtcattctgataggagtctaagcttctgagttttccattactcacccctttgacaatctgatgaaaactatgcagccttcccccagaaaaaaatgtacatatccaaatacatgaaatttttatatgatttttgggagatacatatcttttaaagtttattgacacttcctgtttctaccaggttcagaaatctccacaaaaaggaatagacaggacagagagttctttttttttttttttttttttttgagcagcagcaagatttattgtgaagagttaaagaacaaagtttccacaacgtggtaggggacccgagtgggttgcccaaggacagatagttctaaccactttgtaggcagtgaaatctcagagaaattcattgtcttgctcaaagttacagaatcaatttgttatactcctaggagtagaacccagtttaatattctaggaacatgtctcaatcagacaggtttcacggtaagttaaacctttttttttttttttttttttctgagacagagtctggctctgttgcccaagctagagtgcagtggcacaatccctgctcactgcaacctccacccgggttcaagcgactcttctgcctcagcctccagagtagctgggactacaggtacgcgctaccatgcccagctaatttttgtgtttttagtagagatggggtttcaccatattggccaggcttgtctcgaactcctgaccttctgttccactcgcctcagcctcccaaagtgctgggattacaggcttgagccaccgcacctggcctaaaccatttttttttgagagagtttcactcttgtcccccaggctggagtgcagtggcgcgatctcggctcaccgcaacctccgcctctcaggttcaagcgattctcctgtctcagcctcccaagtagctgggtttacaggcatgtgccaccatgcctggctaattttgtatttttagtagagtcagggtttcaccatgttggtcaggctgttcttaaactcctgatctcaagtggtccacccaccttggcctcccaaagtgctgggattacaggtgtgagccaccacgcccggcctaaaccattttttaaaagtatatgacttttcataatgagctgtgttttttgttttgttttgttttgttttgtttttgagatggagttttgctcttgttgcccaggctggagtgcaatggcacgatctcagctcaccgcaacctctgcctcccaggttcaagcgattttcctgcctcagcctcccaagtaactggattacaggcatgtgccaccacgcctggctaattttgtatttttagtagagatggggtttctccatgttggtcacgctggtctcgaacttccaacctcaggtgatccgccctcctcggcctcccaaagttctgggactacaggcatgagccactgctcctagccttcataataagctgtgctttttatctttggcacaggctaatacaaaataattacagtaagaaagtcaggttctcctagcgttattggtagcagcagctttggtgctcattttcatcactttggttcaaaggcctaagatggtagctattgggaaggaaaggccaggcagaactgactttcaggattttgtttctcataatttggttccgagaacttgaatcagaattgaagagtgtatggatatgtagggtgatgtttattaaagatacagatttcagggcttcaccccttacctactgaatcagaatctaatgagtatggtctagggatctaattctgatatatctaaaggattggaaactactggtctgggaaaggtaagagtgcatgataaaggttgattggggaattggactaatggttagggggagggtgaaaatcctcttttcttaaaataaaacttcagtttgttttgttttgttttgagacagggtctcactcttgtcacccaggctggagtacaatggtgtgatcttggctcactgccacctccacctctcaggttcaagcacttcttctgcctccacctccctagtagctaggattacaggcacatgccaccatacccagctaattttgtatttttagtagagacggggtttcaccatattggtcaggctggtcttgaactcctaacctcaggtgatccgcccgccttggcctcctaaagtgctgggattacaggcgtgagccaccacgcccagcaacttcagtatttttgtatgtgcctattcggacagatttttaaaagagcacacaaagccaatgattaggatgggtgtggcctccagatctaccagttgagttaaaagacaatacaggaggggtatatcagctgggtaaatactgacattgttaataagtcaaaaaagtgattaagctcagaggacatattccacaatcagggtactaaaagctaagcagaactcagaagaatccccctaaatgatttttcagcatctttgttaaatgagtgctctgagaataatattcgctgacccatttgtgtggtgtgggcagaactatctattgcagttcttgcatccaaacagatggagtccaaacctgtgcacactactcattattatgggctcttccagaactttcgttattcagcaatgtttgttaagaactttttgatcaggcgcagtgtctctcacacttctaatccctgcgctttgggaggctgaggcaggcagatcatgaggtcgggagatcgagaccatcctggctaacacagtgaaaccccgtctctactaaaaaaaaaaaaaaaaaaaaaaaattagcctgacgtggtggcgggtgcctgtagtcccagctacttgggaggctgaggcaggagaatggcgtgaacccgggaggcagagcttgcagcgagccgagatcgcccctctgtgctccagcctgggcgacagagtgagactccatctcaaaaaaaaaaaaaaaaaaagaacttgctgtgaagagacttatatagaaagtactatagagattatgaattatgaagacagtattctattcctaaagaaataaagaatctgtactgataagttaaacccacaaatagatgaaaaagatttgataattagttatgtgtaaagaatgcaaattaatatattataagctgagtataaatgttgagtaaagaattatcaagttagattagggtttaatcagcacagatttttcagtgattgtgaattttaaatgtgtgtctgtataagtatatatatatttatatatatttatatttatataaaaaatatatatttgtttttgagacagggtctcactctgtcaccctcgctggagtgcagtggcgtgatcatgactcactgcagcctcaaactcctgggctcaagcagtccttccagctcagccttctgagtagctgggactataggcacacaccacgacacttggctaatttttaaaaagtcatttgtagagattggttcccactgtgttgcccaggatatatatatgtgtttttttttttttttcttgttagatggagtctcactctcgcccaggctggagtgcagtggcatgatcccagctcactgcaacctctgtctcctgggttcaagtgattctcctgcctcagcctcccaagtagctggaattacaggcacgcaccattactcttggctaatttttgtatttttggtagagacgggagggggggggtctcaccatgttggccaggctggtctcgaacccctgacctcaagtgatcttcccacctcggcctcccaaagttctgggattacaggcgtgagccaccatgcttggccccaggctgtatatgtctgtttataacaaaagatgtttatttatggccaggcacggtatccagtctgggcaacaagagcgaaactccctctcgaaaaaaaaaaaagatgctcatttattatgaaaagttaaaacattatggaagaggcgccagactctgtggctcacgcctgtaatcccagcactttttaggggccgaggcaggtggatcacctgaggtcaggagtttgagaccagcctgaccaacatggtgaaacgccgtctctactaaaaatataaaaattagctgggcatggtggtgcacatctgtagtcccagctactcgggatgctgaggcaggagaatcgcttgaacccagcaggtggaggttgcagtgagctgagatcgagccactgcactccagcctgggcgacagagcgagactccaccttaaaaaaagaaagaaaaaaaaaatattgtgggagggtacacagagaaatctttgttaatagttttatgtgtttctttctagatactctgtgggtgttcagtcaagcatgtatttatctcaaacaagaatttttttccacaaaaagaatcatactatacatattggtcttcatctgcaacttgcttctttcacttagcagtataacatatatttttccattataatacatagagatcacctcttctatttaatggatacatgatagtaagaaatttaggtattctctttttggtctttttttttttaaatcagttcctcagtcacactagctgcatttctcaagtcacatgtggctaatggctactgtatgatacaatacaatacatgtatagatcatttccatcatcacagaaagttctgttagacaacactgatctaaaattatctggagaaaaatattaccttaatatataataattccataatttaatgactccttcataatttttacttagtaattgaaaagacagtttagcattaacattaaagaaaattaggctgggccctgtggttcactcctgtaatcctagcactttcggaggccaatgcaggcggatcacctgaggtcaggagttcgagaccagcttggccaacatggtgaaaccttgtctctactaaaaatagaaaaattagccgggcgtggtggtgggcatctgtaatctcagttacttggtaggctgaggcaggagaattgcttgaagctgggaggcagagtttgcagtgagccaagatcatgccactgcactccaacctgggtgacaaagtgagactccatgtcaaaaaaaaaaaagaaaaaagaaaattaaaagggagaagaacatccatatttctattattctaacctaacaaatgtttattatttttgtatatttttagttatttatgattcttattgtaaggatataatttttcatgcttatgattattatgtatatattgtacttttgtcatacatgtattgaacttttatagaatggttacatattcacattttatatgtgtacgtgttgagtatccccttcatccaaaatgctcaggaccggaagtattttggatttcagattttttcagatattagaatatatgtattattatacttaacagataagcatactaaatttgaaaatttgaaatctgggcagggtgcaatggctcacactgtaatctcagcactttgggaggccgaggcattcagatcgcttgagcccaggagttcaagaccagtctgggcaacataccaaaaccctgtctctactaaaaatacaaaaattagttgggcatggtggcatgtgcctaatcccagctacttgggaggctgaggtgtgacaatcgcctgatcctgggcagtcaaggctgcagtgagccatgatcgtgccactgcacttcagcctgggtgacagagtgagaccctgtctcaaaaaaaaggaaaaagaaaatttgaaatctgaaatgctccaatggctattccctttgagagtcatgtttgcactcacagagtttcagattttggagttttggatttggaatgctcaacctgtactattttatactaagaaattataattatatagtcattctctaattgttgggaatttgggccactccttttttcactgtcagcttcactgtacaagtagcttttacagaaagtattattttcatggaatatactacacaaaattagctgggtgtggtggcgtatgcctgtggtcccagctactcaggaggctaaggtgggaggatcacttgagcccgggaggtggaggttgcagtgagctgaggctgtaccactgcactccagcctgggcgacagagtgagaccctgtctcaaaaaaataaagaataaatgtgctttattggaacagattcttagaagtttgagaacagagttaatgagcatctgaaacacttttttttcctagatgaagcagatgatgatgatgatccagaatataatttcctggaagacctcgatgaaccagacacagaggatttccggactgaccgggcagtgagaatcaccagtgagtctgtgtttattctaagtcctgctcttgactgctttgcagctgtctttgtttactttgtagatttttaggggtgaagtttgcagctcatccatgttaagacatttaggtttcctttacccatttattgatctgattctttaaatttaggtacatattcagaaagcccatcagttattcatttgtatatcccacagtcgtgtattcagtccttactgtttggcagggattgtgcaagatgaataagacatggcatctgtgctgtaggagttcagcctagtagggtgatagaaacagaaaaagttacaatacaaagtgataaatgctgtaacaggttttacataaggtataataatgacctaaaagagagtgtcatctcctagtgtatgatatggactaggataggagaacttaggaaagaatttgcagaatgaaatggctttttatcttagttttgaaggaggaataagaaatttggtgaatagggacagagaggaatattgcaaatagaagagcatctgcaaaccacagaattgtaaaacatcaaaaaagtatgtttggaaaatactaagtactttggtggtggtgtatgagtgaaaagacagagaagtggtagataagattaggtagtgtttacatcatggaggatttttaagctctcaaaatgaggtttaagggcgggcatggtggctcacgcctgtaatcccagcactttgggaggtggaggcaggcagatcacctgaggttaggagttcaagaccagcctggccaacatggcgaaaccctgtctctactaaaaatacaaaaattagccaggcgtggtagtaggcacctgtaatcccagctactccggaggctgaggcagaaaaattgcttgaactcaggcgggagaggttgcagtgagccgagatcacgccaatgcactccagcctgggcgacagagcaaggctccgcctgaaaaaaaaaagaggtttaagcagtaaatcagtaggaactgatttggattttagaaagatcactttgatttaataccagtttaatgtattaatttgttaggtaaagtgaacaagactggaggtatggaaaacaattatgataacttagcttgagttatttctataaaaaattatatcattgagctaggagtggtggcttacacctgtaatcccagcactttgggaggctggggcaggaagattgcttgagcttaggagttcgagaccggcataggcaacatagagaaactttgtctgtactaaaaatttaagaaattagcctaatgtattggcacgtacctgtagtcctagctactcaggaggctgaggcaggaggattgcttcagcccaggaggtcaaggattcagcaaactatgatagtgccactgcactccagccttggtggcagagggagatcctgactcaaaaaaaaattatatcattggctagtgtgtcaagcatagaaaacatacatttcatcctgaagaaattctacctatggggagaaagaaaaataaaaaatatatttcataagccattgatttttattgcatgtatgcatgaccctgtactggaataatatacacgacatggagaaggtaagatgctggctcttgaccaggttatgcagagagctttataaacatccaagatatacctaattaatgcagttctttgtgtaaagagaattatgtaaatacaatcctttagaacttacattttattttattgctttattgtgcctttcaccttgcttttaagattagaataccatttcctttgtgaagatctttcatttattttgatatactatgacagggatagtggaagcattgaaaggaaagcaccaggaattagagaaaatgtagaatgaaaaggtttgaggatttaggctttgagaaaactgaaaggagaatctaggaaggtacaagaaaaacctagaaaatctagtgtcgtagaaaccaaaggaagagtcttttggctggggcacagtggctcatggctataatcccggcacttgggaggctgaggcagaggcagaaggatcgcatgagcccaggagttcaagaccagcctgggcaagatagtgagacattgtctctacaaaaacattttaaaaataaaatgaaaattagttgtcgtggtgcatgcccgtagtcccagctacttgggaagctgaggtgggaggatcacttgagcccaggaggtggaggctgtagcgagcagagatcccaacactgtactccagcctgggtcagagcaagaccctgtttcaaaaaaagagtctttcaagaaggacagaatggtcaacagtaaagaaacaagtaaagaaacatctgcttaaagcacaaaagcagatcttaagttcagctatcatcctggaatatatttgccttccctttttgattgttactttcttcagtttacgtataatttctcagggagatcctccttcgttaggattgatcttcttgctttgcattcccgtaccactctttttgtccttttatatactgatcacctcataattgcttatttaatatctgtcttctcccctagactgtgaacttctcaagagctttgttttgtttattgctgtaaagctggtggcaatatttgccagtcgaatagagatgggtaaatgaagggcagtctttctagtcatacagttctgtaatgatagtgaaagctggagtagaatttttaatttttttttctgcctcttgtcctcttgtgtctcattgtcatatttgattataatctctttaaaaggacttatccttatatggataactaaaataaaaaaattaaaaagcatagaatcacagagtttgaaaagctccatgtggtcacatgttttttgcccgcttgagaatttgtttacacctcctctgaggtggcctttttagtcctgtttgtataccttcagtgacagggagctcaacaattctgcagatagtgtattgtaaacttgaacacctcctcaattaatactttccttattgaacccaaatctgaatgcaaattcagatactttccttattgaacccaaatttgaatgcaaagcaggaagatcaatccttttatattcctcctatttgtctttatgttatgttatgttatgtgatgttatgttatgttatgttatgttatgttatgttatgttatgttatgttatttttgagatggagtttcgctgttgtcgcccaggctggagtgcaatggtgcaatctcagctcactgcaaactctgcctcctgggttcaagcgattctcctgcctcagcctccagaatagctgggattacaggtgcccgccaccacgcccagctaatttttgtatttttagtagagacggggtttcaccaggttggccaggctggtcttgaactcttgacctcaggtgatccacctgcctcggcttcccaaagtgttgggattacagtcatgagccgcactgtgcccggcctcctatttgtcttttgttgttaagaaaaaaaaaagcaatttattcccaagtgtacatattaaaagatgtttcttaagtttttttttttttttccctatgcaaaacataggaaagtttcaagtttcttctgccaggtttcttcttctccaaagccttggtgtccagacctctcaccatgcacattactcttctctggattctagcatttattttctttaaacttttcccctgttacatcttattatgaaatttaaaaatatatatagaaaaattgaaaaattatacagctaacattcatatactcaccacctacttttttttgagacgaagtctcactcttgttccccaggctagagtgcaatggtgtgatctcggctcactgcagcctccgcctcccaggttcaagcggttctcctgcctcagcctcctgagtagctgggattacaggcgcctgccaccatgcccggctactttttgtatttttagtagagaagaggtttcaccatgttggccaggctcatctcgaactcctgacctcaggtgatctgcccgcctcagcctcccaaagtgctgggattacaagcgcgagccactgcgcccagcctcaccacctactttctatagtttgttggtttttttttgagaaggagtctcgctctgtctccaggctggagtgccgtggcgccatctcagctcactgcaacctccgactccctggttcaagtgaatctcctgcctcagcctcccgagtagctgggattatagtcacgcgccaccatgcccagctaatttttgtatttttagtagagacagggtttcaccatgttggccaggatggtctcgatctcctgaccttgtgatccgcccacctcggcctcccaaagtgctgggattacaggcgtgagccactgtgcccggccaaactttcagtagtgttaatataaactgtgcgcctttcatatgtgcgggtttcacagctgcagattcaaccaaccttgaaaatattctgagaaaaaaaaatgcaacagcaaaaaataatactaactgggcgtagtggctaacatctgtaatcccagcactttgggaggctgaggcaggaggatcgcttgagcacaggagtttgagatcggctgggcgacatactgagattccatctctacaaaaaactttaaaattatctgggtgcagccgggcatggtggctcacgcctgtaatcccagcactttgggaggccagggtgggcagatcacgaggtcaggagttcgagaccagcctggccaatatggtgaaaccccatctctactataaatacaaaaattagccgggtgtggtggctcacgcctgtagtcccagctactaaggaggctgaggcaggagaatcgcttgaacctgggaggcggaggctgcagtgagccgagatcgcgccactgcactctagccagggcaacagagtgagacgctgtctcaaaaaaaaaaaattatctgggtgcattggtgtgtgcttgtagtcccagctactctggagacagagtcaggaggatcccttgagcccagaagttcaaggttgcagtgagctgtgatcataccactaccactgcactccagcctgggtgacagagtgagagcttgtctcaaataaataaataaaaaataataaggtataacaagcatttacattgtattaggtgataagtaatctagagataaggtatacaggaggatgtgtgtagattatatgcaaatactacatcatttttatataagggacttgagcatcctcagattttggtatccatggatacgaaatggttccaggagattggctcctggaaccaacctccacagatactgagggatgactttatttgccttatcatgcagctgtccatctccctgtccgtctgtggatgcatcttagttttcaaatgcatttcagagtaaattatacttcacttttttttctttttttttttaaattcagacaaggtctatgttgcatgggttggtcttgaactcttgcggtcaagcgatcttcccacctcagcctcctgaccagctgagattacaagtgtgcacaatggcacctggctatatgtcactttttttttgtatttttagtagagacggggtttcaccatcttggccaggctggtctcgaattcctgacctcgtgatcctcccacctctgcctcccaaagtggtgggtttacaggcatgagcctatacttcacttttaaccacttcagcacgcatataatgaactagagctccatatttgtttatgatttctttttataggtaattttacacacagtgtatcacacacatctcaagtgtaccatttaatgaattttgacatgtgtgtacctatgtgacacaaatccctgtcaggatatagaatcctcaccccaggaagtttcctcatgccccttccaagtcaatccccacaccatcccttcagaggcaaccactgttctgatttttttttttttttttttccgagacggagtctcgctctgtcacccaggctggagtgcagtggtgcggctcactgcaagctccgcctaccaggttcacgccattctcctgcctcagactcccgagtagctgggactacaggtgcctgctaccatgcccggctaattttttgtatttttagtagagacggggtttcaccgtgttagccagggcgatctcgatctcctgaccttgtgatccacctgccctggactcccaaagtgctgggattacaggcgtgagccactgcgcccggctttttttttcttaatcacaggttatgtttgccagttttagaacctcacataaatggaatcatataggatgtgctttgtgtgtaaggcttctttcactcagcataatatttttgagattcatttgtgttgcatgggtcgttagtttgttcccttatattgttgagtagaatttcgttgtgtatatatactacagattatctatttttgtgttgatcacctgggctatttttaattttgggtaacgaataaagctgcgctgaacttttttgtgcaagtctttgtggaaatgcttcatttctctctctctttcatttgttcccacctatgagttagaaaagccgtatttcatttatcttgggtcagctgtataggagacaaatcactgggtcacagggtatgtttagttttataagaaattgccagaccattttccaaagtggctttccattttacattcttatcagagttctggttgctctacatcctcagtaacatttggattttaattttttttgttggctgggcatggtggcgcacacctgtaatcccagcactttgggatactgaggcaggcagatcacttgaggtcaggagttcaagaccagcctgggcaacatggtgaaacaccgtcgctactaaaactacaaaaaattagccaggcgtggtggcgcatgcctgtagtcccagctacttatgaggctgaggcatgagaattgcttgaagccggaaggtggaggttgcagtgagctgagaccgcgccaccgcgctccagcctgggcaacagagtgagactcagtctcaaaaaaataaaataaaaaataattaaattacttaaatgattttgtttttgtttttgttttgtgtttgagacagagtctcactctgtctctcaggctggagtgcagtggtactatctctggtcagcgtagcctctgcctcccgggtttaagagattcttgtgcctcagcctcccaagtagctgggattacaggcatgtgctaccatgactggctaatttatttatttatttatttttgagatggagtcctcgccctgttgcccaggctggagtgcattggtgctgtattggctcagtgcaacctccacctcctgggttcaagtgattctcctgcttcagcctcccgagtagctgggattccaggtgcatgccaccatgcctggctaatttttgtatttttagtagagacggggtttcaccatgttggtcagactggtctcgaactcctgaccgcagatgatctgcctgcctcggcctcctaaagtgctggaattacaggcgtaagccactgcccgtggcctggatcttaatttttttaatgtcctcttaagaagggcctttatagaattgttcacagtcctccagacatagtgttagactctgctctagttcagtgatatgtttgccttgttggttatgagccccgttttggagcaactgtgtcttattgaacttgatatcaaccaaaacttttttttttcctcagattcttgtaacaaccaaaactttcaggtcttgttcacattatttttaagccacgtcaccttttcatgcagttaataaactgatctttaaaactcttgctgggcgcggtagctcacgcctgtaatcccagcattttgggaggctgaggcgggtggatcacgaggtcaggagatcgagaccatggtgaaaccccgtctctactaaaaaatacaaaaaattagccaggcacggtggcaggcgcctgtagtcccagctactcaggaggctgaggcaggagaatggcgtgaacctgggagatggagcttgcagtgagctgagatcgcgccactgcactccagcctgggcgacagagcaagactccgtctcaaaaaaaaaaacgaaaaaactcttaactgtaggactgggcaccgtggctcacacctgtaatcccaacacttagggaggccaaggtgggaggatcgctggagcccaggagtttgagaccagcctgggcaacatagcaacatgctgcctctattaaaaaaaaaaattcttaaacatagaactttaaatttatccgtatatgttgcatccagttgatttgagaaaatataattttgaattttccgtctgttggattggcagtccctttcagctttacatcatctacagatgtgttaggtatgttctctgggtcttctaagtcaccgatggagttcttgaatagttcagatccaaagacagcgtcctgtgaaaccctgctggaaacttgtctttctctctctcttttttttttaagacaatatcttgctctgtcgcccaggctggaatgcagtggcatgatcttggcacactgcagcctctgcctcctggactcaagagatttctctcacctcagcctcttgagtagctgggactgcaggtgtgcgtcaccaagcccagctaaatttttttgtagagatatggtttcaacattttgcccaggctaggagactcatctcttgattccattcagtactgtgtggatttggataggtcatctaattataaaatcatctagctcacattttctcctgtcttcttccttttagaatttaagcttcatgagaatagaactctctctctctatctctctttcattctctcatatatcccaagcatctaaaacatggattgaagcatagtgctcaataaatgtgttttgttgttgttgttgttgttgttgttttttgagacagagtctcgctctgttgcccaggctggagtgcagtggcgcagtcttggctcactgcaagccctgcctcccgggttcacgccattctcctgcctcagcctcccgagtagctgggactacaggcgcccaccaccacggctggctaattttttatatttttaatagagacggggtttcaccatgttagctaggatggtctcaatctcctgactttgtgatccatctgtcttggcctcccaaagtgctgagattacaggcatgagccaccgctcccggcctcaataaatgtttttgaataaatgaatgaaggatagccagtcatggtggctcacacctgtaatcccaccattttgggaggccgagttgggctgatcacttgagctcaggagttcgagaccagcctggtgaaccctcatctctacaaaatatacaaaaattagccaggcatggtggcatgcgtctgtggtcccagctacttggggagctgaggtgggaggagcgattggaccagggaggggatgcggaggttgcagtgagctgagatcgtgccactgcgctccagcctgagtgacatagtgagacccatctcaaaaaaagaaggatagatatgaagaatttgtcatgccttgttgaaaacattatacattgtcttcatggaattcctccttattgtaaaatctaatttataccaacaatatactgtctggctttcttgcagaaaaggaagtaaatgagctgatggaagagctgtttgaaactgtgagtaatgatcctcgagtgagaacacgggattttaagtcagttctccagcaagatgtgtcatttggtctctgtgatgctccctctaggagagggggtctgactgaaccaattctccttttagtctacctgggaaagaatataatgacaagggaattttgctaactactagactcttgattatatacatgtatgttgttcttattaacattttccttgaaacttctttttgtttgagggggttcttgctccatcacccaagccagagtgcagtggtgaaattacagctcacagcagccttgaccttctaggctcaagcagtccttcgtctaagcctcctgagtagctgggacataccaacacacccagctaattattttatttgtagagacagggtcttaccacattgctcaggttgttctggaacttctgggctcaagcaattttcctgccttgggcctcccagtgctggaattataggtgtgagccagcatgcctggcccctggaaaacttttgatgacttcccctactgtcatttggtgtgtccttaaagattgtcaactagttttaaactactttgtgtacaaataattacctttttcataaatttgtttcaaaagatttttcattttaagagattgatcattttgaggctgggtgcagtggctcacgcttgtaatcccagcactttgggaggccacggcaggtggatcatctgaggtcaggagtttgagaccagcctggccaacatgatgaaaccctgtctctattaaaaatacaaaaattaggcatggtggcgggcacctgtagtcacggttactgcagaggctgaggcaggaaaattgcttgaacctgggaggcggaggttgcagtaagcccagattgtgccactgcactccagcctgggcaatagagcaagactgcaagactctgtctcaaaaaaaaaaaaaaaaaaaaaaaaaaaaaaaaaaaaaggagagagagattgataattttgagttatccacgctctgtccttactgttacaagttgactggttgaatgacttctttcttggcataatagccatcccaagtgtgggtttgtgggaatcctgaagtgagaaagttctgacattggctctttctgggtgccagcattattatagtcttgtaatctatagttttcactcttccttcccaatactggagcaacattcagaggcccattccccaggaaaaccctccctttcctttgcccacagttccaagatgagatgggattctccaacatggaagatgatggcccagaagaggaggagtgtgtagctgagcctcgtcctaactttaacacccctcaagctctacggtaggctagttgaagaccttgagatttggaatagaggaaaagtttatttctgaaaaggttttcagaagttgcaattgataatttttcatcccaaaccagcttctgttactgatgtaaggatgcagagccctgtcaggagttaggtgtcaagtgaagtctccttgttatggggcagtgcagctgtaggccaagctatatccgtttgggaagggagaaaaaacagtagctggcatccatatccacttctccgggtgagtggtgctggagaggtatgtaggactcaatgtggccagccacacaaactaccccatattgtaatatcctgtctgtcccttttgttctttttatgtgccattaatatctgctaaatgtgactgaaaatttgttagtcacctaggcattagtggagcaaaccctgaagcacctgcagtaaggagtctgaaacatacgtgctgacctttttgcctaaagttggcacttgtgttacagcatccagaaagtagaggctttaattttttcctcattttgtggtggatttgcatctgcactttattgtattgttatccattgcgagtagcagcatgtagtcattagatggatggctagatgtcaggatgcagtttgtgccataagtggaacaaagcaaagagaatagtccctgtaattcgtcctgggtttgaacctaacagcattactaagcagagagcttgggatccatctgaaagctagacctttagagatttttcaatttagtgaaaaaagataagatatgccaaccaatgtctaaaaactagaaataccagtaattctccattacaacaaatatcacaatacaactacatcaaaaacctcaagattgctaagtcagtatttgacccattattttaagttacagctcatacaacaaaattctgttatagcagaatggaaccattcatcctgggaacatataatgggatttgatctataaacgtgttttggttctgctgattgactctttgtaacttcttaaaatttgggaagtgtaggctgggcgcagtggctcatgcctgtaatccctgcactttgggaggcggaggcagggggatcacctcaggttaggagtcgagaccagcctggccaacatggtgaaaccccatctctactaaaaatacaaaaattagccaggcatggtggcgggtgtgtgtaatcccagctactcaggaggctgaggcaggatactcacttgaacccggaaagcggaggttgcagtgagctgagatgacagcctgcttgacagagagagactctgtctcaaaaaaataaaataaaataaaataaataaaatttgtaaagtatagaaataatttaaaactcttgttagaattcagttaccttctggtattcagtagaatacagtcatatatcatctcatggtgatacattctgtgaaatgttatcattaaacgatttcatcattgtgtagaaagcacttggataaacctagatggtttagcctactgcatacctaggctatacggtataacatattgctcccaggccacaaacctgtatagcatgttattctgctgaatattgtaggcagttgtaacacaatggtaagtacatatgtatgtaaacatagaaaaggtacagtaatcttatggagccatctctgaatatgtggttcattattgactgaaacattatgtggcacatgactgtacttgggcagctgctgcttctctttcagttgcaaatgcaaacctgttataatctttgactaaataaagcatcctggattctgtaagtccatagatagtaaaaacttcttaaaacacaataaagaagagagaggaaaaaaaagaacaaaacaaaaaccctgggaaagtgagttatctgtgcttcccttgtcagttatccaagtaatacttattaaaactaggtgcaaggccacgtgtggtgactcacacctgtaatctcagcactttgggaggctaaggcaggcagatcactttaggtcaggagttcagaccagcctggtcaacatggtgaaaccccatctctactaaaaatacaaaaattagctgggtgtggtggcacacgcctgtaatcccagctacttgggaggctgaggcaggagaaacacttgaaccctggaggcggaggttgcactgagctgagattgtgccactgtactccagcctgggcaacagagtgaaactgtctctcaaaaaataataataggccgggtgcggtggctcacgccagtaatcccagcattttgggaggccaaggcaggcggatcacaaggtcaggagtttgagaccagcctgaccaacatggtgaaaccccgtctctactaaaaataaaaaaattagccaggcatggtagcactcgcctgtaatcccagctactcaggaggctgaggcaggagaatcgcttgaacccaggacgcagaagttgcaatgagccaagatcatgccactgcactccatcctgagagagagaaaaagactccatctcaaaaaataataataataataataataataattatagatcaggcgtggtggctggcacctgtaatcccagcactttgggatgccgaagcaggcatatcacctgaggtcaggagttcgagaccagcttggccaacatggcgaaaccttgtctctactaaaaatgcaaaaaaaattagtcggacgtgttggcaggtgcctgtaatccccgctacttgggaggctgaggaaggagaattgcttgaacctgggaggcagaggttgcagtgagccgagaccactccattgcactccagcctgggcaataggaacgaaactccatctcaaaaaaaaataatagtaataataataataataataaaaaatacaactacgtgcaggctatgttttcattacctacttttttatgcttctggtcttctgttccttcagtggtagtagtgcaggtgatcaggttttcagttctcagaagattgcataagacagtcccacaggctttaggtttttaccctgtgctgcccaaacccacagtaaatactataaaagaaagaatgatttttatccccaatagataaatgataacttttaaaaattaactattgaaaacacttatttatctattgctgtaatattggagattacttgaaatatgataacctgcttgttgtaactacatcagcaggtcttatcctgattgcatagggtatcagcacgtgcttaatcacttaagtatctttttctccttttacttcagaactgtcatgctgggtttttcagtttttgcttcagccctggaaacagtctctcaggagggtaggggtgggaagttagggttaggaaccttagaagaggaatttattttatttatttatttattttattttatttttttgaaatggagtcttgctctatcgcccaggctggagtgcagtggcgcgatctcggctcactgcaacctctgcctcccgggttcaagtgattctcctgcctcagcctcccaagtagctgggattacaggcacgcatcaccacggccagctaattttcgtattttttcatagagacagggtttcgccatgttagccaggctagtctcgaaccactgacctaaagtgatccacctgccttggcctcccaaattgctggcattactggcttgagccaccacgcccgactgtttcttgaccttttaataattgtcattctgactggcaaggcttgctttcttaacaagtcaaaaatcttctagcatgaagcaggaaaaggatatactaaaataactaaagtaatgatagtttacctgaacagaactgagtggttggttcaaatattaccctactgctctccatgaaggtattttattttagccctttaaattcctcttcctggctgggtgcagtggctcacgcctgtaatcccagcaatttgggaggccaaggcaggtggatcactttaggtcagtggttcgagactagcctggctaacgtggcgaaaccctgtctctacaaaaaaatacaaaaattagctggccgtggtgatgcgtgcctgtaataccagctactctggaggctgaggcaggagaatcacttgaacccaggagacagaggttgcagtgagccgagatcatgccactgcagtccagcctgggcgacagagcaagactccatttcaataaataaataaataaataaataaattcctcttctaaggttcccaaccctaacttcccacccctaccctcctgggagactttttccagggctgaagcaaaaattcaaaaacccagcatgtcagttctgaagtaaaaggagaataagatagctaagtgattaagcatgtgctgataccctatgcagtcagggtaagatctgttggccaggcctggtggcttacgcctgattccagcactttgggaggccgaggcaggtggatcatgaggtcaagagatcgagaccatcctggccaacatgatgaaaccccgtctctactaaaaatacaaaaattagctgggtgtgatggcgtgtgtctgtagtcccagctactcaggaggctgaggcaggagaatcacttgaacctgggaggcggaggttgcagtgagccgagatcatgccactgcattccagcttggcgtcagagcgagactccgtctcaaaagaaaaaaaaatctgtttatgtagctacaacaagcaggttatctttctttcttttttctttttttttttttttttttttgagacagagtcttgctctgtcgcccaggctggagtgcagtggcgggatctcggctcactgcaagctccaccttctgggttcacgccattctcctgcctcagcctcctgagtagctgggactacaggcccccacgactgcgcccagctaattttttgtattttcagtagagacggggtttcaccatggtcttgatctcctgacctcgtgatccgcccacctctgcctcccaaagtgctgggattacaggcgtgagccaccgcgtccggccaacaagcaggttatcatatttcaaggaatccccgatattacagcagtagataaataagaaaatgtagtatcccaccagggaatactatacagccataaaaaggtatgatatcatgtccgtttcagggacatggatggaggtgaagccatcagcaagctaacgtaagaacagaaaaacaacactgcatgttctcacttataagtaggagctgaacaatgagaacacatgggcacagggtggggaacaacacacactggggcctgttgggggagcgggggaagggagaggatcaggataaactgctaatgcagctgcacttaataccaaggtgatgggttgataggtgcagcaaaccaccaaggtgcacgtttacctgtgtaacaaacctccatgtcctgcacatgtattctgaaacttaaaattaaaattttgagggctaggcatggtggcttacgcctgtaatcccagcactttgggaagccgagatgggtggatcatgaggtcaggagatggagaccgtcctggctaacacagtgaaatcccatctctactaaaaatacaaaaaattagctgggcgtggtggcacgtgcctatagtcccagctacttgggagggtgaggcaggagaattgcttgaaccctggaggcggaggttgcagtgagctgagatcgtgccactgcactccagcctgggcgacagagcgagactgtgtctcaaaaaatatttaaattttgaaaaaaaaatgcaaggcagtgcagcctgagtggatagggaaatgggacaagctgaacctgggatgggagtaacaagtaaatgagagaagaaatgagaatgatgagttcccaccagctccttggctgctttcttatccagatatttctctgttcctagcattttaattttttctttatttgtatattatttagaagaggaattttagaggaatgggatagagtgtaatatagaatcatcatatttgatgcatgctaactactttggcaaaagatttgtaaaaggctgagagtttgactgttggctaaagtgagatgggggattagtagggaatgaaaattgttcaggctctttgctcatcattggaacgaattggatgtgttgtggacctacggaaacactcaaattcagtcatctccctgttgggaataggtttgaggaaccactggccaacctgttaaatgaacaacatcggacagtgaaggagctatttgaacagctgaagatgaagaaatcttcagccaaacagctgcaggaagtagagaaggttaaaccccagagtgagaaagttcatcagactctgattctggacccagcacagaggaagagactccagcagcagatgcagcaggtaggacttttcttggtcatgttaacattggatttttttttttgagacagagtctggctctgtctcccagcctggagtgcagtggcccgatatcggctcacttcaacctctgctttctgggctcaagcatttctcctgcctcagcctcccaagtagctgggattacaggcatccaccaccacacccagctaatttttgtatttttagtagagacagggtttcaccatattggccaggctggtctcgaactcctgaccttgtgatccgcccgcctcggcctcctaaagtgctgggattacaggcgtgagccactgcgccctgctgttaatactggattataccaaggcctaactctgaggccagaaattaacagctttgtaaaagtcagagatagttaccttaccacctcctaaaaccatagtatcttcacatcattaggagctcgagaagtcatcatgttcatgccttatggctcaaggaagagagcacacaaggacactaatggtattcagaaatatagatttcaaagagtccttagtaatctattctgaaatttaacaaccttcactgtgagaagtaggtttgtttttcctttttctaacctcagtccctctggattgaggttaagcttcctctggttctgtcattttgttcaagggaacatgtctgagagatttatgccaagatcctatgttattttcatactcctttcagaaagcaaaatatatgtgataaagttgcaaacatcttggttattgtctctctgggggctgggttacggtggctcacacctgtaatcccagcactttgggaggctgaggtgggaggattgcttgagccagggagttcgagagcaacctgagcaacatagtgagaccctgtctctgcaaaaaataaaaataaattagccaggcatggtgccatgcatctgtggtcccagctactcaggaggctgaggtgggaggattgcttgagcacaggaagttgagagggcgtggagccatgattgcatcactgcacatcagcctgagtgacagagagagatcctttctccaagaagaaaaaaaaaaaagatctctctggattcctgaaatgacaatgtggtaacatgtcacttcatcattttctttccatccccagcacgttcagctcttgacccaaatccaccttcttgccacctgcaaccccaacctcaatccggaggccactaccaccaggatatttcttgtaagtttccaaatatccataactctaaagactagagtatgaaattagcttggcaggttatttctcagttattcactgatcataatctatatttattcttctctcgggtatttttgattgttttgcctgctttctgttaaggcttcctgtgtttgctgagagaacgtaagccactgattcccatgaaaggacaaggagtgtattcaattttcttaatactgtctttctgatatttttattgaatcctcctcatctttagatccaacctaacttcttaggtttttggtaccactgttcgttttatagatgttgagactgggcacggtggctatgcctgtaatcccagcactttgagaagccaaagcaggcagattatatgaccccagtagttccagactagctggggcaacatgccgaaagcccgtctctacaaaatacaaaaattaaccagatgtggtggtgcgtacctgtagtctcagctacttgggaggcagaggtggaaggatagcttgagcctaggaggtgagggttacagtgagctgagatcgcgccactgcactcaagcctgggcagcagagtgagacccagtctcaaaataaataaataaataaaataaaagtaatagtcctaattcttggctgggtgcggtgacttgtgcctgtaatctcagcactttggtaggctgaggtggctggatcacttgaggtcaggagttcgagaacagcttgaccaacatggtgaaatccagtctctacttaaaatacaaaaaatagccgggcgtggtagcgggcgcctgtaattaatcccagctactcgggaggtagatggagaagaatcgcttgagcccaggaagtggagacttcagtgagtcaagatcgcaccactacgctccagcctgggcgacagagcgaaactccgtctcgaaaaaaaaaaaaaaaatgagtcctcattcttcataatcttacttctagttcaggagctagaccatatattccttagtgtttctcactaagtctaaaagtaaaacaagaatacaatccctgaatatctgggaactcaggcataatcttaacagagtagtttattgtgaaagactttatgatgatttttacctgtttttatcctgtagtaggaaggtcagcttctcatttagattctgaaggctactggtattaattgtctggaattgtcttaaatctttcttgtgtcctgttttcccagaaagagctgggaacctttgctcaaagctccatcgcccttcaccatcagtacaaccccaagtttcagaccctgttccaaccctgtaacttgatgggagctatgcagctgattgaagacttcagcacacatgtcagcattgactgcagccctcataaaactgtcaagaagactggtaggagacagatgtgtcagctttaagtttttacttgcggtgagaggtggtgggaatcttatcccatagataactaaggatacttgcctaggaatggaggacacaggacatttgtaatttcttccttctctcttttatcctccctttgtactcattatccaagttctagaattacatgataatctctgggcctgggtaaagtgtggaggcagtggacagtataggaatatgggaggtagagatctgaggctcagtgctaagaattggactacagcaatatgaggggtaagtattaggagtcagatcgagataaactggggcctggtaaagatgaaagtcaggtggtaaagtttggtcatgtttagctttttactgtcttcattaagatcaactaaggccaggcgcggtggctcacgcctgtaatcccagtactttgggaggccgaggcacggggaacacaatgtcaggagatggagaccatcctggcgaacacagtgaaaccccgtctctactaaaaatacagaaattagccaggcatgggggcacgcgcctgtagtcccagctactcgggaggctgaggcaggagaatcgcttgaacccaggaggcagagtttgcagtgagccaagatagcatcattgcactccagcctgggcgacagagcgagactcagtctcaaaaaaaaaaaaaaaaaaatcaactaactttatttaccatactgactgcagcataagtgatatctccattctgaatgaaatattgacttgcaagttaggcataagttagagattatacatttgccatgttcagtattttaaagaaatttgcaagtttagattctaccttgcattagtttagtattttttagaaaatacttgctatttacttaagccaaatatttgcttctgatttgtttcttgatttagcaaattagttgtggtttgttctggatttgggtttgtctttggattctattttaaatccctgagtcttatcgttaagttgaaaatagttgtatttaagtgtattatatcatagacacggatcccaaactgctttaacagctatattaaatgatatgaaatggtaatgaaaacttgatttaacaccaaattataataatatcttacacatctgttgacctgttgctttcttctggggatataaaaataacacttatggaaggagaaatatggatatagtagttttgtctctagaaatgcagaggtgcctgaaagtgagaggctgagagagggagagagaaatgaatgagactgaattgtctccttccttttatggttcttttgttcccagcctcaggaggaatctgggagaacttaagtaagaatcaaataaaagtaaaatttggaataccagatttgtgagggagattaaagaagttggaatcttattctggaagaaagaaagcattgttgaaggtctcttatccttcaagtatttaaggggggaaggaggtaaaacatttttgagcatacgctattgttagcaccttattttactaggtgctttttaagtgtttgttttacttagtgaataaagtgttccacataagaaagaatgagtcaacttttattgccattgaatgggactccctttagatataatgttagcttaagaaagactggaaacttttggggggatggtgggcagatgggagggaatcaagttaggtaaggatagctcctacctaaatgcaaaaatgcattcacaggcttttatgaagccctcttttgtcctagaagttgatttatccgagatttattttcttatagcgaatgaatttccctgtttgccaaagcaagtggcttggattctggccacaagcaaggttttcatgtatccagagttacttccagtgtgttccctgaaggcaaagaatccccaggataagatcgtcttcaccaaggctgaggacaagtaagtgtttactctgggggatcaaaacagcagaacatcccaaggagaagatgtagttcctttgaggagtttaggggaagtaagacttgtataataagacacggacacaaaagacaaaaggaaaagcaatatagatgagcagagccctctaggacgtgcttgttctagcagtgccaaatactgctttttgggagatgtcacacacatttttaaagcattttagaccggacatggtggctcacacctgtaatcccagcactttgaaaggccaaggcaggaggttcgcttttattttattttatgttatttatttatttatttagaggcagaatcttactgtgtcacccaggcagtcacagctcactgcagccttgaactcctgacatcaagcgatccttgcacctcagcctccacggagcagctgagaccacaggcgtgtgccaccatacatggctaaatttttttttttttttttgtagagatgagggtctctctgtgttatccaggcatctctcaaactcctggactcaaggcatcctcccaccttggcctcccaaagtgctgggattacaggcatgagccaccacacccaccagattatgaacatttttatggccctttgtgtgtattgccacactgttatcagcacatatgtgtatatgtaaccacgatcatatatgttgttagagggtagtattggtgccggtttaagttgtctgacagggtacctattcattttgtattagttttattagaattattctccttcctttctattctctttgaacttcctttgtattgttagtatacagctcgtcatgatacagctcatcatgatctcacgtttattaatgatttatgcctagtttcttatgttcccacataattgtgaagtatttgattttttttttttaaacagagtttcacttttgtcacccaggctggagtgcaatggtgcgatctcggctcactgcaaccttcgcccccggtttcaagtgattctcctgaccaagtagctggcattacaggcacctaccactacacctggctattttttgtatttttagtagagacgaggtttcaccatgttggccaggctggtctcgaactcctgactcaggtgatctgcctgcttcggcatcccaaaatgctgggattacaggcgtgagccattgcgcctggccttattcttattcataatacttaatcagtactcactaagtatctgaaattttctgttgagtagtcaccaacttgtacaagaattagatttacaaaaagtagattgaccaggcatggtgggcttacaactgtaataccagcactttgagaggctgaggcaggaggatcgcttgaggccaggagtttaagattagcccaggcaacatagtgagaactggtctctacaaataatggaagaaaaaaattagcccggcatggtggtgaacgtctgtggtcacagatacttgggaggatgaagtacgggaatcgcttgagcccaggcattcaaggctgcagtgcgctgtaatcatgccacccgctctccaacccgggcaacagagcaagaccctgtctgaaaaaaaatgaaaaggtagattgggccacacaccatggctcatgcctgtaatcccagcactttgggaggctgagactggagaattgcttcagcctaggaagtagaggttgcagtgagctgcgatggtgccactgcactccagcctgggtgacagcgtgagaccttgtctcaagaaaaaaatgaaagagtagattgtaaaatgtgttagtctggggagaccctttagaaggaaggactgtgaagtgagatttagtgttattctcctttctcagtttgttagctttaggactgaagcattttgaaggaactgagtttcctaatcctctaatcagcaagtaccttctaacctgcaaaactgcccaccaactgacagtgagaatcaagaacctcaacatgaacagagctcctgacaacatcattaaagtgagtgtttcctgcatgcgccatccgggcacctcaccaatatgtacccattcttttatcttgttattctcaaagaaaagaggaaccttcttttatctaaagctaatttctcccactttacactagattaattcccctattgccttttgggcaatattccgctggcagtattccacttatttgctttttgttgttgttgttgttagacagactcttgctctgtcactcaggcttgagtagagtggcgcaatcttggctcactgcagtctttacctcccaggttcaagcgattctcctgcctcggtgtctcctgcctcagcgtcccaagtagcttggattacaggcatgcaccaccacacctggctaatttttgtattttcagtagagatgaggtttcaccatgttggccaggctggtcttgaacctctgacctcaagtgatccacccgccttggcctcccaaggtgctgggattacaggcatgagccaccgcacctggtttcttcttttttatttagatatttatgttgtgtttttagagacgggttcttgctctatcatcctgtttggagtgcattggctcagtcataggtcactgtagcctcaaactcctgggttcaagtgatccttccactttagccttccaagtatcctggactacaggcgtgttccaccaaggctagctcattattttattttgtgtggagatgctgtgtcactttgttgcccagactggtcttgaagttttgacatgtgtcagtccgcctgcctcagcttggcctcccaaagtgttgggattacaggcgtgagccactatgcccagccttttgttttgttttgtttttgtttttttcttgagaaagggtcttactctgctacccaggctggagtacagtggtacagtcatagctcactgtaagctccagctactgggctcaagcattcctcccacctcagcctcccaaggagctggggattatatgcatgagccaccatgcttgcctattaatttttttttttttttttttttttttttttttttttaagaaatggagtgtccctatattgcccaggctggtctcgaatttttggccttaggcattctcctgtctcagcctctaattgctacttcctggtatattggatttaggccttatttattaaccattaaccataagccaaggaagctgaggatttacctgtctcctcactcccttactcccaccacaaacatgcacattttctgctctccaatctcctcgctagtaattatgtcacaattttggttaggttgtattcagggtttacactataagattttaaggactgtataaatactcttcacagctatgttattgtgataccttgcctttcctgctgaacattttgtttttcttggagtaaataatcgcatttttagggggatggggctggacttgattttattatgtaattattcccaggtcaacagtaaaggttacttaaattttcttaatctcctttcagcgtgtctggccttctagatattccgtcactttcatcttgaaggaattgctccttgagccctctgacactattccactctaagcgtgttgctctctgggcttgctgcactgatgttttgggctttttcctccccatcatcctgggaattctttttgcctcttactgtgttggatcttcttatttcctgaattctacatctgtgtttttgttttacttccttcctttagtgaaacacattctagtagcattttttattttaatttttttctaaatttttaaaaattgaggccgtacacggtggctcaggcctgtaatcccaggtctttgggaggctgaggcaggcagatgacctgaggccaggagttcaagaccagcctgggcaatatggtgaaaccccgtctctactaaaaatacaaaaattgaccaggtatggtgccactcacctgtaatcccagccactcgggaggctgaggcacaaaactcacttgaactagggagacagaggttcagtaagcgtggatcactcccctgcactccagcctgggcgacagaggagtctctgtctcaaagatcaagaagcagagaaacaaacaaaaagtacaaagatgtgcacagaaaatgacacacaactcaaacgtgaaggaaaaagatttttctgcagcagaatacggtttatcaagtgccttagcaccacggatgaaactagacaaattctaagccatattatcatgaattttcaaaacattggagccaaaggaaaaatcttacatgctatcagaggttgggagaaacaggtgttacatgaatattcaagagttaaatggggccgtggctcacgcctataatcccagcactttgggaggccaaggtgggagaattacttgagcccaggagttcaagaccagcctgggcaaaaaagtgagacctgtctcaatttttttttttttttttgagatggagtcttgctgtgtcatccaggctggagtgcagtggtgtgatctcggctcactgcaagctccgcctcccaggttcatgccattctcctgcctgagcctcctgagtagctgggactacaggcaccagccaccacgcctggctaattttttgtattttttagtagagacggggtttcaccatgttagccaggatggtctcaatctcctgacctcgtgatctgcccacctcaacctcccaaagtgctgggattacaaggtgagccactgcgcctggcctattctttttttttttttttgagacggagtctcactgtgtcacccaggctggagtgcagtggcactgtctctgatctcagctcacctcaacctccacctcccaggttcaagcaattctcctgcctcagcccgctgagtagctgggattacaggtgcgtgccaccatgcctggctaatttttgtatttttgtaggaataggggttttgccatgttggccagtctggtcttgaactcctgaccttaggtaatctgcccacctccgaaagtgctgggattataggcatgaaccaccacgcccaaccttcatttactcttaaaattgaactttctcaggctctttttttccccccttctcttctaatgcctttcacaccaccatttgcttaaaaggaagctttcatgtgtccaaggtatagattacgatgttgtctttgcagctgttgatcaagaacaaatcttacataagattgctctgagcatctgcttccttttctctctgtgacctaaactctccccttcctggcaaccagaatggagatcatcagttagaaaatattgaataattgtgaaatatttaaatagagattagtttaatttgaaatgtacaagtattcagcatatgctatttatatatgtgcgttcatggatgtttgtgtatgtggtcttgtgtgtgtgtgtgtgtgtgtgtgtgtgtttctcttgatccaccaccaccccattcaccagcctgacaggggacagtgtttccagaaggaatgtaattcatgcgcatttttttcatgttaagttttataagaagaccaaacagctgccagtcctaggaaaatgctgtgaagagatccagccacatcagtggaagccacctatagagagagaagaacaccggctcccattctggttaaaggtacagccctcttcctcgaagtctgtaggaggcagaaggtcactgaaagttctgagagaatatcaagggcttccttaatcgtctaatgctttagttgtagaactaggactttagaaatcttcctgattcacctttcttcccttacttttctgcccttctctgggtgattctacagcattttcaaaataataggtaaaataataatttgctaaaggaaattcacagaagtttctaaagtgtataattagaatgtggtctttgtagatttgatatgcagagagacccttcttggaaagatgccttgagactgtctaaggtctctaaaacctagaaagccctattgtttttcccaaattctttttttgttgttgttttgttttgtttttgagacagagtcttgctctgtccacccaggctaaggtgcgatctcggcttctcgcaacctctgcctcccaggttcaagtgattctcctgcctccgcctcctgagtagctgggattacaggcacatgccaccacacccaactaatttttgtatttttagtagagacggggtttcaccgtgttggtcaggctcatcctgaactcctgacctcaagtgatctgcccacttcagcctcccaaagtgctgggattacaggcgtgagccactgtgccaagcctctttttcccaaattctgacatatgctggatcagagtgttcttgtttccaataggccagtctgccatccatccaggaagaactgcggcacatggctgatggtgctagagaggtaggaaatatgactggaaccactgagatcaactcagatcgaagcctagaaaaagacaatttggagttggggagtgaatctcggtacccactgctattgcctaagggtgtagtcctgaaactgaagccagttgccacccgtttccccaggaaggcttggagacagaagcgttcatcagtcctgaagcccctccttatccaacccagcccctctctccagcccagcttcaaccctgggaaaacaccagcccgatcaactcattcagaagcccctccgagcaaaatggtgctccggattcctcacccaatacagccagccactgttttacagacagttccaggtgtccctccactgggggtcagtggaggtgagagttttgagtctcctgcagcactgcctgctgtgccccctgaggccaggacaagcttccctctgtctgagtcccagactttgctctcttctgcccctgtgcccaaggtaatgctgccctcccttgccccttctaagtttcgaaagccatatgtgagacggagaccctcaaagagaagaggagtcaaggcctctccctgtatgaaacctgcccctgttatccaccaccctgcatctgttatcttcactgttcctgctaccactgtgaagattgtgagccttggcggtggctgtaacatgatccagcctgtcaatgcggctgtggcccagagtccccagactattcccatcactaccctcttggttaaccctacttccttcccctgtccattgaaccagtcccttgtggcctcctctgtctcacccttaattgtttctggcaattctgtgaatcttcctataccatccacccctgaagataaggcccacgtgaatgtggacattgcttgtgctgtggctgatggggaaaatgcctttcagggcctagaacccaaattagagccccaggaactatctcctctctctgctactgttttcccgaaagtggaacatagcccagggcctccactagcagatgcagagtgccaagaaggattgtcagagaatagtgcctgtcgctggaccgttgtgaaaacagaggaggggaggcaagctctggagccgctccctcagggcatccaggagtctctaaacaaccctacccctggggatttagaggaaattgtcaagatggaacctgaagaagctagagaggaaatcagtggatcccctgagcgtgatatttgtgatgacatcaaagtggaacatgctgtggaattggacactggtgccccaagcgaggagttgagcagtgctggagaagtaacgaaacagacagtcttacagaaggaagaggagaggagtcagccaactaaaaccccttcatcttctcaagagccccctgatgaaggaacctcagggacagatgtgaacaaaggatcatcaaagaatgctttgtcctcaatggatcctgaagtgaggcttagtagccccccagggaagccagaagattcatccagtgttgatggtcagtcagtggggactccagttgggccagaaactggaggagagaagaatgggccagaagaagaggaagaagaggactttgatgacctcacccaagatgaggaagatgaaatgtcatcagcttctgaggaatctgtgctttctgtcccagaactccaggtgagagctggagaatattctcaagtatttcgtggactcagtaatatgtatcacttattgatatgccacctgcttgcttgctgcactatggatagtcctaaaatcatttgtatttgatttgtgaatgcattatgggacatgattgtggagttgaggtgaaatgagatggaaaggatgaaattttacttattatattaaactcgtttacacattaaattgaatcacctgaccatactttaaatgccttaaaaaatagtaataggctgggcttggtggctcactcctgtagtcccagcactttgggaggctgaggtgggtggatcacaaggccaggagtttcagactggcctggccgacgtggtaaaaccccatctatattaaaaataacaaaaattagccaggcatggtggcggacacctgtaatccctgctgcttgggaggcagaggcaggagaattgcttgagcccgagagacagaggttgcagtgagccgagatcacgtcattgctctccagcctgggcaacagagcaaggctctgtctcaaaaaaaaaaaaaaaaaaaaaaaaaaaaaaatagtaaataactgggcacggtggctcacgcctataaatcccagcactttgggaggccaaggcgggcagatcacctgaggtcgggagttcaaaaccagcctgaccaacatgaagaaactccatccctactaaaaatacaaaattagctgggcgtagtggcacatgcctgtaatcccagctactcaggaagttgaggcaggagaattgcttgaaccggggaggcagaggttgcggtgagccacgattgcaccatctcactccagcctgaaaactatcttcaggttacagaagtttgtaaaagggaacttcttcccctctcctgctgtcaggccgaatgtcagctatcactgggatttcttttttttgtcttgttttgtgtgtggttttttctgtgttttttttttgtttgtttttgtttttgttttgagatggagtcttactctgtctcccggattggagtgcagtggcataatttcagctcactgcaacctccacctcccgggttcaagcaattctcatgcctcaacctcccaagtagctgggattacaggcatgtaccaccatgcctgactaatttctgtatttttagtagagacgtggtttcatcatgttggcgaggctggtcctgaactcctggcctcaagtgatccacccacctcggcctcccaaagtgtcaggattacaggcgtgagccactgtacctggcccattgctgggatttcataactcaaggaattcccctcaggacagctgtagtgggctccccattgtttaacttcagattatcctgatatagctttgtgttgtttgcaattcatgagccactaagagccattataagtactctttggagggttttacaggaaacaatggagaaactgacttggctggcatctgaaaggcgcatgagtcaggagggtgagtctgaagaagagaattctcaggaggagaactctgagccagaagaagaggaggaagaagaagcagaaggaatggaaagcctgcagaaagaggatgaaatgacggatgaagcagttggagactctgctgagaagcctcctacttttgcttcacctgagactgctccagaagtggagaccagcagaactccaccaggtgagctaggcaaacctatactgaaggaccattctcacttaacctcattgtctagaggacagtgtgcagggtgggtagcttataaaccaggtggaggatttccagaggaaaccctctggatctcttctgcaacacccctcccccaaaacatgtttaatgtggtatctttgtggagaacagatactcagaaatttttaattcaattctcatccgttgctagatttatattagcttcgttcactttctttcttttttttatttttttattttttttttgagacggagtcttgctctgtcgcccaggctggagtgcagtggtgcgatcttggctcactgcaacctctgcctcccaggttcaagcgattctcctgcctcaccctcctgagtagctgggattacaggcatctgcccccacacccagctaatttttgtatttttagtagagatggggttttaccatgttggtcaggctggtatcgaactcctaaccttatgatccacccgcctcggcctcccagagtgctgggattacaggcgtgagccactgtgcctggcagttcactttgttaaactgattgttaccttatctgtcatgtgtggggctaagacccatgtttatttcagaaaacactgcttgttcctcatcaagacatagtctctcaaaagcactacagaagccacacttgctctttagacttcctttctcaatatgaagtagctgattatcttgttgtcatcccaattaaggcagttacactgcagactctgcgtagaactgacttgacggacttagttctcataccattttcccaaaaaccttttccttgaattgctccataatattgaataggatttggctggggtggtgcatgtggtggaatgggaagaacacaggttgcagggacagggaaacaatccttttcatgtgtgctacaaggagagagcatcaaagctgctggaaaaggccggaacaatcatcgagctcgcaacaagcggggaagtcgggctcgggccagcaaggacacctccaagctgctgttgctgtatgatgaggacattctcgagcgagatccactcagggagcagaaggacttggcctttgcccaagcttatctgaccagggtaggcaaatgctgcttcctgttattgccagtctctatgaatgtggctgcttcttcaagggagatgtttttcaacataaagtctgtttttcaggctatgcaacaggcttcatattcctctatcttggcttttctggcaaaagatctctgtgacagaaccacaaggagacatagaattcaatcataagtatgtttattgttagtaccctgccatcatccttctgttgaccagagattggcagaaagatgataccaccatcatcagtgggaggttgtgactttactgggtgcgctgataaggacctttatagaacctttggcttgagaagaaagatagtgggtacactggccagcaagtggatttcaggaaaatacattgctcttaagacatgaaccagctgggcgtggtggctgacacctataatcccagcactttgggaggccgaggtgggtggatcacctgaggtcaggagttagagaccagcctgaccaacatggtgaaaccctgtctctactaaaatacaaaaattagccgggtgtggtggtgggcgcctgtaatcctagctacgggggaggctgaggcacaagaatcacttgaacctgggagacggagtttgcagtgagccgagatcgcaccactgcactccagccttggtgacagggcgacactctgtctcaaaaaaaaaaaaaaaatgaaccaggctgggcgctgtggcccttgcatataatgccagcactttgggaggctggggtaggaggatccttgagtccaggagttcaagacaagacaagcctgggcaacacaggagacctccatctctacaaaaataaaaaaaaaatagtgagctaagcatggtggtgcatgcctgtggtcctaggtactttgggagtctgaggtgggaggatcacttgggcccaggtggttgagactgcagtgagccatgattgcatcagtgcactccatcctgggcaacagaatgagaccctgtctcaaaaaaaaaaaaaaaaaaaaaaaccacacataagctaaccacttcttggtagtgtcctggagaactgtgtccttctcttggtaaccacctgattcctttatccccctggaaagcagaatactggcaatgatagtcatagctttttcttatctcctaatgttttactgacattcctaacttatgtattatttactctcaaattacgcccatgctgaaatacatgtacaaacacatgttacctatttcattatggggctgtaatcagtaaggaaaggttagggctgtgacctagagaaaagcattgcttggttttgtgggtagaactgtggaacgtggaagatgatttttcacttgctcactcccagaaaaagatctttaccttgcctattgctctgtgtcttccattaacagtcagatgttaagatctgttggaggcacagcctctgatggataattcttggagctctctaaccataaccctgccttctcccttgtacccttattgcttgttgtggcccaaataaagggtgttgatgattgaaagtcttcccgtgtaggtgcgagaagccctacaacatatccctggcaagtatgaagacttccttcaagtcatctatgaatttgagtcaagtacccagagacggacggctgtagatctctacaaaagcctgcaaattctgctccaagactggcctcagctgttgaaagactttgctgctttcctgttacctgagcaagctctggcctgtggattagtaagtgaatggggaaaaaaagtacactgggactcctgggtcagagtgagactgggattgaatggggttgaataagactctttcagtctcccagctccttccagacacacagccatcccctagcccagagtgataaaagcctctgtcttttcagggtattatctttccaatcccattctcccattttctttacatgataaatgagagggttttacctatagttgccaaaggacaccttaggtgagtcatatgctctctgcttctcactggtatcaagccagacattcatttaacaaatatttgttaggtgcctcctaactgtcaggaattcctagcaattcctgacctcaattgctaggaatatagtaattacaaaagactaaaattcctgccctcgtggagcttacgttatcatgaggaaattcagatgatactccagaaaacatatatatatatatatcatatatatatatatataatatataaaatataaattataaaaataaatataaacagcaaaatatatagtatacaatgttttatagtgatcatgttttacagaaaaataaagcaggaaaggaaactagaggggtggttttatacacagcggtctgggaaggccactgtggtatggtaacgtgaaatgttgcagaataggaggctaaacatgagggatatcccagtagtcctggacttatcgtcataaaaataggaacaaagggaggaacgggattattctaagagttttattggggttaaatgacagtggggtagttctgcatataatgtgtgatgcccattttctcttctggtattatgaggttccaatcagtgtatacgtgaacaaaaaaaaaaatttttttttttttgagatggagtttcactcttgttgcccaggctggagtgcagtggcgtgatctcggctcactgcaacctccgcctcctgggttcaagcgattttcctgcctcagcctcccgagtagccgggattacaggcatgcgccaccaccacgcctggctaattttgtatttttagtaaagacggggtttctccatgttggtcaggctggtctcgaactccagacctcaggtgatctgcccacctcgacctcccaaattgctgggattacaggtgtgagccaccacacttggccaaaaaatttttttaaagagataatgtcagccaggtatggtggctcacacctgttatcccagcactttgggaggccagcctggacaacatagcaagaccccatctttacataaaataaaaaaattaactaactgggtgtggtggtgcacacctttggtcccagctatttgggtggctgaggtgggaggaccacttgagcctgagaggttgaggcttcactcagccatgattgctccactacactccagtttgggtgacaagagcaagaccttgtctcaaaaacaaaaaagagagagacaatggccagacacagtggctggcatctgtaatcccagcactttgggaggctaaggtgggaggatcccttgtagccaggagttttgttgttgttgttttattgttgttgttttttgaggcaaagtctgactctgtcacccaggctggagtgcagtggtgtgatctctgcttactgcaacctctgcctcccaggttcaagtgattctcctgcctcagccttccgggtagcagggattacaggcatgcatgaccgcacctatctaatttatgtatttttagtagagatggggtttcaccatgttggtcaggctggtctcgaactcttgacctcaggtgatttgcctacctcggcttcccgaagtgctgggattacaggcatcagccaccacagctggcctgtagacaggagtttgagatgagcctggacaacacaggcccctgggatcctcctgcctcagcctcccaagtagctcaagctacaggtgtacaccacggcccctgcctaatttttaaatttttttgtagagacatagtctcagtatgttgctgttcttgaactcctggccttaagcgatcctcctgccttggcctcccaacatgggattacagctatgagccaccttgtgcagcctgaaagttctttgtaatataaactctaaagtatcatatgaattttggtggctgatttcacaatccttaaaacagcaaacaacttgaaatatatacatctcttgaagctgttgctcacatcttaattgctttgggtggctacccaccagtggcccaaggtggatggaggttagggttttaaattagatctcaatagttgtaaactagaattttaaaccagggttctgtcatctcttgtgtcctagtccactagttcttatccttagaaccctcaagtcctgctctagctgtatcatgactcctcttttgcccactttccactctggtagtttgaggagcagcaggcttttgagaagagccgcaagttccttcggcagctggagatttgctttgcagagaacccctcacaccaccagaagattatcaaggtcctccaaggctgtgcagactgccttccccaggagatcaccgaggtattctttcctgtcctgctttcttcctgttgtcttccgggccttaggcctttcccttgtctctttccccaacctactccatacctttttgcctctggaggctcatgggcttcctggaggagatgaaaaaggcaaggacttttcaggctcacccaaagcataaagcactgggatagggagggattgctacctgaaaccggagcctgtctgatcttcacaggctcaggaatgccatggatgtgctggaagggatgttcagcgaaggaggttctgggacctgggaggggccttacctccttgctctgcttggaatagtgccctagctggagatcagtagggtggagtggagagtggaatcattaggaatcaaatccagtattagtacccttcccctataggcagctaaggaggaagagaaagttttagtattctttgttaccaggcagagtctctgtgtgtttcccagttgactgggaaagcagaacatggaagtatgtgggattgattgggaagggcagcctagagaggctctggagacttcctctttccctctgtgactctcctcagctcaagacacagatgtggcagctcctcaagggccacgaccacctgcaggatgagttttctatcttctttgaccacttgcgcccagcagctagccggatgggtgactttgaagagatcaattggactgaggaaaaggagtatgaggtataggacctaaggctgctgtagccttatgaagggggaaggccacacgtgggagggatattggcctggtgtctgtgctcagcagcaccaactccttctcagtttgatggctttgaagaagtggccctgcctgatgtggaagaagaggaggagcctcccaagatacccacagcctcaaagaacaagaggaaaaaagagatcggggtccaaaatcatgataaggtattttctttgtttatttgtttgtttttgagacagaatctcgctctgtcacccaaactagagtgcagtggcgtaatcttggctcactgcaacctccacctcccagattcaagcgattctcccacctcagcctctcaagtagctggaattacagacaggcgccagccaccacgcccagcaaatttttgtatttttagtagagatggattttcactatgttggccaggctggtctcgaactccttacctcaagtgatccacccgcctcggcctcccaaagtgctgggattacaagtgtgagccactacgcctggcctaaaatcatgataaggtatgccaagttattgaaaattatctatgtttcatgaatcaagccttgcgttttctcactgaacatttctgtggcttactatggcccaaggtttctagttcaaaggctctaggatctgagacgatcacggagaacaaaccaaaggtcaggctgatacagacatgcagagcctttgggaaaactgcagttgttgcaggggccccaggattccctagttagaaggatttgtttcttccccttttctgtctagctcagagttattacccttaattcaacttttttcatttttgctcatgtgagaaaatagagccaattgaggatgagcttgttattaaaaaaataaaatagaaccaagattccccatattaataataatgatagcagctaatacttagttgtattacaaagtgtcaggcattctgggaagtattttaatggattattgacacatttaattctcacagtaatcctatggagagattgctcttgtttgcattttacagaagacataactgaagtgcagagaggctgttgtcagggtctcatatttagtaagtggtggtgctaggatatgaactcctcaggtaagccatctgtggagtctactggttgtcactgctcttcaagcagtattttttttttttttttttaattcgtgtttcctgaccaagcgttttttctcttttctggggagaaactgcttcttagtagctgtatgaccttgggaaacgtatttaacctctctttgtttcagtttcttcatcataaattgggatgataatggtacttacttacgtcttgggtttattaaacagtgtcactgagtaggctttccatgggtacaaagttctctctgaaggggattggaagagatgggagagctgaagtcacagagagacagaaacaaagacattatatctcatgatggagctctccagtgattttgcctcagattatgtctgacttaaatatttcttgaaacatctggggcaattgggatatgtcagtctttaggtcatttagggattgtttcagggattcataataggccttaatctagtttgggctattgatttccccaggcgatgtgaggagttgatacataaaagaggatggggtccgggcgtggtggctcatgcctgtaatcccagcattttgggaggtcgaggtgggtggatcacttgaggacaggagttcaagaccagccagagtaacattgcgaattcctatctctactaaaaatacaaaaattagccataggctaggtgctgtggcttacacctctaatgccagcactttgcaaggccaaggcgggcggattacttcaggtcaggagttcgaaaccagcctggtcaacatggcgaaatcccatctcactgaaaatacaaaaaaaattaggcttagtggcatgcgcctgtaatcccagctacttgggaggctgagacatgggaatcgcttgatcccggggagtggaagttgcgctaagctgagatcacgccactgcactccagcctgggagaaagagcgagactccatctcaaaaaaaaaaaaaaaaaaaaattagctaggcgtggtggtgcgcagtcccagctacttgggaggctgaggtgggaaaatcacttgagcccaggaggcagaggttgcagtgagccatgaatgtgacactgcactctagcctgggtgacagagccagaccttatctcaaaaaaaaaaaaaaaaaaaaagcatggggagagggtgggctgtgttgtgttcatatggctcacaactttagcttcctctcttggtaccaaaaatacggccaggcacagtggctcatgcctgtaatcctagcactttgggacgctgagggagggcagatcaagaggtcaggagttcgagaccagcctgaccaacatggtgaaaccctgtctctactaaaaatacaaaaattagctgggtgtggtggcgcatacctgtaatcccagttactcaggagcctgaggcaggagaatcccttgaacctgggaggcagaggttgcggtgagctgacatcgtgccactgcaacccagcctgggccacagagcgagactctgtctcaaaaaaaaaaaaaaaaaaaaaaacaacttggcagctaatcaagcccaagtatctcctaggagactgaatggccagatggggccaaggactgtgcctgctcctgccatgaaggaggtccagattccaagctgaagaagagcaaaaggcggagctgtagccactgtagcagcaaggtgaggaaagtatcaagggtcccgagggtatcagagctgctgggggattgtttgctaccaagaattgtaccttactgaattcctaaaaaggcacatatataaataacattcagtatacacatatgtgtacatatgcaaaataaatggaatctgctagaaatacgtgatagattttgttttttaaagagaattctgtgagtaaagcttttggaattggaaaaacaaaataccagttaaaatatttccctcagatattagaaaatgaaataaacctctgtcgtgaaaatagtctctacaagtaatcctggttctctagaatggagttggttggcaggaaaaacacagttcttggtgagagaaggagttgtggaatccaatactctattcggggccatttaaaatccttggagcagggaggcagaggttgcagtgagccatgatgataccactgagctccagcctgggtgacagagtgagaccgtgtttaaaaaaaaaaaaaatcaaatccttggaggaatagctgggcaacagggcactcaggaggctcaggtgggaggatcacttgagcccaggagtctgaggctatagtgtaccaccatggtcatgcctgtgtaaacagccactgcactccagcctgggcaagataatctgtgtcatctgagaccctgtctctgtctatcttttctttttgtttgtcatttgagacagagtctcactatgttacccaggctgatcttgaacccttaggctcaagtgatgctcacaccttagcctcccaagtaactaggtttataggcatgtaccactgcacccagttgaaactctgtcaacaaaattgttggagcagacatgcatgtgggttgacttgatgagcatcaggcagggcttcttcctttggtgggccccaaccaaagacataggcagtcagaacacctttgacccggaagaccatccctgcaggtctgtgacagcaaatcctacaagagcaaggagccccatgagttggtgggcagcagcccccaccgagaggctagtcctatgcctggtgctaaggaagctgggcagggcaaggatatgatggaagaggaagccccagaggagcgggagagcactgaggccacccagagcaggactgtcaggaccaccagaaagggagagatgcctgtttcaggtgagtgatttgccaacgcagcccttctgttcctcagtctcgttatcctgtactccagacaggaacctccatgagcctggataaatagccttttcagggatggatataccacctctttcactgatggacccataggaagcccttctgctgttcaggctttttctatcatatggcctcactcctcttgcagaattaagaatgccacaaatttcatgcaattcaacattgtcttgtgttttattccaaaaacccttccccctgtctccaaatctagtgtaatctacatcctaaagactgggccgttctcagctttggcagtaggactttatatctttgcataagtgacattatgccccccacctccacccaactcttttattatttatattttcttgtagagatggagtctcaccatattgcccaggctagtctcaaacccctggcagtcccaccactttggcttcccaaagtgcggacattataggtgtgagccaccatgcccagccctcttttttattagaatttttgcacagtacctggccacaggtaatttctcgtgcttaggtgcatcttgaacctgacagtaccctgagatccttattttcctcctaagcaggattggcagtggggagcactttgccatcccctcgagaagtgactgttacagaacggctcctcctggatggcccaccacctcattcaccagagactcctcaatttccccccacaactggagctgtactgtacactgttaagagaaaccaggttgggcctgaggttcgctcctgccccaaggcatcccccagacttcagaaagagagggagggccaaaaggcagtgagtgagtcagaggctttgatgctggtctgggatgcatcagaaactgagaaattgcctggtaccgtggaaccccctgcttccttcctgagtcctgtttcctcaaagaccagagatgcagggagaagacatgtgtccgggaaaccagacactcaagagagatggctgccctcaagcagagctcgggtgaagacaagagacaggacgtgccctgtccatgaatctccatcaggaattgacacctcagagacttctcccaaagcccctagagggggtttggctaaagacagtggaacacaggccaagggtccagagggggagcagcagccaaaggccgcagaagctacggtgtgtgccaacaacagcaaggtcagctccactggggaaaaggttgtcctgtggacaaggtaggtaagggtggatgacgtgtgtttggaaaagagcatagaccacatccatgtggctccctagggttaatcatgatacctgggttacagggaagctgaccgtgtgatcctcaccatgtgccaggagcaaggggcacagccacagaccttcaacatcatctcccagcagctgggaaataagacccctgctgaggtaggtgcgggttggggtgaagacctggcaaaaagaggtcaaggtggccaactaacagacagaaaggccaaagaaggagttttgatatccaagataataagtggtttttgtaaaggtttgatctaaggaaaggcttgactcatcagggtggtagtggttctagaagagaaaggacactagattttgaggatttttaaatttttatttatttatgtattttagacgcagtttcacttgtcgcctaggctggagtgcagtggcacaatctcagctcactacaacctccacctcccaggttcaagtgattgtcctgcctcagcctctcccaaagtagctgggattacaggcacccaccaccatgccaggctaatttatttatttttagtagacacggggtttcaccatgttggcaaggctagtcttgaactcctgacctcaggttatccacctgcctcagcctcccaaagtgctgggaataggtgagatactgcgcccggccaggattttaaagtggaagccccagtttccattccagttttgtttttaggagttgtgtgactttgggcaaaacatttagcctcttgagtttccttatctataatgacatagctctcccaaccttgctgtgaggaataaacaagagatttttcaaatcagtatattgtgcttcataaatgttaacattgttacaaagcatcagtgaggctgggcgcagtggttcattcctgtaatcccaacactttgggaggccgaggtgggtggatcacctgaggtcaggaatttgagaccagcctggccaacatggtgaaaccccatctctactaaaaatataaaaactagtcaggtgtggtggtgggcacctgtaatcccagctactctgaaggctgaggcaggagaattgcttgaacccaggagacggaggttgcagtaagctgacacagtgccactgcactccagtctcagcaacagagagagactccgtctcaaaaacaaaaaaaaaagaccagtgaatacagccctcctcctttcttaggtttcccaccgttttcgagaactcatgcagctcttccacactgcctgtgaagccagctctgaggatgaggatgatgcaaccagtaccagcaatgcagaccagctgtctgaccatggggaccttctgtctgaagaggagctggatgaatgagactctgggaatcatctacacaggaccaaacccaacaggcgccctggcaccggggagggggtagttgtactctgcttgtacagtccttgagcccagtttacagatctggagagcaggaggccaggacaaggacaaaggctggaggatggagtaggacccaggggctctgccatcctaggcatcattcaaggtcttttatgaagactttacagatgtcctctgtaaatagcatcgagagtggagttcagctcctttctctacttttttttggtctgatggcacatatttattgttctgtggtctaatcacagtgtttctaaatgtaaaaagtgcatatgttggtgtagctagtcccgcgacattgagctcctctgcatgaagacactgggctcctgcatccagctgtttttattgcaaactagctcctttctcccacactgggaactttagtccacgaggctgtcaccaccctggtagcactgggccaggctttgtagctcctgcagcagctctgctacgtcatcgtgctccactccagcatccatgaagctggcccagcgccgcaagtcgagtttggtgaggtctctggccaaggcttccagggtctggtgcagggacgaagaggaacacagtgccccaaacactgggatgctctccactgctgtggagggagaggaaacagagacctgtagatggatgattattctgccctgggactcgccaaactgataaggaagtccaaccttagtagacttgattgtaaactcaacaaatttggtgtattgtccccttagtacaccagtactccagaggaagaatgcttttcttgggagccatagggtgaataaaggaatgtttaactgtgga

SEQ ID NO: 15597 - DNA, 37146 bp, Homo sapiens
ctatgatgaaagcagccatcagtgagacggaagatatgccaatgtttgtgagtagttgattatcactcttttaatgtcttggaacagagttatctctaaactggctaagggtaggaggtcacttaggagtttgtaaacagtttggcagctggggttaaagttagcatttcaaaacataagaattacttggtaatttttacttattttatttgttattttattattattattattttattattattatttttttttgagacggagtcttactctgtcacccaggctggagcgcagtggcgcgatcttggctcattgcaagctccgcctcccgggttcaggccattgtcctgcctcagcctcctgagtagctgggactacaggggcctgcaaccacgcccggctaattttttgtatttttaatagagacggggtttcaccacgttagccaggacggtctcgatctcctgaccttgtgatccgcccgcctcggcctcccaaagtgctgggattacaggcgtgagccaccgcgcccggccttgttattttattattattatttttttagagacagggtcttgctctgtcaccaaggctggactcaaactcctaagctggactcagcgatcctcccagttcagcctcttgagtagctgggactacaggaacatgcgactatgcccagctaatttaaaacaatttttttgtagggagggtgtctcactctgttgctcaggctggtctcaaactccttgcctcaagccatcctcccaccttggcccctaaagtgctaggattataggcatgagccacctcactgagctgtgatttttattgaggatttcctttctgtttttttctccttaggagcctaaaatgacacgctctaaactgaaggaagtagtggaaaaaggagtggtaagtattctgtttttttgttgttggtttttttttagcttggtgaataggatctaattcacccatagggaaaaatataggaaagattgtggtctgaatttgcctctttaaagaaatatttataaaagacagtagaattgtttctacatgatcataagctatgataatcatagtttattttagtagatatgaagcattgctttttggaattgctagatagataaccatttggaatagttgaaatcaataggtgagaccagtttttctatttatgttacaacacatgttgcaaagtgtttagtatttttcatagtgtgttccaggggccagttgcataaaaatcactttggtgtgggatccctcaggcatgcttattaaaaatgcatacttttggctgggtgtagtggctcatgcctgtaatcccagcactttgggaggccgaggcagatggatcacttgaagtcaggagttcgagaccagcctggccaacatagtgaaactctgtctctactaaaaatacaaaaattagctgggtgtggtggtgtgcgcctataatcccagctgcttgggaggctgaggcacaagaatcacttgaacccgggggcggaggttgcagtgagtggagattgcaccactgcactacagcctgggcaacggagtgaaactgtctcaaaaaaacaaaaacaaacaaaaaaatctccatacttttgagcccaccccagacctgagaatcaggacccatgggcagggccttggaatatgcattggcaaaaacacaacagttaattcttttgaatactaaagtgttgagaaccacttgaagacatctgaagtattctgtgcagcaagctctttggtgcttggagctgtgctatatccttcttaataagcacttgactagtttgtgcttacaaggcaggtaatagtcatgagggagttcattatatttctgatagtaaggaagatttgccttacagaccgaaaatatgtatcataggttttatctgtcctggttttattccttggagactgatagaagaaacaggtctaggctgggcttggtggctcatgcctgtaatcccagcactttgggaggtggaggtaggaagattgcttgaagccaggagttcaagaccagcctgggcaacgtaatgagaccgagaccttgtctagaaaaaaaagcaagaaaaggaattggtgtattcttccacattacttttcctacagttgaagaaaactagtatgttatttcataacattcttttcttggctatacatcccccaatttctccccccctttttattttgggagtcttgcttcatcgtccaggctggagtgcagtggcacaattctggctcactgcaacctctgcctcccaagctcaagtgattctcctgcctcagcctcctgagtagctgggattacaggtgcgtgccaccatgcccggctaatttttttgtattttttaaaatttttattagagatggggttgcaccatgtttggccagcctggtttcaaactcctgacctcaaatcatctgcccgccttggcctcccaaagtactgggattacaggcatgagccactgtgcctggcctttttgttttgagatggagtctcactctgtcacctaggctggagtgcagtggtgcgatctcagctcactgcaacctctggctcccaggttcaagcgattctcatgcctcagcctgctgagtagctgggattataggcatgcaccaccacacgcatctaatttttgtagttttagtagagatggggtttcaccatgttggccaggctggtttccaattgacccatgtgatcgcccgccttgtcctcccaatgtgctaggattacaggcgtgagccactgtgcccgtcccatatccttttaaaagtatgccaaaagaagactctactgaaccagatatggtttgactagtagttagattatctccacagtgttccagattacatatttctcctaatgtagcctaaggtcaaattgacctttgtttttggcaatcacatcactttttttggtctggttgactaactcttgttgcataaattgaaatttcatctttctctaggatgtgttcacaaatgaataggtggtagctatgatgaaagcagccatcagtgaggaagttctatgaagtctacttgacatatagaatataattaacatggctgggcacggtggctcatgcctgtaatcccagcactttgggaggccgaggcagctggatcacctgaggtcaggagtttgagaccagcctggccaacatggcgaaaccccgtctctactaaaaatacaacagttagctgggcgtgtggtgggcgcctgtaatcccagctacagagacgagaggatcgcttgaactcaggagggagaggttgcagtgagcggagaccatgccactgcactccagcctgggtgatagagcaagactctgtcttaaaaaaaaaaaagaatataattaacattaattctttatttgatttggggaaaaaaaatccaaggagatcaaattaggctctgaattatgtttattggccatgaatatagatgtggagaagttgggccatccaagacggtatagtttacgtaggagagcaagtattaaaatgtaggtctcttgcttcttaattctttctttttttttttttttttttcagtgacttgctctgttgctcaggctagagtacagtggcctaatcatagctcactgcagccttgaactccttcctgtgctcaagggatcttcctgccttagcctcgcagacagctaggcctataggcatgtgccaccatgtccagctaattggtttttttgaaacattcttttgtagaaatagggtcttaatgtgttgcccaggctgaactcaaactcctgggctcaagtgatccttctgccttgatctcccaacatggggggattacaggcatgagccgctatacttggccttcttaattcttactagactgactccaacacacttctgaatgctggcttgcctttctaatggatttggcagtaggtaggaaagggaaatgggcctgaatcacatcattccctttaccctatattggtcccacctacacagcactagataaatggtcagaacatagcagggctgatttgatttgagaagctaagactccttttagagacagaacctaatggccagttggcttttgttcataaggtgcttttggttgggttacaattaaatggtcaagaaattatacatcctcaatggcattttatcagcagtatataagaactttaaaaaagttctttaggctagatgtggtggctcacacctataatcccagtgctttgagaggctaaggtgggaggattgtttgagcccaggattttgagaccagcctgggaaacctaatgagactccatctctacaaaaaatttaaaaaattagtgaggcctggtgaggaggcatgcctgtagtcctagctaattagtaggctgaggcaggaggatcgcttgagctcaggaatttgaggctgcagtgagctctgattgtgctgctgctctagcctaggcaacagggcaagatcctgtctcaaaacaaaaacaaaaacaagaaaaactttccccctagctcttataaaaattttcaaacattcaaaaagttgaaagattgttacaatgaatctaaattccaagagtaatattttgccatatttgctttatatctctctgtgttgttttttcctgtactattggaaaaataagtgtggacaacatgaaactttgccctaaatgccctggtaaaagcttttttttttttttttttttttaagaaaaaaaaaagcccataggcagagcagggctaccccataggcagaatagtccataaaagcttttcatggctggctttttggagttgtacttatggtggattcatgtaactgattacaaaaatatattgctgttaaaagactactgtaaccaaaatatcttaggtttgtgtagtttaatagtttataaatagttgtcacatctgttgttccatgtaaaccgcagctgtgatatgaacaaggtagacattgttttcttcatttatagaaagaagtgaggcttaccaggtgtaaggcagaaatgctaatgacagtaatagattctttcctggtttcttctttctaactctgacaaataattgagagtataccctcagggataatcaacacctctagatcactgcagttacttgttaagtatatggctgttagtgatggtacagaggaagtaaacatgaaaaacaattatttcagttaagataacttaattatttatattctttgttggtaggtaattccaacatggaatatttcaccaattaagaaggccaatgaaattaaggtaaacttggaagaaataattgttattcttttccagaaagacttcatcggttttgaaacttaagtacttcctctttaacttttcttgatcaatctttgttttaattccagctttgtttttttccattctattactcttaggtttgtatctcatggaattcactttaacctctgcctcgtgttatttgctttagctgtacattatgctcttaggattttttttttttctgccctgcttcttccccttattttccaaatacgtatgatttgtgtttcccattacttcatttctttctaattgtactaatgtagcctcctcagtttgtggatatccaccttgaagaagatgattcctcagatgaagaataccagccggatgatgaagaagaagatgaaactgctgaagaggtcagtgaatgttagttggtaatatttgtcttaatagagcagggtatactttgcttccttagtaatgtcacttgtagagaggattgagacatggttcttttttcagctcatttctgtgctttaagctgtttttctgccctttatactcccttaattttagaatttgttgtattatgaaatacagcatagaaacgtgcatagaataaaaatgtatagctttggttattataatgcaaatcctcatgaaactcatagcaaagtcaagaaatatatcattactaggacaacccctgtataccctccccagtcacaatcacctccctccccctaaaaataaccactaccctgccttttagtaattatttctttgcttttctttatagttgtatcacctcaatatgtatctctacacactgtagttcaattgttactgttttgaactttatataaatggacccatgtttatatgttttgttcctagctttttaaaattcaacattaagcttttgagattcatttatactattggttttagctatacttcgttccctttcattgctgtgttaatatgttctttgacttgtttcttaatgtgttctttgaattgttttgtaaaaggattttagaccaaggccttacactttgtaatgcagattaggatagtgatctgatccctgtccccacctttaggattttttttttgagtctcctctgttgcccatggagtgcagtgtgcgatgttggctcactgccatctccatctcccgggttcaggcaagtctcctgcctcagcctcctgagtagctggaattaacaggcgtgcgctaccatgcctggctaatttttgtatttttagtagagatggggtttcgccatgttggccaggctggtctcggacttctgacctcaagtgatccacccgcctcggccttccaaagtgctgggattacaggcataagacactgactgcacctggcctttaagtttctatttaaattttattttctgttactgtaactagttgagtgatggattttatttatttatttatttatttttgagacagagtctcgctctgccacccaggctggagtgcagtggcgtgatctcggctcactgcaacctccatctcctggattcaagtgatactcctgcctcagcctcccgagtagctgggattacaggtgcacgccaccgcgcctggcttatttttgtatttttagcagagacgggtgttcaccatgttggccaggctgagtgattgatattttatgattccttctcttgagatacttcagactttgtggaatgaggtaggggcataaatattaaggcgaactggatttattttgtagagcttattggaaagtgatgttgaaagcactgcttcatctccacgtggggcaaagaaatccagattgaggcagtcttctgagatgactgaaacagatgaggagagtggcatattatcagaggtaaatcggcatcatacaaaagagatgttagacataactgtctaagtagattttttaactgtataagtagattatttatccatggtgattctgggctgtcaccctttttcaaagtttcttaagttagtaaacagttcagagaaggctagaactcagtgatagccaaagaacttttctgagttctcattaaggggccaaaaatgtgcaactagcagagtttcttttctcctacccttctcttctttcatatctgtgctttttaatattgtcctaaagccattgttattaatttcccacattttggtaaactaagtagcattctgttgacttctctagaaataggatgaaaactaattagatcaatacacttggtgtctttgtttttatgtaactctaactagagaagagaaaggacaatggtgtatggaaagtctgcctctttttccctctctttttttcctttttttgctttctctttctttcttacctccttccttttttgatgcagtcacctcttttaatcaggctgagaaagtcaccacaccagccatcaggcacatcagtgctgaggtagtgcccatggggcccccgccccctccaaagccgaaacagaccagagatagtactttcatggagaagttacatgcggtagatgaggagctggcttccagtccagtctgcatggattctttccaggtaaatattaaaactgtacttaactgagaaagtcaagtggagtaatgtagttgttgctcaggctgggaagggagaggaaaagataactacaattttatataagtaagagttagtctttgatactttgtatttggctagtgctattttctgctcaaagtgacaatggcagtttggggttttttttgtttgtttgtttgtttttgagacagggtatcaccctgtcacccaggcttgagtgcagtggtgtgatcttggcccactgcaacctccgcctcccagactcaagtgatcttcccacctcagcctcccgaataggtgggacaggtatatgccaccacacctggctaatattttagttttttgtagagatgaggtctccctatatttttgctcaggctggtattgaactcctgggctcaagtgatcctcccaccttagcctctcaaagtggtaggactactggtgtgaaccaccgtgcctggctgagaatggcagtttctaaggaagaaatgaactatgtagcagagagcattttaaaatgtagaacataggaaaaagcttcacccaaattcccccaaattaaccttttaccacaattgcttgatggttctcttcctctttctctgtatatacacatagtgttttctaaatcattttagagtgtgatgcaggcatgatgccattttacctctgcatgcttttgtgtatattttctaaaaatgagtttattatcttgtattaacacagtataatagtgttaatcaaaatcaggatacaggctgtgcgctgtggctcatgcctgtaatcctagcactttgagaggccaaggttggtggatcacttgaggtcaggagttcgagaccagcctggccaacatggtgaaacccccatctcgactgaaaatacaaaaatttgccaggtgtcgtggcgcatgcctgtaatcccagctacttgggaagctgaggcaggagaatcgcttgaacccgggaggcagaggttgcagtgagctgagattgcgccactgcactccagcctgggcaatggagagagactctgtcccaaaaaaaaaaaaaaatcaggatacagtaatattacataatatattaaagtgcttattctggttttatctgttgtcccaacaatgccctttatgttggaggaaaaaaatttttttttccctattcagcattcaaccctggattaaatatctatttaattatcttgttctttagtctcctttaatctggaacagtttctcagtctttgtcttttataaccttgacagttttgaggagtatgcaccatttattttgtagaatgttcttcaatttttatttttctaatatttcctcttagattcaggttttgcacttttgttacaaatactggaagagtgatgtgtgtttctcattgcatcatatcagaaggcacgtgatccctgtaatgttaactttcatcacttggttaaggtggtgtgtgcttggttttcccattgtaaagttattattttccatttttaattagtatatatcatgtggggatatacttcaaagccgaattcctttctttctgtttttttttcctagatggagtctcactctcttgcccaggctggagtgcagtggcgcgacctcagctcactgcacctctgcttcctgggttcaagtgattctcctgcgttagcctcctgagtagctgggattacaggtgcccaccaccacgcctggctaatttttgtattttttagtagaaatggagtttcactgtgttagccaggatgatcttgatctcctgacccgcctcagcctcccaaagtgctgagatgacatgcgtcagccaccgcgcccagccttctttttttttttttttttttttttttgagacagagtcttgcctgtctcccaggctggagtgcagtggtgccatcttgggtcactgcaacctccacttcggggttcaagcgattctcctgcctcagcctcctgagtagctgggattacaggtgactgacaccacacccagctaattttttgtatttttagtagagatggggtttcaccacattggccaggctggtctcgaactcctgacctcaagtgatctgcccaccttagcctcccagagtgctgggattacagacgtgagccaatgcacccagcccaatcaatcaaattatttttctcacactaatattagcatccattgattattctttcttttttttttttttttttttttttttgagacggagtcttgctctgtcctctaggctggagtgcagtggtgcgatctcggctcactgcaagctccgcctcccaggttcacatcattctactgcctcagcctcccgagtagctgggactacaggcgcccgcaccatgcgcggctaattttttgtatttttagtagagatgggggtttcaccgtgttagccaggatggtcttgatctcctgacctcatgatccacttgcctcggcctcccaaaatgctgggattacgggcgtgaaccaccacgcttggcctgattttctttcttgaaacagtctttactatggtcgttgtcaaatgatgactttgtaattctaacatttagtgagtaattttttattttttggatatggagtcacagtctgtcacgcaggctggagttcggtggtgtgatctcagctgactgcaacatctgatctgcctcccgggttcaagcagttctcgtgcctcagcctcctgagtagctgggaccagaggcacacaccactacgccagctaattttttgtattttttagtagagacagggttttattgttggccaggctggttttgaactggccttaggtgatccacccttgtcaacctcctaagtgctgggattataggcatgagccactgcgcctggccttagccagtaaattttttttttttttttttgagacggagtctcactctgtcgcccaggctggagtgtgatggcgtgatctcggctcactgcaagctctgcctcccaggttcatgtcattctactgcctcagcctcccgagtagctgggactacaggcgtgcacaccatgcccggctaattttttgtattttttggtagagacggggtttcactgtgttagccaggatggtctcgatctcctgacctcatgatccgcctgccttggcctcccaaagtgctaggattacaggcgtgagccaccatgcctggccttagccagtaaattttaatgttccaagtttcccctatcattcttgcaggtcaatgaaaaatgtctgtcctaaaattttaaagtatgatataataatttaaaaagaaatcctaaaattaaaaaatataattaaggctgggtgtggtggctcacacctgtaatcccagcactttgagaggcccaggcgggtggatcacccgaggtcaggtttgagaccagcctggtcaacatggtgaaaccccgtctccactaaaaatacaaaaattagctgggcattgtggcaagtgcctgtaatcccagctactcgggaggctgcggcacgaaaatcgctttaacccaggaagcggaggttgcagtgagccgagatggcgccagtgcactccagcctgggtgacagagcaagactacatttcaaaaatatatatatatatataattatatatatatataatttataattatatatgtatataatttataattatatatgtatataatttataattatatatgtatataatttataattatatatatgtatataatttataattatatataagtatataatttataattatatataagtatataatttataattatatataagtatataatttataattatatataagtatataatttataattatatataagtatataatttataagtatatataagtatataatttataagtatatataagtatataatttataagtatatataagtatataatttataagtatatataagtatataatttataagtatatataagtatataatttataagtatatataagtatataatttataagtatatataagtatataatttataagtatatataagtatataatttataagtatataatttataattatatataagtatataattaaaaatagaatattgaatggaatagctctgagtcatttaatcaccatgctttggagtatgtagtagtaggagcagtaatagttttttatgtaatcatttatttaccaaacacatactgaatggttgaagttgagaaacaacagtgtagaagacagaaaaaattgttcttcatggaacttagtctgttgaggagagatagactataaacatataaacaagtaaattcggatgtggttaagtgctatgaactaaattaaaatgaggaaatatgaaacttcctgtcagagaactttagataggctgatcaaaaaagacctccttggctgtaattccatcactttgggagtcctaggctagaagattgcttgaggctaggagtttgagaccagcctaggcaatatagtgagactccatctctccaaaaactcagaaaaattatataggtgtggtggcgcatgcctgtattcttagctgcttggtggctgaagcaggaggattgattaagcctgggagcttgagactacagtgagccatgactgcacccctatactccagcatgggtaatagtatgagaacttttttaaaaaaaattttaaaaaacagggtccggtttggtggcttatgtccataatcccaacactttaggaggccaaggagagtggatcacttgagcccaggaggtcaagacaagcctgggtaacctagtgagaccttgtccctaccaaaaaaaacacaaaacttagctgggcatcctgttacacacctgtagcctcagctacttgggaggctgagcctaggagatcgaggctgcagtgagctgtgatcatgctacagcactctagcctgggccacagagcaagactgtcaaaaaaacaaaaaacaaaaagaaaaaaggcctctttgaggagatggcatttaaactgagatccgaatgagaggaagccaggcatgtaaaagatctggggagaaaaagtgctccatatggaagaaacagcacattctaagtcgctaagatagaaacaaccttggcatggttaaggaacagaaactacatgaagggtgggatcgtgaaaaagaggtagaaatgaggtcagagagcaaggcaagagctagatcatgaaggtcttaggaaaccatgataaggggtgtagattttattttaaacattagaacagatgcccagtgtggtggctcatgcctgtaatcccagcactttgggaggccgaggcgggtggatcacctgaggtcaggagttctagaccagcctggccaacatggtaaaaccccatctctaacaaaaaatacaaaaaatgtcctgggtgtggtggcgcacacctgtaatcccagttacttaggaggctgaggcaggagaatcgcttgaatgtggggagtggaggttgcagtgagctgagatcatgcccctgcactccagtctaggaaagagtgagactccatctcaaaaaaaaaaaaaaataaataaataagaaaagatttttgtgatatttttggattaatgttaaaaattccttttggttaacgtgtgggaaatggactagagtaaagcaagagggtaaacagaaacccattagcaggttgatgcagtgtagtctagggagagcttcccaaattgatctacagattcaatgcagtccctatccaaatcccagctaccatttttgtggaaattaacagtctaatcctaaaattcatgtggaattgcacaggcccagaatagccaaaacagtctttaaaaagtacaaagatggaggtctcacactttctgattttcttttttttttttttttttttttgagacggagtctggctctgtcacccagactggagtgcagtagtgcgatctcggctcactgcaagctctgcctcccgggttcatgccattgtcctgcctcagcctcctgagtagctgggactacaggcgcctgccaccatgcccagctaattttttgtattttttatagagacggggtttcactgttagccaggaagttcttgatcttctgacctcgtgatccgcccaccttgtcctcccaaagtctgggattacaggtgtgagccactgcacccagcctcatttttttaaaataaatattttaaataagagtcttgctctgttgcccaggctggagtgcagtggtatgatctcagcttgctgcagcctcaacctcctcctgtgttcaagtgatcctcccacgttggctcttgcatagctggaactacaggcatatgccaccactcccatctaactttttattttttgtagagatgggggtcttgctgtgttgcccagctggtcttgaactcctagactcaagcgatcttgtcaccacagcctatcaaggtgctgggtttacagatgtacaaatgtgagcctctgtgcctggccctgttttttttttttttttgagatgtctctcttgcttaggttggagtacaatggtgcaatcatggctcactacagccttgatctcctagtctcaagagatccttctctttcagcctcctaagtagctgggactacaattggtgccaccacacgcaactaatttgtttgtttgtggcagagatgaggtctcactgtgttacccaggctggtctcaaactcctagcttcaagcagttcttcctgggcctcccacagtgttgggattgcaggtgtgagccaatgcattcagccagcggtattatacttaattgccccacagtggaaacaatctgaattccatcaacagataattggataaacaaaagtggtatatctatacaatgggatattattgggtgaaaaaaggaattcggggccaggcatggtgactggagtgcagtggtacgtgtctcactgtcaccttgaactcctaaacccaagcaattctcctgactcagcctcttgagtagctggtaccacaggcacataccaccatgcctttaatcccagcagttaggaaggccaaggcaggaggattacttgagcccagtccaggagtttgaaacttgcctgggcaacatagggagtccccccacccccatctctacaaaaaatgaaaaaaattagctgagtatggatccagtggctcacacgtgtaatcccaacactttgggaggctgagcaggtaggtcacctgaggtcaggaattcaagacaagcctggccaaccccatttctactaaaaatacaaaaatttgccaggtgtggtggcacacgcctgtagtcccaactatttgggaggctgaggcaggagaatcacccgaacccgggagatggaggttgcagtgatccgagatcgtaccactgcactccagaatgggtgacagagcaagactccatctaaaaaaaaaaaaaaaaattagccgagcatggtagagcatgccgatagtcccagctacttgggaggctgaggcaggagaattgcttgagcccaggagttcgaagctgcagtcagctctgattgtgccagtgctgtagcctgggtgagagattgagactctatctcttaaaaaaaaaaaaaaaaacaccaggcatggtggctcacagctgtaatccgaacactttgggaggctgaggtgggcagatacctgaggtcaggacttcgagaccagcgtgcccaacatggtgaagctccgtttctagtaaaaatacaaaaattagtcagatgtcgtggctggtgcctgtaatcccagctccctgggaggctgaggcaggagaatcacttgaacccaagaggcagaggttgcagtgagccgagatggcaccactgcattctagcctgggcaacaaagcaagactatgtctcaaaaaaaaaaaaaaagtattgatagatattacaacagggtgggatttaaatgcattatgctaactgaaagcggccagagacaggccacacattttatgattccatctaagtgaaatgtccagcagaaacaaatccatagagacagaaaatagattaatgcttaacaggggctgggaggagggggaaagggaagcgactactaatgggtatgggatttctttttgggttaatggaatgttctgaaattagataatggtgatggttgtataactctgtgaatatatgaaaatcctttcaattatacactttaaaagggtaaattttatggtatgtgaattgtatatcaataaagctgttataaattttcctaaaatgttggtttcaaactgatgtcatttattttatttcttttttatgtcgtgtttcttaaagtttctcaaacaataataaatccaaattgtttagaggaaggatcctgttacttaagctaagatgagaagaaaaggagtgatgatgaggtttggaaacatcactcactcagtgacttttctttctccattgtccagcccatggatgacagtctcattgcatttcgaacgcgttctaagatgcccctgaaagatgttcccctgggccaattagaggcagagctccaagctccagacatcactccagatatgtatgaccccaatacggcagatgatgaggactggaagatgtggctggggggacttatgaatgatgatgtggggaatgaaggtaagttttggtttgtgatttattatgtatactgtccattatctgttgtaaaatttttagtatttggaagggtatagaatggaatggtttgggttaattgatttaatttgtatttaactgataatttatcttaaatcagtagttaatttttctttttttttttttcctgagacagggtctcactctgtcacccaggctgagtgcagtgttgcagtcacggttcattgcagccttgacctcctgggctcaagcaatcctaccccttatcccactgagtagctgggactacaggcacatgccactgtgcccgactaattttttattttttgtagaaacgagatgtcactatgttgcccaggctgttcccaaactcctggcctcaaacaatcctcctaccttggcctcctgaatgctagaattataggcatgagccaccgtgcctgggccaattcttaacatttctttttctgggtaaggaatcttttgaatcctaagattgttgaatgctaagatttgaatcccttgaaacatacatgcacatgtagttttgttgttgtcttttgtttttgagacactgtcccaaaacagggtgttgcccagggtggatcacagtggggtgatcatagctcactgtagccttaaactcctgggctcaagagatcgtcctcaggtctcagcctcccaagtagctgagattataggcacgcaccaccttgcctggctaattttttaaaaatttctgtagagaaatgttgctcaggctggtcttaaactcctgcctcaagtgatcctcccaccttggcctcccagagagctaggattacaggcatgagccactgtgcctggcccactcaaaattttatgtatgatttcattagggttcagtgatttaccaaaagaacactgtgttagttaagggtcttcatgatgcaagtgaaagaatcctaactctatcttgctggggtgaaatgaaaccagactttgggaagtgtagtaaatcagcagtggaactgaggcactgttaggatccccctttcctctctattttacttccttttgtcactcagctccattctcacatttatttttctacaaggttagagctctgttcataaacactccgtgattactttttgctttgtctacacttcaggactctcccctgcaagctccagttataaaatccaggggaacaagtcagatcgacttggtttgatctcatgcccagtctcttggtactacatgggattgatagggagactgttcagcatggagtctggtgattgatagcacctcatagaacagtgtggttgaagtatgtggtgaccctaaagaagtaatggtattatcagaaatggggaagaaatattgatcagataaaagtttggatggaaacagactaagtaggctgggcgtggtggctcacacctattatcccagctctttgggaggccgaggcgggcggatcacaaggtcaagagattgagaccatcctggccaacagggtgaaaccctgtctctactaaaaataaaaaaatttgctgggcgtggtggtgcacgcctgtagtcccagctactcaggaggctgaggcaggagaatcacttgaacctggcaggcgaaggttgtagcgagccgagattgcgccactgcgctccagcctggcaacagagcgagactccatctcaaaaaaaaaaaaaaaagaaaaagaaatagactgagtaaatggctgggtaggtaatgctaggagtaagtcaggataagtgaatgaaagaaaataacaggtccttgaatgtaccttatgatactattaatagttatatagtatatcatttggcaaatgtttgagtactttctttatacaaggcattgtgctagaatctgtgagggataaaggagcataatcatttggtcatggaataaaagctttatgaatgacagggtgcctggcccattgttaggttcacaatacattgtacttttttgtgtgtgtgtgagacagggtctcactctgtcacccaggctggagtgcagtggtgagatcttagctcactgcagccttgacctccttggcgcaagcaattctcccacctcagccttctaaatagctgggaatacaggtttgtgccatcatgcccggccaatttttgtattttttgtagagttggggttttgccatgttgcccaggctggtctcgaactcctgcgctcaagcgatcctcctgcctctgctttccaaagtgctgagattacaggagtgagccatcgcgctcagccagtatattgtaaatgaatgaagttgttgaataaactcagatatgccatcaaagtggcataaatgctgttgtaagattttagaagaggacagggtaacttttgtttaggatgatcagagacagctacatgaaagagctggtaattgaaatggaccttggaaagatttttgaaaacagtgacagggaagagagaaggcatctgagtagaagtgacatgatatactctatatgctggattctgtaggatatattctttccagagttttctcttttttcactgtaaaactgtaagagtaatatatgcttggtataaagaaatcaaatattacagaaataaaacaattaaagccttccccccccccaaggaaaatgtacatatctacatacatgaaatttttcatatgatttttttggggtttatgtatctcttagagtttatttattggcacttcattttcctaccagtcatttccaaagcctttgacaccaaggttcaagtttggttccccagagggactactgataatactttggtatgcatctgtgagagttttcaatgtgtagttactttttagttttccacattaatgtggggataaaaataattaaattttagtcctaaatttaaatttaagacttttctcaaacatttagaaaagatagtccaggcgtggtggctcatgcctgtaatcccagtactatgggaagccaaggcatgaggattgcttgaggccaggaagtcaagaccagcctgggaaacacagtgagacctcatttctattttttttttcttcgacagagtctcgctctgtcgcccagactggagtgcagtggtgtgatctcggctcactgcaacctctgcctactgggttcaagcgattctcctgtctcagcctccccagtagttgggattacatgcgcctgccaccttgcctggctaatctttgtatttttagtagagacagggtttcaccatattggtcagactggtctcaaactcctgacctcaggtgatccaccctccttggcctcccaaaatgctgggattacaggcatgagccaccgcacctggcatttctatttttaaaataaaataaaattttaaaaaagagagagaaaataacaagaagcaaattgttttaaatcttatcatatttcttttttttacccaccctctgtagtagaggggctaacaagccacaaaatgaaaaaaattgtgtaaggagaaaaagatggagtttgaagctgagtcattaacatgcaaagtatagaatcagttccttcataattagcaactgatatattatcccattagtcattctgataggagtctaagcttctgagttttccattactcacccctttgacaatctgatgaaaactatgcagccttcccccagaaaaaaatgtacatatccaaatacatgaaatttttatatgatttttgggagatacatatcttttaaagtttattgacacttcctgtttctaccaggttcagaaatctccacaaaaaggaatagacaggacagagagttctttttttttttttttttttttttgagcagcagcaagatttattgtgaagagttaaagaacaaagtttccacaacgtggtaggggacccgagtgggttgcccaaggacagatagttctaaccactttgtaggcagtgaaatctcagagaaattcattgtcttgctcaaagttacagaatcaatttgttatactcctaggagtagaacccagtttaatattctaggaacatgtctcaatcagacaggtttcacggtaagttaaacctttttttttttttttttttttctgagacagagtctggctctgttgcccaagctagagtgcagtggcacaatccctgctcactgcaacctccacccgggttcaagcgactcttctgcctcagcctccagagtagctgggactacaggtacgcgctaccatgcccagctaatttttgtgtttttagtagagatggggtttcaccatattggccaggcttgtctcgaactcctgaccttctgttccactcgcctcagcctcccaaagtgctgggattacaggcttgagccaccgcacctggcctaaaccatttttttttgagagagtttcactcttgtcccccaggctggagtgcagtggcgcgatctcggctcaccgcaacctccgcctctcaggttcaagcgattctcctgtctcagcctcccaagtagctgggtttacaggcatgtgccaccatgcctggctaattttgtatttttagtagagtcagggtttcaccatgttggtcaggctgttcttaaactcctgatctcaagtggtccacccaccttggcctcccaaagtgctgggattacaggtgtgagccaccacgcccggcctaaaccattttttaaaagtatatgacttttcataatgagctgtgttttttgttttgttttgttttgttttgtttttgagatggagttttgctcttgttgcccaggctggagtgcaatggcacgatctcagctcaccgcaacctctgcctcccaggttcaagcgattttcctgcctcagcctcccaagtaactggattacaggcatgtgccaccacgcctggctaattttgtatttttagtagagatggggtttctccatgttggtcacgctggtctcgaacttccaacctcaggtgatccgccctcctcggcctcccaaagttctgggactacaggcatgagccactgctcctagccttcataataagctgtgctttttatctttggcacaggctaatacaaaataattacagtaagaaagtcaggttctcctagcgttattggtagcagcagctttggtgctcattttcatcactttggttcaaaggcctaagatggtagctattgggaaggaaaggccaggcagaactgactttcaggattttgtttctcataatttggttccgagaacttgaatcagaattgaagagtgtatggatatgtagggtgatgtttattaaagatacagatttcagggcttcaccccttacctactgaatcagaatctaatgagtatggtctagggatctaattctgatatatctaaaggattggaaactactggtctgggaaaggtaagagtgcatgataaaggttgattggggaattggactaatggttagggggagggtgaaaatcctcttttcttaaaataaaacttcagtttgttttgttttgttttgagacagggtctcactcttgtcacccaggctggagtacaatggtgtgatcttggctcactgccacctccacctctcaggttcaagcacttcttctgcctccacctccctagtagctaggattacaggcacatgccaccatacccagctaattttgtatttttagtagagacggggtttcaccatattggtcaggctggtcttgaactcctaacctcaggtgatccgcccgccttggcctcctaaagtgctgggattacaggcgtgagccaccacgcccagcaacttcagtatttttgtatgtgcctattcggacagatttttaaaagagcacacaaagccaatgattaggatgggtgtggcctccagatctaccagttgagttaaaagacaatacaggaggggtatatcagctgggtaaatactgacattgttaataagtcaaaaaagtgattaagctcagaggacatattccacaatcagggtactaaaagctaagcagaactcagaagaatccccctaaatgatttttcagcatctttgttaaatgagtgctctgagaataatattcgctgacccatttgtgtggtgtgggcagaactatctattgcagttcttgcatccaaacagatggagtccaaacctgtgcacactactcattattatgggctcttccagaactttcgttattcagcaatgtttgttaagaactttttgatcaggcgcagtgtctctcacacttctaatccctgcgctttgggaggctgaggcaggcagatcatgaggtcgggagatcgagaccatcctggctaacacagtgaaaccccgtctctactaaaaaaaaaaaaaaaaaaaaaaaattagcctgacgtggtggcgggtgcctgtagtcccagctacttgggaggctgaggcaggagaatggcgtgaacccgggaggcagagcttgcagcgagccgagatcgcccctctgtgctccagcctgggcgacagagtgagactccatctcaaaaaaaaaaaaaaaaaaagaacttgctgtgaagagacttatatagaaagtactatagagattatgaattatgaagacagtattctattcctaaagaaataaagaatctgtactgataagttaaacccacaaatagatgaaaaagatttgataattagttatgtgtaaagaatgcaaattaatatattataagctgagtataaatgttgagtaaagaattatcaagttagattagggtttaatcagcacagatttttcagtgattgtgaattttaaatgtgtgtctgtataagtatatatatatttatatatatttatatttatataaaaaatatatatttgtttttgagacagggtctcactctgtcaccctcgctggagtgcagtggcgtgatcatgactcactgcagcctcaaactcctgggctcaagcagtccttccagctcagccttctgagtagctgggactataggcacacaccacgacacttggctaatttttaaaaagtcatttgtagagattggttcccactgtgttgcccaggatatatatatgtgtttttttttttttttcttgttagatggagtctcactctcgcccaggctggagtgcagtggcatgatcccagctcactgcaacctctgtctcctgggttcaagtgattctcctgcctcagcctcccaagtagctggaattacaggcacgcaccattactcttggctaatttttgtatttttggtagagacgggagggggggggtctcaccatgttggccaggctggtctcgaacccctgacctcaagtgatcttcccacctcggcctcccaaagttctgggattacaggcgtgagccaccatgcttggccccaggctgtatatgtctgtttataacaaaagatgtttatttatggccaggcacggtatccagtctgggcaacaagagcgaaactccctctcgaaaaaaaaaaaagatgctcatttattatgaaaagttaaaacattatggaagaggcgccagactctgtggctcacgcctgtaatcccagcactttttaggggccgaggcaggtggatcacctgaggtcaggagtttgagaccagcctgaccaacatggtgaaacgccgtctctactaaaaatataaaaattagctgggcatggtggtgcacatctgtagtcccagctactcgggatgctgaggcaggagaatcgcttgaacccagcaggtggaggttgcagtgagctgagatcgagccactgcactccagcctgggcgacagagcgagactccaccttaaaaaaagaaagaaaaaaaaaatattgtgggagggtacacagagaaatctttgttaatagttttatgtgtttctttctagatactctgtgggtgttcagtcaagcatgtatttatctcaaacaagaatttttttccacaaaaagaatcatactatacatattggtcttcatctgcaacttgcttctttcacttagcagtataacatatatttttccattataatacatagagatcacctcttctatttaatggatacatgatagtaagaaatttaggtattctctttttggtctttttttttttaaatcagttcctcagtcacactagctgcatttctcaagtcacatgtggctaatggctactgtatgatacaatacaatacatgtatagatcatttccatcatcacagaaagttctgttagacaacactgatctaaaattatctggagaaaaatattaccttaatatataataattccataatttaatgactccttcataatttttacttagtaattgaaaagacagtttagcattaacattaaagaaaattaggctgggccctgtggttcactcctgtaatcctagcactttcggaggccaatgcaggcggatcacctgaggtcaggagttcgagaccagcttggccaacatggtgaaaccttgtctctactaaaaatagaaaaattagccgggcgtggtggtgggcatctgtaatctcagttacttggtaggctgaggcaggagaattgcttgaagctgggaggcagagtttgcagtgagccaagatcatgccactgcactccaacctgggtgacaaagtgagactccatgtcaaaaaaaaaaaagaaaaaagaaaattaaaagggagaagaacatccatatttctattattctaacctaacaaatgtttattatttttgtatatttttagttatttatgattcttattgtaaggatataatttttcatgcttatgattattatgtatatattgtacttttgtcatacatgtattgaacttttatagaatggttacatattcacattttatatgtgtacgtgttgagtatccccttcatccaaaatgctcaggaccggaagtattttggatttcagattttttcagatattagaatatatgtattattatacttaacagataagcatactaaatttgaaaatttgaaatctgggcagggtgcaatggctcacactgtaatctcagcactttgggaggccgaggcattcagatcgcttgagcccaggagttcaagaccagtctgggcaacataccaaaaccctgtctctactaaaaatacaaaaattagttgggcatggtggcatgtgcctaatcccagctacttgggaggctgaggtgtgacaatcgcctgatcctgggcagtcaaggctgcagtgagccatgatcgtgccactgcacttcagcctgggtgacagagtgagaccctgtctcaaaaaaaaggaaaaagaaaatttgaaatctgaaatgctccaatggctattccctttgagagtcatgtttgcactcacagagtttcagattttggagttttggatttggaatgctcaacctgtactattttatactaagaaattataattatatagtcattctctaattgttgggaatttgggccactccttttttcactgtcagcttcactgtacaagtagcttttacagaaagtattattttcatggaatatactacacaaaattagctgggtgtggtggcgtatgcctgtggtcccagctactcaggaggctaaggtgggaggatcacttgagcccgggaggtggaggttgcagtgagctgaggctgtaccactgcactccagcctgggcgacagagtgagaccctgtctcaaaaaaataaagaataaatgtgctttattggaacagattcttagaagtttgagaacagagttaatgagcatctgaaacacttttttttcctagatgaagcagatgatgatgatgatccagaatataatttcctggaagacctcgatgaaccagacacagaggatttccggactgaccgggcagtgagaatcaccagtgagtctgtgtttattctaagtcctgctcttgactgctttgcagctgtctttgtttactttgtagatttttaggggtgaagtttgcagctcatccatgttaagacatttaggtttcctttacccatttattgatctgattctttaaatttaggtacatattcagaaagcccatcagttattcatttgtatatcccacagtcgtgtattcagtccttactgtttggcagggattgtgcaagatgaataagacatggcatctgtgctgtaggagttcagcctagtagggtgatagaaacagaaaaagttacaatacaaagtgataaatgctgtaacaggttttacataaggtataataatgacctaaaagagagtgtcatctcctagtgtatgatatggactaggataggagaacttaggaaagaatttgcagaatgaaatggctttttatcttagttttgaaggaggaataagaaatttggtgaatagggacagagaggaatattgcaaatagaagagcatctgcaaaccacagaattgtaaaacatcaaaaaagtatgtttggaaaatactaagtactttggtggtggtgtatgagtgaaaagacagagaagtggtagataagattaggtagtgtttacatcatggaggatttttaagctctcaaaatgaggtttaagggcgggcatggtggctcacgcctgtaatcccagcactttgggaggtggaggcaggcagatcacctgaggttaggagttcaagaccagcctggccaacatggcgaaaccctgtctctactaaaaatacaaaaattagccaggcgtggtagtaggcacctgtaatcccagctactccggaggctgaggcagaaaaattgcttgaactcaggcgggagaggttgcagtgagccgagatcacgccaatgcactccagcctgggcgacagagcaaggctccgcctgaaaaaaaaaagaggtttaagcagtaaatcagtaggaactgatttggattttagaaagatcactttgatttaataccagtttaatgtattaatttgttaggtaaagtgaacaagactggaggtatggaaaacaattatgataacttagcttgagttatttctataaaaaattatatcattgagctaggagtggtggcttacacctgtaatcccagcactttgggaggctggggcaggaagattgcttgagcttaggagttcgagaccggcataggcaacatagagaaactttgtctgtactaaaaatttaagaaattagcctaatgtattggcacgtacctgtagtcctagctactcaggaggctgaggcaggaggattgcttcagcccaggaggtcaaggattcagcaaactatgatagtgccactgcactccagccttggtggcagagggagatcctgactcaaaaaaaaattatatcattggctagtgtgtcaagcatagaaaacatacatttcatcctgaagaaattctacctatggggagaaagaaaaataaaaaatatatttcataagccattgatttttattgcatgtatgcatgaccctgtactggaataatatacacgacatggagaaggtaagatgctggctcttgaccaggttatgcagagagctttataaacatccaagatatacctaattaatgcagttctttgtgtaaagagaattatgtaaatacaatcctttagaacttacattttattttattgctttattgtgcctttcaccttgcttttaagattagaataccatttcctttgtgaagatctttcatttattttgatatactatgacagggatagtggaagcattgaaaggaaagcaccaggaattagagaaaatgtagaatgaaaaggtttgaggatttaggctttgagaaaactgaaaggagaatctaggaaggtacaagaaaaacctagaaaatctagtgtcgtagaaaccaaaggaagagtcttttggctggggcacagtggctcatggctataatcccggcacttgggaggctgaggcagaggcagaaggatcgcatgagcccaggagttcaagaccagcctgggcaagatagtgagacattgtctctacaaaaacattttaaaaataaaatgaaaattagttgtcgtggtgcatgcccgtagtcccagctacttgggaagctgaggtgggaggatcacttgagcccaggaggtggaggctgtagcgagcagagatcccaacactgtactccagcctgggtcagagcaagaccctgtttcaaaaaaagagtctttcaagaaggacagaatggtcaacagtaaagaaacaagtaaagaaacatctgcttaaagcacaaaagcagatcttaagttcagctatcatcctggaatatatttgccttccctttttgattgttactttcttcagtttacgtataatttctcagggagatcctccttcgttaggattgatcttcttgctttgcattcccgtaccactctttttgtccttttatatactgatcacctcataattgcttatttaatatctgtcttctcccctagactgtgaacttctcaagagctttgttttgtttattgctgtaaagctggtggcaatatttgccagtcgaatagagatgggtaaatgaagggcagtctttctagtcatacagttctgtaatgatagtgaaagctggagtagaatttttaatttttttttctgcctcttgtcctcttgtgtctcattgtcatatttgattataatctctttaaaaggacttatccttatatggataactaaaataaaaaaattaaaaagcatagaatcacagagtttgaaaagctccatgtggtcacatgttttttgcccgcttgagaatttgtttacacctcctctgaggtggcctttttagtcctgtttgtataccttcagtgacagggagctcaacaattctgcagatagtgtattgtaaacttgaacacctcctcaattaatactttccttattgaacccaaatctgaatgcaaattcagatactttccttattgaacccaaatttgaatgcaaagcaggaagatcaatccttttatattcctcctatttgtctttatgttatgttatgttatgtgatgttatgttatgttatgttatgttatgttatgttatgttatgttatgttatttttgagatggagtttcgctgttgtcgcccaggctggagtgcaatggtgcaatctcagctcactgcaaactctgcctcctgggttcaagcgattctcctgcctcagcctccagaatagctgggattacaggtgcccgccaccacgcccagctaatttttgtatttttagtagagacggggtttcaccaggttggccaggctggtcttgaactcttgacctcaggtgatccacctgcctcggcttcccaaagtgttgggattacagtcatgagccgcactgtgcccggcctcctatttgtcttttgttgttaagaaaaaaaaaagcaatttattcccaagtgtacatattaaaagatgtttcttaagtttttttttttttttccctatgcaaaacataggaaagtttcaagtttcttctgccaggtttcttcttctccaaagccttggtgtccagacctctcaccatgcacattactcttctctggattctagcatttattttctttaaacttttcccctgttacatcttattatgaaatttaaaaatatatatagaaaaattgaaaaattatacagctaacattcatatactcaccacctacttttttttgagacgaagtctcactcttgttccccaggctagagtgcaatggtgtgatctcggctcactgcagcctccgcctcccaggttcaagcggttctcctgcctcagcctcctgagtagctgggattacaggcgcctgccaccatgcccggctactttttgtatttttagtagagaagaggtttcaccatgttggccaggctcatctcgaactcctgacctcaggtgatctgcccgcctcagcctcccaaagtgctgggattacaagcgcgagccactgcgcccagcctcaccacctactttctatagtttgttggtttttttttgagaaggagtctcgctctgtctccaggctggagtgccgtggcgccatctcagctcactgcaacctccgactccctggttcaagtgaatctcctgcctcagcctcccgagtagctgggattatagtcacgcgccaccatgcccagctaatttttgtatttttagtagagacagggtttcaccatgttggccaggatggtctcgatctcctgaccttgtgatccgcccacctcggcctcccaaagtgctgggattacaggcgtgagccactgtgcccggccaaactttcagtagtgttaatataaactgtgcgcctttcatatgtgcgggtttcacagctgcagattcaaccaaccttgaaaatattctgagaaaaaaaaatgcaacagcaaaaaataatactaactgggcgtagtggctaacatctgtaatcccagcactttgggaggctgaggcaggaggatcgcttgagcacaggagtttgagatcggctgggcgacatactgagattccatctctacaaaaaactttaaaattatctgggtgcagccgggcatggtggctcacgcctgtaatcccagcactttgggaggccagggtgggcagatcacgaggtcaggagttcgagaccagcctggccaatatggtgaaaccccatctctactataaatacaaaaattagccgggtgtggtggctcacgcctgtagtcccagctactaaggaggctgaggcaggagaatcgcttgaacctgggaggcggaggctgcagtgagccgagatcgcgccactgcactctagccagggcaacagagtgagacgctgtctcaaaaaaaaaaaattatctgggtgcattggtgtgtgcttgtagtcccagctactctggagacagagtcaggaggatcccttgagcccagaagttcaaggttgcagtgagctgtgatcataccactaccactgcactccagcctgggtgacagagtgagagcttgtctcaaataaataaataaaaaataataaggtataacaagcatttacattgtattaggtgataagtaatctagagataaggtatacaggaggatgtgtgtagattatatgcaaatactacatcatttttatataagggacttgagcatcctcagattttggtatccatggatacgaaatggttccaggagattggctcctggaaccaacctccacagatactgagggatgactttatttgccttatcatgcagctgtccatctccctgtccgtctgtggatgcatcttagttttcaaatgcatttcagagtaaattatacttcacttttttttctttttttttttaaattcagacaaggtctatgttgcatgggttggtcttgaactcttgcggtcaagcgatcttcccacctcagcctcctgaccagctgagattacaagtgtgcacaatggcacctggctatatgtcactttttttttgtatttttagtagagacggggtttcaccatcttggccaggctggtctcgaattcctgacctcgtgatcctcccacctctgcctcccaaagtggtgggtttacaggcatgagcctatacttcacttttaaccacttcagcacgcatataatgaactagagctccatatttgtttatgatttctttttataggtaattttacacacagtgtatcacacacatctcaagtgtaccatttaatgaattttgacatgtgtgtacctatgtgacacaaatccctgtcaggatatagaatcctcaccccaggaagtttcctcatgccccttccaagtcaatccccacaccatcccttcagaggcaaccactgttctgatttttttttttttttttttccgagacggagtctcgctctgtcacccaggctggagtgcagtggtgcggctcactgcaagctccgcctaccaggttcacgccattctcctgcctcagactcccgagtagctgggactacaggtgcctgctaccatgcccggctaattttttgtatttttagtagagacggggtttcaccgtgttagccagggcgatctcgatctcctgaccttgtgatccacctgccctggactcccaaagtgctgggattacaggcgtgagccactgcgcccggctttttttttcttaatcacaggttatgtttgccagttttagaacctcacataaatggaatcatataggatgtgctttgtgtgtaaggcttctttcactcagcataatatttttgagattcatttgtgttgcatgggtcgttagtttgttcccttatattgttgagtagaatttcgttgtgtatatatactacagattatctatttttgtgttgatcacctgggctatttttaattttgggtaacgaataaagctgcgctgaacttttttgtgcaagtctttgtggaaatgcttcatttctctctctctttcatttgttcccacctatgagttagaaaagccgtatttcatttatcttgggtcagctgtataggagacaaatcactgggtcacagggtatgtttagttttataagaaattgccagaccattttccaaagtggctttccattttacattcttatcagagttctggttgctctacatcctcagtaacatttggattttaattttttttgttggctgggcatggtggcgcacacctgtaatcccagcactttgggatactgaggcaggcagatcacttgaggtcaggagttcaagaccagcctgggcaacatggtgaaacaccgtcgctactaaaactacaaaaaattagccaggcgtggtggcgcatgcctgtagtcccagctacttatgaggctgaggcatgagaattgcttgaagccggaaggtggaggttgcagtgagctgagaccgcgccaccgcgctccagcctgggcaacagagtgagactcagtctcaaaaaaataaaataaaaaataattaaattacttaaatgattttgtttttgtttttgttttgtgtttgagacagagtctcactctgtctctcaggctggagtgcagtggtactatctctggtcagcgtagcctctgcctcccgggtttaagagattcttgtgcctcagcctcccaagtagctgggattacaggcatgtgctaccatgactggctaatttatttatttatttatttttgagatggagtcctcgccctgttgcccaggctggagtgcattggtgctgtattggctcagtgcaacctccacctcctgggttcaagtgattctcctgcttcagcctcccgagtagctgggattccaggtgcatgccaccatgcctggctaatttttgtatttttagtagagacggggtttcaccatgttggtcagactggtctcgaactcctgaccgcagatgatctgcctgcctcggcctcctaaagtgctggaattacaggcgtaagccactgcccgtggcctggatcttaatttttttaatgtcctcttaagaagggcctttatagaattgttcacagtcctccagacatagtgttagactctgctctagttcagtgatatgtttgccttgttggttatgagccccgttttggagcaactgtgtcttattgaacttgatatcaaccaaaacttttttttttcctcagattcttgtaacaaccaaaactttcaggtcttgttcacattatttttaagccacgtcaccttttcatgcagttaataaactgatctttaaaactcttgctgggcgcggtagctcacgcctgtaatcccagcattttgggaggctgaggcgggtggatcacgaggtcaggagatcgagaccatggtgaaaccccgtctctactaaaaaatacaaaaaattagccaggcacggtggcaggcgcctgtagtcccagctactcaggaggctgaggcaggagaatggcgtgaacctgggagatggagcttgcagtgagctgagatcgcgccactgcactccagcctgggcgacagagcaagactccgtctcaaaaaaaaaaacgaaaaaactcttaactgtaggactgggcaccgtggctcacacctgtaatcccaacacttagggaggccaaggtgggaggatcgctggagcccaggagtttgagaccagcctgggcaacatagcaacatgctgcctctattaaaaaaaaaaattcttaaacatagaactttaaatttatccgtatatgttgcatccagttgatttgagaaaatataattttgaattttccgtctgttggattggcagtccctttcagctttacatcatctacagatgtgttaggtatgttctctgggtcttctaagtcaccgatggagttcttgaatagttcagatccaaagacagcgtcctgtgaaaccctgctggaaacttgtctttctctctctcttttttttttaagacaatatcttgctctgtcgcccaggctggaatgcagtggcatgatcttggcacactgcagcctctgcctcctggactcaagagatttctctcacctcagcctcttgagtagctgggactgcaggtgtgcgtcaccaagcccagctaaatttttttgtagagatatggtttcaacattttgcccaggctaggagactcatctcttgattccattcagtactgtgtggatttggataggtcatctaattataaaatcatctagctcacattttctcctgtcttcttccttttagaatttaagcttcatgagaatagaactctctctctctatctctctttcattctctcatatatcccaagcatctaaaacatggattgaagcatagtgctcaataaatgtgttttgttgttgttgttgttgttgttgttttttgagacagagtctcgctctgttgcccaggctggagtgcagtggcgcagtcttggctcactgcaagccctgcctcccgggttcacgccattctcctgcctcagcctcccgagtagctgggactacaggcgcccaccaccacggctggctaattttttatatttttaatagagacggggtttcaccatgttagctaggatggtctcaatctcctgactttgtgatccatctgtcttggcctcccaaagtgctgagattacaggcatgagccaccgctcccggcctcaataaatgtttttgaataaatgaatgaaggatagccagtcatggtggctcacacctgtaatcccaccattttgggaggccgagttgggctgatcacttgagctcaggagttcgagaccagcctggtgaaccctcatctctacaaaatatacaaaaattagccaggcatggtggcatgcgtctgtggtcccagctacttggggagctgaggtgggaggagcgattggaccagggaggggatgcggaggttgcagtgagctgagatcgtgccactgcgctccagcctgagtgacatagtgagacccatctcaaaaaaagaaggatagatatgaagaatttgtcatgccttgttgaaaacattatacattgtcttcatggaattcctccttattgtaaaatctaatttataccaacaatatactgtctggctttcttgcagaaaaggaagtaaatgagctgatggaagagctgtttgaaactgtgagtaatgatcctcgagtgagaacacgggattttaagtcagttctccagcaagatgtgtcatttggtctctgtgatgctccctctaggagagggggtctgactgaaccaattctccttttagtctacctgggaaagaatataatgacaagggaattttgctaactactagactcttgattatatacatgtatgttgttcttattaacattttccttgaaacttctttttgtttgagggggttcttgctccatcacccaagccagagtgcagtggtgaaattacagctcacagcagccttgaccttctaggctcaagcagtccttcgtctaagcctcctgagtagctgggacataccaacacacccagctaattattttatttgtagagacagggtcttaccacattgctcaggttgttctggaacttctgggctcaagcaattttcctgccttgggcctcccagtgctggaattataggtgtgagccagcatgcctggcccctggaaaacttttgatgacttcccctactgtcatttggtgtgtccttaaagattgtcaactagttttaaactactttgtgtacaaataattacctttttcataaatttgtttcaaaagatttttcattttaagagattgatcattttgaggctgggtgcagtggctcacgcttgtaatcccagcactttgggaggccacggcaggtggatcatctgaggtcaggagtttgagaccagcctggccaacatgatgaaaccctgtctctattaaaaatacaaaaattaggcatggtggcgggcacctgtagtcacggttactgcagaggctgaggcaggaaaattgcttgaacctgggaggcggaggttgcagtaagcccagattgtgccactgcactccagcctgggcaatagagcaagactgcaagactctgtctcaaaaaaaaaaaaaaaaaaaaa

SEQ ID NO: 15598 - DNA, 30959 bp, Homo sapiens
actggctcaaagagagggaaaaaaatgacactcaggcctgggccagttacccaagaagacagatgtgatcatcttaccctaaaggagcctttttcaggagagcctagtgaagaagtcaaggaagaaggaggtaaggtatacaaggtctctaggttacattcttgtcaataccactttgccattgctatttctggatacctttacagagtagtatttctgaaaggggatattgatttggtacggaattggaactgctgtgttgctaagggtcaacagtgaactttttttttttcttgagacggagtcttgccatgtcaccagactagagtgcaatggtgggatcttgactcactgcagcctccacctcctgggttcaagcgattctcctgcctcagtctctcaagtatctaggattacaggcatgcgccaccacgccaggctaattttgtatttttaccagagacggggtttcaccatgttggtcaagctggtctcgaactcctgacctcaggtgatacgtttgccttggcctcccaaagtgctgggattacaggtgtgagccaccgtgcctggccagcagtgaactttatgaatggatatagactttcttttcccctcccattcgctatatccacttctgtacccctttcttctttcttttttgagacggagtctcgctctgtcacccaggccagggtgcagtggcgtggtctcggctcactgcaagctccgcctcccaggttcacgccattctcctgcctcagcctcccgagtagctgggactacaggcacccaccaccatgcccggccaattttttttgtatttttagtagaggcggggtttcactgtgttagccaggatggtctcagtctcctgacctcgtgatccgcccgccttggcctcccaaagtgctggattacaagcgtgagccactgcacccagccattgtatccctttcattccattctctcatcctttatttggtgtgtctggagatgtgtatggtcttttgtgattgggcagcagcttaaagggggagactactgcctgggacactgggaaaggctctactgagatgaatgacccttccaatttgaaagatgaattgcggtttaacagaaagtggtatgggcacataggccaagaacagtgcacagagatagactggcagaaaaggatggtgacatggttgcttggaacaggtggtgggagatgacttcttttttttttttttttttttttgtgacagtctcgctctgttgcccaggctggagtgcagtggtgtgatcttggctcactgcaacctccacctcccatgttcaagtgattcccctgcttcagcctcgcgagtagctgggattacaggtgcctgccaccacgtccagctaatttttttatttttattagagaggaggtttccccatgttggccaggctggtctcaaactcctgacctcaggtgatccacgtaccttggcctcccaaagtgctgggattacaggcgtgagccaccacgccctgccaagatgactttagagtagtagattgtactaaggttgtgaaaggttttgtttttcataccaaggcatttgagcttttcctgtaggtaggtgatagtcatttaaacgtctaagtagaacacatttatgctttagaaaagataccaacttctcttattcattttttttttgatacggagtctcgctttgtcgcccaggctggagtacagtggcgtgatctcagctcactgcaacctccacctcccctgttcaagtgattctcctgcctcagcctcctgagtagctggtattacaggcgcccgccaccgtgctcagctaatttttgtatttttagtggagatggggtttcaccaggttagccagcttggtcctgaactcctgacctcaggtaacccacctgcctcagcctcccaaagtgctgggattacaggcgtgagccactgcgcccggcctagattgtgaaggtttttgtttttcatactaaggcatttgagcttttcctgtaggtaggtgatagtcattttttttttttgagacgtagtctggctctgtcgcccaggctggagtgcagtggcgcagtcttggctcactgcaagctctgcctcctgggttcatgccattctcctgcctcagcctcccgagtagctgggactacaggtgtctgccaccatgcccagctaattttttgtatttttagtagagacggggttttaccgtgttagccaggatagtgtcaatttcatgacctcgtgatccacctgcctcgtcctcccaaagtgctgggattacaggcgtgtgccaccgcgcccggccctttttttttttttttttttgaggtggagtctcgctctgttgccaggctggagtgcagtggcacgatctcatctcactgcaacctccgcctcccaggttcaagcaattctgcctcagcctcccaagtagctaggactacaggcacacgctgccacgctcagctaattttttttttttttgtattttagttgagacagggtttcaccatgctggccacgctggtctcgaactcctgacctcgtgatccaccgacctcggcctcccaaagtgctaggattacaggcgtgaaccactgcacccggcctattcattcattttgactgttaagatgttttcttttttgccgcattttaagtccacttgttcttattttgtcctactggtacattctcagtatgtggttttttattgtgtcttgtgtgtgtttatattgaagaatttcatgtttctgactctgctgtatttgaaaactgatggagtgcccaagatgagggagtttagcaataatcttgatggtatactgtgttggtcacgccctctctggcatgagctgcctgaagcacattgtcaaagatgaaagctcttttggggaaaagtgctctcctgtggaatcatcccttgtcatagcatgtggctctaaattttcagcctcattcacagtagcttgcattgttgtattgcttttgggacacctgtgttttatctggaaatgtagacaggaatagcggttttttttgtatgtgtattatatattgtttcactgctaatcttctacacaattttttagaataaaaaagggtaaatagcttgtgccattttgctaattacatagatttgacttttgatcacataaataaaaaataaaacaaggcaggacattgtcctgcacatagttgatgtggacaaatactttttattactttgaaattcttattttgatagttttccacttaatgaggcaagtgcttaagcctcagtctttttgagttctcattatttagacataaggaaaggagaaatgaaggtttttctttattctccccatgcctttcctttttttctcttttattctttttttttttttttaagagcagaatatactagatcaggacaaattaaggtgatactggaatttaggtgtttttactggaaaaaaggcatttcctttgagatagtttaaagaaaatagtaaggagataagaatcagttcaactactaattcaggaagccgggagagatgtacattcaaagcataggacagaatcaagttttctttcttttttttttttttttttttttgagacggagtctcgttctgttgcccaggctggagggcagtggtgcgatcttgactcactgcaacctccgcctcatgggttcaagcaattctcctgccgtagcctcccgagtagctgggattacaggcacccaccaccacacccggctaatttttgtatttttagtagagacggggtttcaccatgttggtcaggctggttttgaactaccttttttttttttttttttttgagacagagtctttctctgtcagccaggttggagtgcagtggcacaatctcggctcattgcaagcttcacctcctgggttcacgccattctcctgcctcagcctcccgagtagctgggactacaggcgcccgccaccacgcttggctaattttttgtatttttagtagaggcagggtttcaccatgttagtcaggatggtctcgatctcctaacgtcgtgatctgcctgcctcggcctcccaagtgctgggattacaggtgtgagccaccgtgcccagccctgctggttttgaatttctgacctcaaatgaccacccgcctcagcctcccaaagtgctgggattacaggcgtgagccacagtgcccagccccttttttttttttttttttttttttttttgagatggagtctctgttgtttaggctggagggcagtggcatgattttggctcactgcaacctctgcttcccgggttcaagcgattctcctgcctcagcctcccaagtagctgggattacaggtgtgcatcaccaggcctagctaattttttgtatcttagtagagatgggatctcatcaggttggccagcctggtctcgaactcctgacttcaggtgatccgcctgcctcggcctcccaaagtgctgggattacaggcgtgagccaccgcgcccgacctacaattccgtagttttagtaaaccattgcagtaacctacaaaacacattttgatgtttaacttttatctctcagatttttttttgtctgaaaatgacaaagaaatcctttgttctgagttttggtttaaaacataatctctatctgtgtgacatttaaaagaagcagaagacatagttctaacctcaggaagtttagaatcttaattgggaaaacaaccataaatatatactttttggaattggagcttgaaggattcacaggatttgatagattgtgagggaagaagtggaagtagaataacatattctgcaaacatgtagaaatgctgtgtttgtgtgggaaagtactaaggcttcaggtagaaagagtagatccagattatggagagccttgaagctttccccttaagaccttaagatttagaataggatgctggcagtaagggtagagaagaatgggtacaccatagacacattacaaagaaatgattaacactgctcagagactgacatgtaagatatctggggtaggggatggtgatgcatgccttcatagggaaggtatttgagagtttgaatatgagttcagatttgggtatgagttatgcaggtgaaccccaaaattggggctcagcccaggggggttcttggctttgtgcaagattcatttgcaagccaatagagaaaaaggaaagcaagtttattagagcagcagagtacaggaaatggctgccccatagacacagcaatagcagcagcccttgtgaatagatagctattccttgattatatactaaataagggcaggttattcatcaattttctagaaaaggggcagggagttcccagaaccaagagatcctcccattttaaaccatataaggtaacttctaggggttgccatggcatttgtaaactgtcatggcagtggtgggacttttcttctttgtatgtatgtatgtatatatttatttattgtttatttattttgagacagagtctcactctgttccccaggctggagtgtagtggcacgatcttggctcaccgcaacccccgcctcctgggttcaagggattctcctaccccagcctttcgagtacctgggactacaggcatgcaccaccacactcagctaattttttttgttttttgttgttttgagatggagtctcgctctgttgcccaggctggagtgcagtggcgccatctcagttcactgcaaccaccacctcctgggttcaagcgattctcctgccccagcttcctgagtagctggggttataggtacccgctaccatgcctggctaatttttgtatttttagtagagacggggtttcaccatgttggtcaggctggtctcaaactcctgacctcatgatctgccctcctcagcctcttaaagtgctggaattacaggcttgagtcactgcacctggctttttttgtatttttaattgagatgcgtttttgccatgttggccaggctggtcttgaactcctgacctcaggtgatcatctgcccgcctcagcctcccaaagtgctgggattacaggcatgagccaccatgcccagcctgtttttattttttaaaaccaatccatttaattgtgtctttcaaggtaaacaatttatggagcctggatcccaagcctgagagtgctagagctatgggtccaaaacttgtggtattctgagttcagaagggttcgaactcacggtgttcaactcacggagtcagagaacatgcggaatttgtgtattccatttagcaattttgtaaattaccagaaacagactgaaagagtctttcaagatggggaaaattcaactcctgtgttttttttgtttttttgtttttgagacagagtttcactcttgtttcccaggccgtagtgcaatggcacaacctcaatggcccctgctcggttgaagcgattcttctgcctcagcctcctgagtagctgggactacagccgtgtgccaccatgccaagctaatttttgtatttttagtagagatggggtttcaccatgttggccaggctgtctcgaactcctgacctcaagtcatccacccacctcggcctcccaaagtactgggattacaggcgtgagctaccgtgcctggcccaggacagctttttaacaagcagttaaagtggaaaagaaccccccagtagcacgctggtttagtttataagattttagtttacaaattaaaaaatctatatgttttacattttctctttatatcacttttttcctttatctttctctttgtcgtcttttgtatccttttttgctctcttctttttcctatctttttttttttttttggtgacagagtcttgctctgtcacccaggctggagtgcagtggcgcgatctcggctccctgcaagctccgcctcccgggttcacgccattctcctgcctcagcctcccgagtagctaggaatacaggtgcccgccaccacacccggctaatttttttgtatttttagtagagacggggtttcactgtgttagacaggctggtctcgatctcctgaccttgtgatccgcccgcctcggcctcccaaagtgctgagattacaggcgtgagccaccgcgcctggccggtttctttttcctgtctttcttctctgcatcccagttggcaatcttgttgatgaggttgtgtagggtgatcacagaatggatcagcgaggccaagtacactgctaccatttggttattggtcttcaggtaaaaggccttgacaaactcctataggctaatgactggcagcagcttgaagacctgcagctgatagatgaattggtggttggtggacagtttgcctgtggcaactttttccaggtagcttctggtacccagaagcttggagttcagtcccttcaaatccaggacctggtttgtgatacactgggaaagagtgcccactgtagtgtctttgatgtcttgtaacaagtgtttaactccaatttccttagcttcctctgctgcagtttcactggtcacatgctcaaatgttttcaaggctgaagttccatcttcatagacttctactgaaatatatgcttctgtaggcagccctaagtcctttggcttcatgtcactagtgaccaatactgagttacggcagtatcttttcatgatttcattgaaggcagtgtcattcttgtgtagtttagggcctatgtggtaccactcaactattctttccctggcattcaccctcttaaacattctgtatgtgtttttcaaataatcgtgggctaaaaaacaattatctttgtcatcttcattaaaagggactgtaaaactgctggatacatcaagtactttcatttgccatgaccgcaaaagcacatgaagaatgcatttctggtttccaaccttgctgattctgttgaaatgatccaccacattgagcagtacctgggggtggactaccaccttctgcaccaccaggtccagcctcatgatacactctggccaccaggcctggctccctgtgacccactggagtttcttttagcatgcaaattcattataattagtgtataataagcagtgagagcaaccgaatgtcacttttgttgccatcttggttgtaactggttttggctgctttctttgctgcatcctgttttgatcagggttttgttcttgttttgttcagcaggctctctggccagtgcttggaaaacaaatcctgcttctctcctacctcactccccccacagagattatatactccccttcaatcttacagggttttagaagggtggaagtccatcttctgtgactgcttcctgttgattttatgggcattggccctgcctagcactggaggagtaaaaatctcttgatgcctcatctaaggggtcagaacaaggatgtgttggaagccacttgctagcattatcttcacatggaaattgttgcaatctagaagacacacactacaaggaggctaaaagaggcagggccaaagattcatagttacaagatagctgctagaggtcctaaaaagagtagaaaccaggtgagacttgggagggttttttttgttgttgttattttttgggttttttgagacaggatctcgctctgtcacccaggctggagtgcagtggtgtgatcatggcccactgcagctttaacctcccaggctcaagtgatcctcctgccttagcctcctgagtagctgggaccacatgtgtttgccagcaacacccagctgatttttaaatgtttttatagagacacagtctcactatgttgcccgggctggtcttgactcctgagctcaagtgatcctcccactttagcctcccaaagtactggtattacaggcgtgagccactctgcctggccaggagggtgttttttatggtcaaccagatatagttggggtcagttccctggttatatatatgtaaccaggtggcttgctcttagaacttttgaatgttaacctcagcctgtccagagttgttaatatatgtgcagtcggtcttattgataacagtgcagactctacctttttcagtcagtaaacaatccaagactagtctgttgtcagggctacaattgccaaagagtccagagattcctgaatttttcttaatgtctgactagtgttggtggccagagattctagggcctgagttatgtttcttagcattgacttgtggtatgcaaagcccctgccaaggggccaccacccctattgctgccccaattcctgtaaaaattaatcctattgctcttttacttcttgtttttctagattttatggggttatgaatggataccccctgaagggataatggtggccaaaatacattcactggtgtttcaagtttttgataagcaaaatggaaagctattcctagaagaataaatggttccctacagggttgggagtgggtatggggtaggatttcttcccctaaaggtgagcccagatgggtcacaaattgaatccttgcaagttatgccgtccattttttattgccaaactgggtctatagagataccttttccaggttccaatgggggtgattgagtagccctcgttttccaccagagggtggtacctccatcttcccaaattaagcagtcgtttctcccttgcatgtattggtcctggaggaggcaccatgtatagtctccttgtttaccagtgggatcccgtttgccctcccatggccttgggaatttggctactagggttgggtcagagcatcgtggggaatttctgtctctgtgtcattgtcacaacaatttgtgcaaaagatagtatcattagtacactggagctgtagatacccaacatcctaggtccaggtaatagtagggggtaggagggtggttggagaggagtcaggtcaatctgttaagtgtgggagagagctgttttataagtaggggcctaggtaccaaaggaacactatggccaattaggaggtttggggagatggctgtgaggtttgcagggtgcaccagaaggtgatgctctctatcctgagggtgctgatgacagattctgcaatcatgcaggctatttcctgatgctataattctagaaatgtttactatggagttttgttcccattccacagcgagttagattgattaggagcagggagcaagaagaacagggacaactgagtatcacactgggctttagggtggtccctatactcaataaggacaagtaaggtgtttctcaggaggaggtggttgctacttatctgtcttgtgaaatagcaactttaagtcttccagaggtttgcaggtgtaggtcatggtgtcctcctcttgtgcctgtagggattcaccaaaaacaggtttgtttaatccgggacaggtgtacctagctagtgattccccgaagtttaacagcagtgggagtgcttaacaatacctaatggggagtgggtgcccttccatattggttatattataattgatcttcaaggaatccttctttccaagttttttttttttgagatgaagtcttgctctgttgcctaggctggagtgcagtggtgctatcttggctcactgcaacctccgcctcccgggttcaagtgattcccctgcctcagccttctgagtagctgggactacaggcatgtgccactatgcccagctaaattttttgtattttactagacacagggtttcaccatgttggccaggatggtcttgattccctgacctcgtgatccacccacctcggcctcccaaagtgctgggattatgggtatgagccactggcccggccctttccaagttttttttttttttttttttttttgagatggagtctcgctctgtcgcccaggctggagtgcagtggcacgatctcggctcactgcaacctccacctcccgggttcacaccattctcctgcctcagcctcctgagtagctgggactacaggtgcctgccaccatgcccggctaattttttgtatttttagtagagacgaggtttcaccatgttagccagtaaggtctccatctcctgatctcgtaatccactcgccttggcctcccaaagtgctgggattacaggcgtgagccaccacccctgccccaagtttttaataggactaggtgtcctggttaaacagggaacaatcttttcctttgtgggaaagggcaatactttattttcatattcttagagtgccttttgaacctggtctcttaagttccaaaggggagcggggggaaggtatagtgaggcttgtccaaccccttgtttcttgtcatggcctgaattagtttttcaagtttctttttttttttgagacggagtcttgctctgtcactcaggctgtagtgcagtggcacgatctcagctcactgcaacagccgccttccaggttcaagtgattctcctgcctcaggctcccaggtagttgagattacaggcgttcgccaccacgcccagctactttttgtatttttagtagagatggggtttcaccatgttggacaggttagtctccaactcctaacctcaggtgatctgtctgccttggcttcccaaagtgctgggattacaggtgtgagccactgcatccagctgccagaggcaatattgctggccaagcttttattttgttccataccaatgctgaggtggtgtgctacctgccccaggtccctcatgtcccttggtgggacgctgatggccaagggacttagattcaagtgacttatagccaattaaacattgtaggccagatggaagtggaggtaggcaggcactcattattatctcttaaaaccccttttaagcaatataagagccaaaaccagaagccaaaaaataaggttataaaactgacttatctataaattctgtgcattgagctattgtaatcttggcttgcagcaattaggtttacaaaacacaaacattttgttcagctatttaggtatctgtgtgcctgtccttgatttggaaggtctgaattaattatatccctcaaaacccagcccctataatctctcatgcccacctcttcagtagtccttgggcctggaggaattgaatagttttaaattctgtagataaaacaacacataaagaattagcaatgtttcaaacaaaaaagtcataagccctgccctagttttgagaatgacaggaaaggaatcttacaggtacctaaacatttaaattatttagtatcaaggcatagaataagttatattaattcatatagaggcaaaattattaaatgaatacaagcttgtccctgtgtctcattaaagcagtttactttttttttgagactgagtttcactcttgttgcccaggccggagtgccatggcatgatcttggctcaccgcaacctccgcctcccgggttcaagcgattcccctgcctcagcctcccgagtagctgggattacaggcatgtactaccacgcccagctaatttttgtgtatttttgatagggacggggtttctccatgttggtcaggctgatcttgaactcccgacctcaggtgatccacccacctcagcctcccagagtgctgggattacaggcgtgatcaactgcgcccgtcctaaagcagtttactttgccccttttgcccaggtctaaagacaaggctttggttaacttgagtttggtgttagatcctggcaagagttggtgccttctctagatgagctgtctgtacccaggagtcaaagccctgtaactcaaaagcacattgattagttaatagcacccgataaggaactttttaaagggctggcagtggtaatgctggagtccacaacctgtcaggaggctgtaaaaatatatcacaaccttgcagtgattagtttttatagctttgataaagcccagcaacaagccagacaatcaagctaggattcgattctgggggcatttgtaaaagatgttaaaaagcccaaaatactgtattgacacagaaccacaggttactgtaagtaatagttacttatttacccaaagtggtaatctctctgcagtgtaattgtctctccttatgggaagcccacttaactaatcttgaagttaaatttgatgaagagaaaaataatacttgaatttaatcggacaaagtatgttcaaggttttgaatatagcaggtgaacatgaaaagttttctggttactctgaaaatttagacatgtcaagaaaaaccaagagtatagaatcaagttatactggaggaaaacattgcttttatagacctctaagctaaaatatttcagcatctgactgtaaaaacagaactggaagagaaaaagttacagcaactgatgaaaaggttgaaggagagactaatgtctcaggctttctcaaggggagaaaaagctgaaagcagtgagatagaacaattgaacttatgagatatgaatctgagaaattttcaaaagaaacaagttatagaattgaaaagcaaattttcttgtaatttcattaagagcaaatcaataccttgaaacccttactttaacataggagaccattctttagaaagattccacttttaattatagctaacttaatcacataaacaattctttttataaattctcctttataaatcttatgacctgcacagaccatgtatgatatggttgaatgaactttctgacttgtccaatactacctttttttttttttttttgagacagagtctcattctgttgcccagactggtgtgcagtggtgtaatcttggctcactgcaacctccgcctcccgggttcaagcaattctcctgcctcagcctcaaaagtagctggaattaacaggcgtgtgccaccacacccagctaatttttgtattttttagtagagacaaggtttcaccatcttggccaggctggtctcaaactcctaacctcaagtgatccacccaccttggcctcccaaagtgctgggattacaggcataagccactgtgcctggcctatactacttttcctaaataactagtcattctactactctagaacaataccatataagatccttttttttttcccactgagatctgcaggattctttcttatgtagaattattctcttttatttataacctttcttaccaaaaatacctctgaacatccataactttctttacctatctctcccctacttactggttcctttctacctggttatataaataaccttttcaagtccataatttgaatcaacctttagataacttttgaattagacacaattattctttttctcaataaaaacacatcttctttggtaagttttatataaacctaagaaggaagaaatcctgaactatcagatattagcattttatagatgagaaccattccacagtttttaaaattttttattttattgtaaaatgtttccctatataatattcctttcttaattggaaatgacccaggcatccaataagcatccaaaacgattttaagattttaaattatacaaaaagttcacttataagcatttatctcattatatttacctaatttattattattatttataattttttttctttttttttttttgagacagagtctcactctgtcacccaggttggagtgcaatggcataatcttagcttactgtaacctctgcctcccggattcaagagcttcttgggcctcagcctcccaagtagctgggatgcatgcaccaccacgcctggctaatttttgtatttttagtagccatggggttttgccatgttggccaggctggtctcaaactcctgacctcaagtgatccacctgccttggccacccaaagtgctgggattacaggtgagagcccctgtgcctagctggaactatattagacaaaattggtcattattcaaagttatttcctggttaaccatttttaaactctgaacattaggtgaacccctaagtaagaatcttaaacacatgggcattttgccagtaactgagaagattcagctattttcattgagccaacaatcttaaattcgtcttatttatacaattctgaagacatttctatttccatcaattatttaatttaattaattaattttttgagacaaggtttctgttgcccaggctggagtgcagtggcatgatcacagctcactgcagcttccgcctcttggggtcaagtgatcttccacctcagcctcctgagtagctgggactataagtgtgtgctgtcacacctggctaattttttttgttttgttttagagatggagtctcactatgttgcccaggctggtcctgaactcctgggctcaagcagtcctcccaccttagcctcccaaaaggttgggaggtgtgagcgacagcacccagtctttattaataatttgaaaacaagttttatttaccaaaggattcatgtgaacttgaaaagcctttggactttattaaagatagctggatttaaatatttctgacaattttgaaacctgttcacatggctaaactttttttttctaataggtaatccaaggaaactgtagactagaatttgggtaaggtagttttcataacagttttaattttaaaaccctcttttatccttttttcccccttcagcttcagaggaggaggagatgatttaaaagggcaggaaagaaaaagagggaaaggagggagagtagggggatgaggggtacctttccctttgtttctctggtgggggagagagagagagagagatacagcaagccagaacactcattgatggatgaagggtcaccttaccatgacaacttcaatatcagatatcttggacccaagaccttgggactgtcccagggacccacaatcctagagagacatgaaccagtagaagtataataaaagaagactgaaaaggcagaaagggaaaggaagctaggaaaaacaggctcccgtagcagcaaatgtgaattggggaagagaggggttgttgttcagggcgtgtccttggagtccctgagacagtggagaactcacccatcagtggagacaccaaaaaaagtgttcaggcggctgcttttctgccattgcagggagtcgtcattaggtcaggggttcagggcctccagaaaaatgggcttgaacaaggcagctcatttgggaccctcattttgagcagaaagaaagacaggaagagacctgttgcagaaaagaaaatttatgattttaggagggactagaagaagttgctgaagtggatggaatgacagagtaaggaaaaaaatgaaacggcaccaaatgctgaaaaacctggagtatctagacattggccagtgagggtccccataccaaatgctgaaaacctgggggtggccaacagtgaggcccaaaggcatgagacctaacacagttggggccatagaataatgtgactctgacatcccagagtcagcacaaaggaatacctctcaaaataacaaaagcctgccttacatggaatagaaacaactgcccaaattgccaaaacagggactacaaacatgacaactggataaacataagtgtgcatttaggcactaagagcagaaaagtaaaatgactggtcattagaagctaaagagaaaaggtctgagagagaaggtgacaaagtaaattacaaaggacgtggatgtccaggtgtgcttctgtctggggcacccagatgatgggggacaacgaactgactaacaacccagagacactattccccatttcctgattgatttgaaaaggtaaagggagaggagagtgaaagagaaagtaaatcagttaaagaacaccacatcggccaggcgtggtggctcacgcctataatcccagcagtctgggaggccgaggcggggggatcacgaggtcaggagttcaagaccaacctggccaatgtggtgaaaccctgtctctactaaaaatacaaaaattagctgggtgtggtggcaggcacctgtcatcccagctactcgggaggctgaaagcaggagaatcgcttgaacccgggaggcgaggttgcagtgagccgagattgtgccactgcactccaccctgggtgacagagcaagatgtcgtctcaaaaaaaaaaaaaaaaaacgaaaacaaaacacacattgagggggaacaaaggggacactcatcttttcgtggaggccaaatggtgccagtcagtctttgggttcaagcaattctcatgcctcagcctcccaagtacctgggactacaggcgtgcaccaccatggctggctaattttttgtatttttagtagagccggggttttgctctgttgcccaggctagtatcgaactcctgagctcaggcaatccacctgccttggcctcccaaagtgctaggattacaggcgtgagccacggtgctcaacccaatcagtcttaatttagggtctggctaaaggtctccctcagttccttttggcttattattggtctcttcatggtcaccaaggaatgacgcaggtgaaccccaaattggggctcagcccaggagcattcttggcttcgcactggaaggaatcatgaatgggccaacagtgaattgaaagtaagtttattagagcaacagaggaagggaaatggctgctctgtaagagaagcagccgcagcagcagacctgcggattgctggctagctgtatgtatacaaagacaacatggaaaaaaaatgaaacggtgccaaatgccaaaatacccagagtatccaggcatcagcccatgagggtccccataccaaatgacgaaaatcccagagcacctagggggtggccaacagtgaccctcaaaagcatgagacctgtatagccatatatatatgggtatactttgattatatgctaaaataaggggcagatttttttttttttttaattgatcattcttgggtgtttctcgcagagggggatttggcagggtcataggacaatagtggagggaaggtcagcagataaacaagtgaacaaaggtctctggttttcctaggcagaggaccctgcggccttccgcagtgtttgtgtccctgggtccttgagattagggagtggtgatgacttaacgagcatgctgccttcaagcatctgtttaacaaagcacatcttgcaccgcccttaatccatttaaccctgagtggacacagcacatgtttcagagagcacagggttgggggtaaggtcacagatcaacaggataagaatttttcttagtacagaacaaaatgaaaagtctcccatgtctacctatttctacacagacacggcaaccatccaatttctcaatcttttccccacctttcccccctttgtattacacaaaaccgccattgtcatcatggcccgttctcaatgagctgttgggtacacctcccagacggggtggtggccgggcagaggggctcctcacttcccagtaggggcggctgggcagaggcgcccctcacctcccggacggggcggctggctgggcagaggggctcctcacttcccagtaggggcagctgggcagaggcgaaggggcggatttttaatggattttctggaaaaggggcgaggacttcccggaactgagagtccctccccttttaaaccatataaggtaacatctgggggttgccatggcatttgtaaactgtcatggtgctggtaggaggttcttttagcatgcagataaaaggagggcaacaggaggtggctttcatcaccatcttgcttttagctggttttggccagtttctttgatcagctcctgttttgttcagcggggtctttcgaacagtgcttggaaaacaagtcctgctgatctcctacctcaaatggaatgtgaggtgacaatagggccagcaagcaaaaatagaaatctgagattgaagtttagtaagaggcaaggactagaaatgttcagtgttagtcatggttcttctccatggaaacagacatggagggggaagagcagtggattgaagacaaccttgccttgaggaagaagataacagagaaggaacaactggagaagtaatagtaaaagtgaaaagaggaaggagagctttaagaacaaggtactttaaaatgtaaatttaaaatttagtagcaaaggagggataaggataatacctgagaaaaaggttacatttgaagattgatgatcttggagagtagattcaggagtttgttggggaaaggacattatatgaagcagttaaagaggaaggaatggggctgggaacagtggctcacacctgtaatcccaacactttggaaggccaaggtgtgaggatcttgtggccaggagttcaagaacagcctgggcaagatagctaggttccatctctacagaaaattttaaaaattagccaagtgtggtagtgcatccctgtagtcctagctactcaggagtagctagggggatagcttgagcccaggagttcaaggttgcagtgagctctgatcgcaccactgcattgcaacctgggtgacagagcaagaccttgtctgtaaaaaaaagaaaaaggaggaggaatgaaaccccagagatttttctttctttcctctcccccatccccctcctcccctcctcccttcctcccctcctcctctcctcccctctcctccccactctcctcttccctcttatccccttccctcacctcccctccccttccttccctttttttttttttttttttttttttttggagacagagtctcgctttgttgaccaggctggagtgcagtggtgtgatctcggctcactgcaagctccacctcccgggttcacgccattcttctgcctcagcctcccgagtagctgggactacaggcacctgccatcatgcctggctaattttttgtatttttagtagagatggggtttccccgtagccaggatggtcttgatctcctgaccttgtgatctgcccgcctcggcctcccaaaatgctgggatcacaggtgtgagccaccatgcctggccttccttcctttttttgcagtgggagaatgggtgagaaatagctagagaaggcagcgagattattgcatattttttcaagataagttgtcagaaggaactggaggaaattataagattaaaatgctagagaaggaatggataaataactatgggttcatagtcactcagttattgataagtgtaattaagagattttaaaaatcagttcacagatatccggatttaaataaacatttattgtttagtattatctgtgatatcactccccttcattaatctggagaactgaaaattgattatactactttgcactttaattagttgtatatacaagtaatagcaataaaagtacactatgagtgtctctccagaatttttcttcaagtaactttttttttttttttttttgccaatcagataatgtaacacaaaacagagaggaagaaagaaagattgacaattcacatatatctactttggaaaatattgaaaactttaaaggagaaaataaaaatcacccgtagccctgctgtttagtatgtgtttttgttgttttactttcttttaagtaacattttagttttctgattatgaaagcagcagcatcatatacactgtagaaaaaatgaaaatacatagaaagatagttggattattttcaagtattgacattttgttacaattgatacctttttgttgttgttattgtttgtttgtttgtttgtttttgagacagagtctcgctctgtcacccaggctggagtgcagtggcatgatcttggctcaccacaacctccacttcctaggttcaagcaattctcctgcctcagcctcccgagtagctgggattacaggcgcctgccaccacacctggctaatttttgtattttcagtagaggtggggtttccccatgttggtcaggctggtcttgaactcctgaccttgtgatccacctgcctcggcctcccaaagtgctgggattacggtgtgagccactgcgctaggcgcaccttgccgggcaatacattgttaaatcatgtttcttttttctttttttttctttctttttttttttttttttttttttgagacggagtcttgctttgttgcccaggttggagtggagtgtagtggcgtgatcttagctcactgcaacctccacctcccgggctcaggtgattctcttgcctcagcctcccgagtagctgggattacaggcatgtgccactgcgcctggctaagttttgtatttttagtagagatagggtttcgccatgttggccaggctggtcttgaactcctgatctcaagtgatccacccacctcggccttccaaagtgttgggattacaggctggagtgcagtggtgtgatttcggctcactgcaagctccgcctcctgggtttgcattgtccagcctaaatcatgtttcttgactgcaggtattagtgtttaaaccttttctttatttattttttttaaagagatgaggtctcaccctgtcatccaggctatagtccagtggtacgatcatagctcactgcagcttctaactcctgggctgaactgatcctaccaagtaactggcactataggcaggagccacatcatccagctaaaaaaagctgcgactacagacctgcaccaccacacccagctttttttttttttgactttttgcagacacaaggtctctataagttgcccagcatagaaatgttttttgtttgtttgtttgtttaacaggtgaggtctcataattcactgcaacctacaattcctggccttaaatgatcctgctgcttcagccttctaaagtgctgggcttacaggtatgagccactgggctcaactagaaataactttttatttatttatttatttatttatttatttatttatttatttatttttaacgagacagagtcttactctgtagcccacgctagagtgcagtagcacaataatggctcactacaacctctaactcttggcttcaagtaatctttctgccttggcctcccaaaacgctggaattacaggcatgaagccacacataacttttttttagacagggtcccaccgtgttacctaggctggagtacagcagtgcaattacggctcactgctgccttgacctcctaggctcaagtgattctcccaccttagcctcccaagtagctgggactacaggtgtgcaccaccatgcctggctaatttttgtattttttgtcgagatagcgtttcaccacattaaccaggctggtatcaaactcctgagctcaagtgacctgtccacctcagcctcccaaagtgctgggattacagccatgagccaccatgcccagcccacaaattactttttaaacaagcataccagaacttttaaatctaagcaagtattgcccttcaaaacacagagattcactttggtaggcagagcctcttccactgacatttttactacttaaaaaatatttggggtcaggcatggtggttcacacctatccctgtacattgggaggctgaggtgagaggattgcttaaggccaggagttcaagaccagacttggcaacatagtgagaccccatctctacaaaaataaaataaaattagctgggcatggtggcaggaacctgtagtctcagctacttgggatgctgaggtggaaggatcacttgagcccaggaggttgaggccgcagtgagctgagatcgtaccactgcacttcagcctaggggacagagcgagaccctgtctcagcaacaacaaaaaaattggaactacttggccaagtgcggtggctcgtgcctgtaatcccagcactttgggaggcagaggtgggcggatcacctgaggtcaggagttcgagaccagcctgaccaacatggagaaaccccatctctactaaaaatacaaaattagctgggcgtggtggtgcatgcctataatcccagccactcgggaggctgagccaggagaatctcttgaacccgggaggcggaggttgcggtgagctgagatcgtgccattgcactccagcttaggcaacaagaatggaactccgtctcaagaaaaaaaaaaaattggaactgctttttaaaactgtccctgcagggctgggtgcgtggctcatgcctgtaattccagcactttgggaggcctagagggacagattacctgaggtcaggagttagagaccagcctggccaacatggtaaaaccccatctctactaaaaataaaaaattagctgggcgtggtgacacacgcctgtaatcccagctactcggaaggctgaggcaggagaattgcttgagcctaggatacggaggttgcagtgagctgagatcatgccaccgtactccagcctggcccacagagcgagactctgtctggaaaaaaaaaaaacaaaaaaactgtccctgcaagcacattatcagctgcaccacaaaatcatttttcatactctagaggaaatgttccttttttctacaacctttttttcccctctgactccacaatgcttttcaatttatttccccttcctagagccctttaggaccccaccttcctttatagatatgctggatgctaaaagacctcagaaagagaagctgagcagaataagagaaatagagaaagcaaaccttattcagagcatatctgtaacttatgtactgccagcctgagaactgtatgttgataacatcaaaattattattttttaatttatattgtttattttttggagacagtgcctcgctctgtcgcccaggctggaatgcagtggtgcaaccttggctcactgcaaccttggctcactgcaacctctgcctccccggttcaggtgattctcgtgcctgttgaatagctgggattacaggcacctgccaccacggctggctaattttttgtattttagtagagacgaggttttaccatgttacccagcatggtctcaaactcctgagctcaggcagtccgcccaccttggcctcccaaagtgctaggactacaggtgtgaaccaccatgcctggctgatcataacatcaaaattagctgagaacagtacaaatcaactaattataagctaaaatcatgctactcacttttaggaggcaaagaaaggagaagcataagtggaaattagggtatgtaagtcaaattcagaagaacaagtaaaattctattagaataaacaccattaaagcagaagatttagctggatggtgtgatggaagtaagctataacaatgctactgcactccaggctaggcgacagagtgagacccaagtataaagactggccatgtgttttgaaagaaaatgttcaactaagtaatacacaaactagggaaaaaattcagaaatataaaaagtacacagtgaaaatttaggcatcctttcactttgtactcttgctccccaagtcctcttcccaggtaactgttaaacaattttttgtgtatagtccagggattttctgtatatatgcaagctatttccttgatagcctgatttctgatgtttaccatttttttttttttttttttttgagacagagtctctctctgtcgcccaggctggagttcagtggcgcgatctcggcacactgcaacctccgcctcctgggttcaagcagttctcctacctcagcatcctaagtagctgagattacaggtgcccgccaccatgcctggctaattttttgtatttttagtagagacggggttttgccgtgttggccaagctggtctcaaactcctgacctcaagtgatccacccatctcagcctcccaaagtgctgagattacaggcgtgagccactgtgcccagcattcttttttggtttgtttgtttgttttgtttgagatggagtttcgctctgttgccctggctggagtgaagtggcactactatcttggctcactgcaacctctgcctgccaggttcaagcgattctcctgcctcagcctcccaagtaactgggattacaggtgcctgccaccatgcctggcttatttttgtattctttttttacagccgaggtttcatcatgttggccaggctggtctccaactcctgacctcaagtgatctgcctgcctcagccttccatagtgctgagattacagatgtgagccactgcgcccagcctacttttaatactacatgaatatttctttgcgtgtgtgtgtgtgtgtgtgtgacagtgtcttgctctgacacccaggctggagtgcaatggcatgatcacagctcactgcagccttgaactccagggtccaagtgattctcccaccacaccctcctaagtagctgggaccacaggtgtgtaccaacacacccagctaattttagagctctatatttttgtagagacaaggtatctccaaatgttgctcaggctggtcccgaactcctggatcctggctaaagcgatcttcctgccctggcctcccaaagtaatgggattacaggtgtgagccacctggcctagcctaattttttatttttatttttagtagagacaaagcctcgatatgttgctcagactggtctcaaactcctgggttcaagtgatcctcctgcctcagcctcccaaagtgctgggatgatagtcatgagccacctcatgactataagcacctggcttttttttttgtgtgtgtgtgtgtgtgacggggtcttgctgcgttgtccagtctggagtgcagtggtggaatcgtatctccctgtaacctcaaaatcctggcctcaagccatcctcccagctcagcccccccaagtaactaggactacaagcatgcaccatcaccccttttttctctgtctttttaatgctagcctcacctactcccctcacaaagggagtgtttatgaagtgttgaggtgagaaagttgtctaatgaactgtagaaccatatatttacaattttatggtgacagttactcttctgctctgccaaattgatttacaaagtcagggcattttatgattatatttatagttgatgaaatatggtgttaatggtcatctatataaaatgtcatcaggaatttcctttacaagtctgatttttcataggaaaaaatgcaaaactgaaagcatattagaaataaaaagacctcagcaattacctagtttaactccctgagtttacagatgagtaaattggatctgagctttgatttaagagaggaaaattcctatatagtatatgcttaattcatgaagttgtctacctaaaaacactataataagatgctaaattctacaacagagtatgactgagaatggtcaaagtgtggagcaatatttgtgattcttccagggaaacctcaaatgaattctgaaggggagataccttccctgccatcaggcagccaatctgcaaaaccagtaagccagcccaggaaatcaacccagccagatgtttgtgcctctcctcaagaaaagccactcaggactctgtttcaccaacctgaggaagagatagaagatggtggactcttcattccaatgggtaggctttctttttctttttaattaaatgaaacctctttattgaagtataatatgtagaaaactgcacatgtcctaagatatcctgaattcactatatttttacaaatttaatacacccttgtaagcaggacccagatcaagatagagaatgttatcaatacccagaagtccatcttgtcttccctttcaattaccctctacccataggttaaccactatcctgatgtctagcatcatatattggttcaatttttttttttttttttttgagacggagttttgttcttgtcgcccaggctgaagtacaggggcgtgatctcggctcacggcaaccgctgcctcctgggttcaagtgattcttctgcctcagcctccggagtagctgggattacaggtgcctgccaccacacccggcttaatttttgtatttttagtagagacagggttttgctatgttggccaggctggtctcgaactcctgacttcagatgatccacccaccttggcttcacaaagtgctgggattacaggtgtgagccactgcgcctagccagttgttctgtctttttgtcttttatttgaatggaatcgtgtgtacattttataactgcctttttttttttaaagacagggtctcactctgtcactcagactggagtgtagtggtgccatcacggcttactgtggccttgacctcctgggttaaagtgatctttttgtctcagccctaagtagctgggactataagcgcgtgccgtcacagccagctaattttttttctttttttttgagacacagtcttgctttgttgcccaggctgctggaatgcaatggcttgatctcaggtcactgcaacctccgcctcccaggttcaagcgattctcccgcctcagcatccctagtagctgggattacaggcacctgccatcatgcccagctaatttttgtattttttgtagagacggggtttcaccgtgttggccaggctggtcttgaactcctgacctcaggtgatctgcctgccttggctttccaaagtgctgggattacaggcatgagccaccgcacccggcccagccagctaattaaaaaattttttttgtagagacggagccccactatattgcccaggctggtctcaaactgctgtgctcaattgatcctcttgcctcagcctcccaaagtgttgggatgacaggtgtgagccaccgtgcctggcattgtgactgcgtttattctctcaattttttttttttttgttttgagacagagtcttgctctgtcacccagactggagtgcagtagcgcaatctcggctcactgcagtgtctgccttccgggttccagcgattctcctgcctcagcctcctgggtagctgggattactggcacggccaccatgcagggctagtttttttatttttagtagagacgggctttcaccatgttggccaggctggtctcgatctcctgacctcaggtgatctgcccgcctcggcctcccaaggtgctaggattacaggcgtgagccaccgtgcccggcctcaacattgttttatgaaattcatccatattcttggatgtacttgtagattgttcatttttattgctgtatatcattctgttgtttgaatagtttatgtatgttttcttttctttaattttttttttagagataggtactgctctgtcacccaggctggaagttcagtgccatgatcatagctcactgcaatttgaactcctaggttcaagtgatcttcccacttcagcctccccagcaactcggactctaggtgcacgccacaatgcctggctaattttcatttttattttattattattatttttttagagacggttttcactatgttgcccaggctggttttgtatttctgggctcgagcagtccctccttgatctctcaaagtgctgggattacaggcatgagcctcctcacctggtttgctttacgttttctttatccattcaactctttgttttttctttttgcttccttgtgcccattgttacccattcaattcttcttcttcttttttttttttttttttgcgacagagtctttgttttgaaccagagtctcactctgtcgcccaggctggagtgcaatggtgtgatcttggctcactgcaacctccgcctcccaggttcaggtgattctcctgcctcagcctcctgagtagctgggattacaggtgcgctccaccactcctctgctaatttttgtatttttagtagagatggggtttcatcatgttggtctggctggtctcgaagtcctgacctcatgatccgcctgcctcagcctcccaaagtgctgggattacaggcatgagccaccgtgcctagccttttttttttttttttttttttttttttgatgtggagttttgctctcgtcacccaggctggagtgcaatggtgcaatctcggctcactgcaaccgcttcctcctgggttcaagcaattctcctgcctcagcttcccaagtagctgggactacaggcacgtgccaccatggccggctaatttttgtattatttttttttttttagtagagacagggtttcaccatgttggtcaggctggtcttgaactcctgacctcaaatgatctgcccgccttggcttcccaaagtgctgggtcacaggtgcaaaccactgcacctggccccattcaattcttgatgagcatttggatacttttcagttgtgggctactgtgagtggtgctgctgtgaacattctatagattttttgctgaacatgtgtacttctttttcgttgggtggaaatgctagcttataagtttgggcatccttaaaattcttttgaaatactaaattttttattgtgaaacataacacagacacatgactaaagacttctttatttgatttagcaaatggtttttttgtgtgtgtgtgtgaatcttgctccgtcgcccaggcttgagtgcagtggtgtgatctcggctcactgcaacctccgtctcctgggttcaagtgattctcctgtctcagcctcatgagtaattgggattacagggacacaccaccatgcccggctaatttgtattttcagtagagacgaggtttcaccatgttggccaggctggtcttgaactcgtgacctcaggtgatccacctgccttgggctcccaaggggctggaattataggtgtgagccactgcgtccagcctcactttggcaaatgcttttaaaatggacacgtaatttttcttattgcatattctagaccttcattgctatgtaggttgtaagtagtagtggtagtcgacatctgtgtcttatttctggacaaaacaggaaaatgttcagtattccttcattatatatgaggatagttataggcttttcatagaaatattttttaggttaaggaaataattttcctaagttttctgagttttttcatatattgaatttcatcaaatgctttttcctatctctattaagatcatgtttttttctctttcattttgttaatgtggtaagtttcattaggtttattgagatataaaataaaatgtatctgatgagttttgaaaaatatgtacagttgggccaggtacggtggctcacacctgtaatcccagagctttgggaggctgaggcgagtggatcacctgaggtcaggagttcaagaccatcgtgagcaacatggagaaaccccatctctactaaaaatacaaaattagccgggcgtggtggcacatgcctgtaatcccagcactttgggaggctgaggcaggtggatcacctgaggtcgggagttcaataccagcctgaccaacatggagaaaccctatctctactaaaaatacaaaattagccgggcatggtggcacatgcctgtaatcccagctactcgggaggctgaggcaggagaatcacttgaacccaggaggcggaggttgcgctgagccgagattgcaccattgcactccagcctgggcaacaaagagcgaaaactccgtctcaaaaaaacaaaagaaagaaaaatatatacagttgtgttaactgctaccacaaccaacgtggaacatttctgtcaccccaaaagttgcctaattcccctttgctatccccctttctcaaacattggcaagcactgatttctatttccatagttttgcatcttctatgcaaatgttctatacttgttataccgtcatataatatgtgtccttttacatctggtttctttcacagcataatgcttttgagatttatccactttactgttggctttctgggctaagttcctggagcagctattttggaattctgatgatgttcttggtttatttgcagaagaacaagacaatgaagaaagtgagaaaa

SEQ ID NO: 15599 - DNA, 92434 bp, Homo sapiens
gctgttgttggctgacttccggtggtgccaaagccgtttccgtggaatcaggccggctggtgagggtacaggtttgtgtgtggtggggtgggaagaggcaggtgggagctgggacacctggacgaacgatgtccaggttgagaaggtcgggtctgagggtgggcgctgggtgcgtggcggaagttaagggcgtgaagtccagtgtctagttgggaatggggactggagccagccctgggcaccgaggtggaagcgcggttaggaccccttttgaaaatgttttcctaggagagggccgtgccggggctgcctccacattggcattcattcaccctgctggtccgacttgggttcccaaaaaagtggattctgtcgagctactgctgtgtttgaggtgcctggagctgaagtagctgtctttctttccttctttttctttctttctttttctttttttcccctttttttgatctcagtaattatctgtgaaataaaagagctgccctggctactcccattctatttcttataaggtcaccaccatctctcacaggaatcaacgaaatcttcatgttttattgagctttagttactgagttttaattacatcagttgattgaggggatggagaatctcccctaatgtcttggagaaacagaagggaggtttaaaactaactgtaggtcgggcgcggtggctcacgcctctaatcctagcactttgggaggctggggcgggaggatcgcttgaggccaggagtttgagaccagcctgggtaacaaatcgagaccccgtctctacaaaaaaaaaaaaagaaaaaaagtcgttgagggtggtggcaagtgccttgtagtcctagctactcgggaggccgaggccagagggtcactggagcccaggagtctgaggctgcagtgaactaggatcttgccactgcactccggtctgggcaacagagcgagaccttgtctctggaaagaaagagagagagagagaaagaaagaaaagaagaaagagaaatctaaccttagacgcttagagttacaaataacttttatttttcagttctctagttcaggctttcatctagtactctgataagtggacattcaggcttcgcttgaacattgccagtgatctaacacaaggcggcttattctattattggatctatttatgacagtaaagttttcctgggtaataagatgccttttttttttttttttttttttttttttgacagagtctccctctgttgcccagggtggagtgcagtggcatgatcttggcccactgcaacctccacctcccgggttcaagcgattctcctgcctcagcctcccaagaagctgggactacaggtgcccaccaccatgcccggctaatttttgtattttttagtagagacagcgtttcaccatattgaccaggctggtctcgaactcctgaccttgttatccgcccgccttggcctcccagagtgttgggattacaggcgtgagccactgcaccaagccactatcagtttttatataatgcttaacatttggcccaaatgctgcacagaataagttgtttaacctctgtttcatttattattcagggagcattcattgagtatctacaatattcagtgacacattgagtatcaatactcagtgatacattgagtatctacaatacccaaatactgaactggtgcagtggcttggatgggaccgtaatcccaatgacttgggaggctgaggtgggagcattgcttgagcccaggaggtcgaggctgcagcgaactatgttcgtgccactgcagtgcagcctgggtgacagagcaagaccttgtttcaaaaaaaaaaacccagatactgctggatattagggatatgagttgaaataatcccatttctcgaaaagctgatagttttggaggaaggagatgagaaagagaaagatgagagaccattacaaaactgataagtaccgtaaaagaggtttacaaacagatactaaaagaacatagaggataccctctggtttaggtcagtaatgcccttaaaatgtgataactagaattgaagcaaaaagccaagaagtaacatagcgcagaggatagtaggactcttatcttccttgtttcgacacaaagtttgttgttaatgtagcctaacctttttttttttttttgagatggagtttcgctcttgttgcccaggctggagtgcaatggggagtgatctcggctcactgcaacctctgtctccgggttcaagtgattgtcctgcctcagcctctggagtagctgggatcacaggcgtgtgccaccacgcccggctaattttgtatttttagtagagacagggtttctccatgttgatcaggctggtctcgaactcctgacctcaggtaatctgcccaccttggcctcccaaagtgttgggattacggacgtgagccatctcgtgcccagccaacatagcctaaccttttaaacaatcacactttgcttttgatttgtttctattaatggaaatacctgtttatgaaaacagcaatagcaaacatgtattgatcatttaccatctaatgaagtagatgctattatattccattttatagctgaagacactgagattcaggttgagtaacttccacaaggtcataaagctggagagaaggtgacttgggaaacatccagacagtctgattccacagtttactctcagcatcatgctagtctaccaccctgatggtaataataacaatgtttgctggacgcggtggctcacgcctgtaatcccagcactttgggaggccgaggcgggtggatctcaaggtcaggagttcgagaccatcctggctaacacggtgaaaccccatctctactaaaaatacaaaaaaaattagccaggcgtaggtggtgcacgcctgtagtcccagctattcaggaggctgaggcaggagaatggcgtaaaacgcgagaggcggaggttgcagtgaaccgagattgcgccactgtactccagcctgggagacagagtgagactctgtctcaaaaacaaaaacaaaaacaaaaaaacacaaaaataaacccacagtgtttattaatcacttactctttaattgtaacaattctatgaagtaagagcaattattttttactgttgagggtactgaagacttgcgaggttaaatcacttggcctaggtaacagtagtccatcagtagtaatcagtagagttgagatttgaactcagtcacttaaccactgtctctcaacttccacctaaagggaaattgtgcatttggtgtgaagtattgtgttcatgatcgaacatgaataaatgaaaagataattgagtaaatgttattacttttaattaatatgaaggcagtaagaactttttattctttcagaatggaacaaaagtgggacttttaaaatgttgccctgtaagaagagaagaactacagtgacagagtccctacagcataaaggcaatcaagaggaaaacaacgtagacctagaatcagccgttaaaccagaatctgaccaggttaaggacttgagttcggtgtcactatcctgggatccaagtcatggcagagtagctggcttcgaagtacagtctttgcaggatgcaggaaatcagcttggtatggaggatacatctctgagctctggaatgctcacccagaacacaaatgtaccaattctagaaggtgttgatgtggccatctctcagggaatcaccctaccttccttggagtcttttcacccccttaatatacacattggtaaaggaaaactccacgctactggctcaaagagagggaaaaaaatgacactcaggcctgggccagttacccaagaagacagatgtgatcatcttaccctaaaggagcctttttcaggagagcctagtgaagaagtcaaggaagaaggaggtaaggtatacaaggtctctaggttacattcttgtcaataccactttgccattgctatttctggatacctttacagagtagtatttctgaaaggggatattgatttggtacggaattggaactgctgtgttgctaagggtcaacagtgaactttttttttttcttgagacggagtcttgccatgtcaccagactagagtgcaatggtgggatcttgactcactgcagcctccacctcctgggttcaagcgattctcctgcctcagtctctcaagtatctaggattacaggcatgcgccaccacgccaggctaattttgtatttttaccagagacggggtttcaccatgttggtcaagctggtctcgaactcctgacctcaggtgatacgtttgccttggcctcccaaagtgctgggattacaggtgtgagccaccgtgcctggccagcagtgaactttatgaatggatatagactttcttttcccctcccattcgctatatccacttctgtacccctttcttctttcttttttgagacggagtctcgctctgtcacccaggccagggtgcagtggcgtggtctcggctcactgcaagctccgcctcccaggttcacgccattctcctgcctcagcctcccgagtagctgggactacaggcacccaccaccatgcccggccaattttttttgtatttttagtagaggcggggtttcactgtgttagccaggatggtctcagtctcctgacctcgtgatccgcccgccttggcctcccaaagtgctggattacaagcgtgagccactgcacccagccattgtatccctttcattccattctctcatcctttatttggtgtgtctggagatgtgtatggtcttttgtgattgggcagcagcttaaagggggagactactgcctgggacactgggaaaggctctactgagatgaatgacccttccaatttgaaagatgaattgcggtttaacagaaagtggtatgggcacataggccaagaacagtgcacagagatagactggcagaaaaggatggtgacatggttgcttggaacaggtggtgggagatgacttcttttttttttttttttttttttgtgacagtctcgctctgttgcccaggctggagtgcagtggtgtgatcttggctcactgcaacctccacctcccatgttcaagtgattcccctgcttcagcctcgcgagtagctgggattacaggtgcctgccaccacgtccagctaatttttttatttttattagagaggaggtttccccatgttggccaggctggtctcaaactcctgacctcaggtgatccacgtaccttggcctcccaaagtgctgggattacaggcgtgagccaccacgccctgccaagatgactttagagtagtagattgtactaaggttgtgaaaggttttgtttttcataccaaggcatttgagcttttcctgtaggtaggtgatagtcatttaaacgtctaagtagaacacatttatgctttagaaaagataccaacttctcttattcattttttttttgatacggagtctcgctttgtcgcccaggctggagtacagtggcgtgatctcagctcactgcaacctccacctcccctgttcaagtgattctcctgcctcagcctcctgagtagctggtattacaggcgcccgccaccgtgctcagctaatttttgtatttttagtggagatggggtttcaccaggttagccagcttggtcctgaactcctgacctcaggtaacccacctgcctcagcctcccaaagtgctgggattacaggcgtgagccactgcgcccggcctagattgtgaaggtttttgtttttcatactaaggcatttgagcttttcctgtaggtaggtgatagtcattttttttttttgagacgtagtctggctctgtcgcccaggctggagtgcagtggcgcagtcttggctcactgcaagctctgcctcctgggttcatgccattctcctgcctcagcctcccgagtagctgggactacaggtgtctgccaccatgcccagctaattttttgtatttttagtagagacggggttttaccgtgttagccaggatagtgtcaatttcatgacctcgtgatccacctgcctcgtcctcccaaagtgctgggattacaggcgtgtgccaccgcgcccggccctttttttttttttttttttgaggtggagtctcgctctgttgccaggctggagtgcagtggcacgatctcatctcactgcaacctccgcctcccaggttcaagcaattctgcctcagcctcccaagtagctaggactacaggcacacgctgccacgctcagctaattttttttttttttgtattttagttgagacagggtttcaccatgctggccacgctggtctcgaactcctgacctcgtgatccaccgacctcggcctcccaaagtgctaggattacaggcgtgaaccactgcacccggcctattcattcattttgactgttaagatgttttcttttttgccgcattttaagtccacttgttcttattttgtcctactggtacattctcagtatgtggttttttattgtgtcttgtgtgtgtttatattgaagaatttcatgtttctgactctgctgtatttgaaaactgatggagtgcccaagatgagggagtttagcaataatcttgatggtatactgtgttggtcacgccctctctggcatgagctgcctgaagcacattgtcaaagatgaaagctcttttggggaaaagtgctctcctgtggaatcatcccttgtcatagcatgtggctctaaattttcagcctcattcacagtagcttgcattgttgtattgcttttgggacacctgtgttttatctggaaatgtagacaggaatagcggttttttttgtatgtgtattatatattgtttcactgctaatcttctacacaattttttagaataaaaaagggtaaatagcttgtgccattttgctaattacatagatttgacttttgatcacataaataaaaaataaaacaaggcaggacattgtcctgcacatagttgatgtggacaaatactttttattactttgaaattcttattttgatagttttccacttaatgaggcaagtgcttaagcctcagtctttttgagttctcattatttagacataaggaaaggagaaatgaaggtttttctttattctccccatgcctttcctttttttctcttttattctttttttttttttttaagagcagaatatactagatcaggacaaattaaggtgatactggaatttaggtgtttttactggaaaaaaggcatttcctttgagatagtttaaagaaaatagtaaggagataagaatcagttcaactactaattcaggaagccgggagagatgtacattcaaagcataggacagaatcaagttttctttcttttttttttttttttttttttgagacggagtctcgttctgttgcccaggctggagggcagtggtgcgatcttgactcactgcaacctccgcctcatgggttcaagcaattctcctgccgtagcctcccgagtagctgggattacaggcacccaccaccacacccggctaatttttgtatttttagtagagacggggtttcaccatgttggtcaggctggttttgaactaccttttttttttttttttttttgagacagagtctttctctgtcagccaggttggagtgcagtggcacaatctcggctcattgcaagcttcacctcctgggttcacgccattctcctgcctcagcctcccgagtagctgggactacaggcgcccgccaccacgcttggctaattttttgtatttttagtagaggcagggtttcaccatgttagtcaggatggtctcgatctcctaacgtcgtgatctgcctgcctcggcctcccaagtgctgggattacaggtgtgagccaccgtgcccagccctgctggttttgaatttctgacctcaaatgaccacccgcctcagcctcccaaagtgctgggattacaggcgtgagccacagtgcccagccccttttttttttttttttttttttttttttgagatggagtctctgttgtttaggctggagggcagtggcatgattttggctcactgcaacctctgcttcccgggttcaagcgattctcctgcctcagcctcccaagtagctgggattacaggtgtgcatcaccaggcctagctaattttttgtatcttagtagagatgggatctcatcaggttggccagcctggtctcgaactcctgacttcaggtgatccgcctgcctcggcctcccaaagtgctgggattacaggcgtgagccaccgcgcccgacctacaattccgtagttttagtaaaccattgcagtaacctacaaaacacattttgatgtttaacttttatctctcagatttttttttgtctgaaaatgacaaagaaatcctttgttctgagttttggtttaaaacataatctctatctgtgtgacatttaaaagaagcagaagacatagttctaacctcaggaagtttagaatcttaattgggaaaacaaccataaatatatactttttggaattggagcttgaaggattcacaggatttgatagattgtgagggaagaagtggaagtagaataacatattctgcaaacatgtagaaatgctgtgtttgtgtgggaaagtactaaggcttcaggtagaaagagtagatccagattatggagagccttgaagctttccccttaagaccttaagatttagaataggatgctggcagtaagggtagagaagaatgggtacaccatagacacattacaaagaaatgattaacactgctcagagactgacatgtaagatatctggggtaggggatggtgatgcatgccttcatagggaaggtatttgagagtttgaatatgagttcagatttgggtatgagttatgcaggtgaaccccaaaattggggctcagcccaggggggttcttggctttgtgcaagattcatttgcaagccaatagagaaaaaggaaagcaagtttattagagcagcagagtacaggaaatggctgccccatagacacagcaatagcagcagcccttgtgaatagatagctattccttgattatatactaaataagggcaggttattcatcaattttctagaaaaggggcagggagttcccagaaccaagagatcctcccattttaaaccatataaggtaacttctaggggttgccatggcatttgtaaactgtcatggcagtggtgggacttttcttctttgtatgtatgtatgtatatatttatttattgtttatttattttgagacagagtctcactctgttccccaggctggagtgtagtggcacgatcttggctcaccgcaacccccgcctcctgggttcaagggattctcctaccccagcctttcgagtacctgggactacaggcatgcaccaccacactcagctaattttttttgttttttgttgttttgagatggagtctcgctctgttgcccaggctggagtgcagtggcgccatctcagttcactgcaaccaccacctcctgggttcaagcgattctcctgccccagcttcctgagtagctggggttataggtacccgctaccatgcctggctaatttttgtatttttagtagagacggggtttcaccatgttggtcaggctggtctcaaactcctgacctcatgatctgccctcctcagcctcttaaagtgctggaattacaggcttgagtcactgcacctggctttttttgtatttttaattgagatgcgtttttgccatgttggccaggctggtcttgaactcctgacctcaggtgatcatctgcccgcctcagcctcccaaagtgctgggattacaggcatgagccaccatgcccagcctgtttttattttttaaaaccaatccatttaattgtgtctttcaaggtaaacaatttatggagcctggatcccaagcctgagagtgctagagctatgggtccaaaacttgtggtattctgagttcagaagggttcgaactcacggtgttcaactcacggagtcagagaacatgcggaatttgtgtattccatttagcaattttgtaaattaccagaaacagactgaaagagtctttcaagatggggaaaattcaactcctgtgttttttttgtttttttgtttttgagacagagtttcactcttgtttcccaggccgtagtgcaatggcacaacctcaatggcccctgctcggttgaagcgattcttctgcctcagcctcctgagtagctgggactacagccgtgtgccaccatgccaagctaatttttgtatttttagtagagatggggtttcaccatgttggccaggctgtctcgaactcctgacctcaagtcatccacccacctcggcctcccaaagtactgggattacaggcgtgagctaccgtgcctggcccaggacagctttttaacaagcagttaaagtggaaaagaaccccccagtagcacgctggtttagtttataagattttagtttacaaattaaaaaatctatatgttttacattttctctttatatcacttttttcctttatctttctctttgtcgtcttttgtatccttttttgctctcttctttttcctatctttttttttttttttggtgacagagtcttgctctgtcacccaggctggagtgcagtggcgcgatctcggctccctgcaagctccgcctcccgggttcacgccattctcctgcctcagcctcccgagtagctaggaatacaggtgcccgccaccacacccggctaatttttttgtatttttagtagagacggggtttcactgtgttagacaggctggtctcgatctcctgaccttgtgatccgcccgcctcggcctcccaaagtgctgagattacaggcgtgagccaccgcgcctggccggtttctttttcctgtctttcttctctgcatcccagttggcaatcttgttgatgaggttgtgtagggtgatcacagaatggatcagcgaggccaagtacactgctaccatttggttattggtcttcaggtaaaaggccttgacaaactcctataggctaatgactggcagcagcttgaagacctgcagctgatagatgaattggtggttggtggacagtttgcctgtggcaactttttccaggtagcttctggtacccagaagcttggagttcagtcccttcaaatccaggacctggtttgtgatacactgggaaagagtgcccactgtagtgtctttgatgtcttgtaacaagtgtttaactccaatttccttagcttcctctgctgcagtttcactggtcacatgctcaaatgttttcaaggctgaagttccatcttcatagacttctactgaaatatatgcttctgtaggcagccctaagtcctttggcttcatgtcactagtgaccaatactgagttacggcagtatcttttcatgatttcattgaaggcagtgtcattcttgtgtagtttagggcctatgtggtaccactcaactattctttccctggcattcaccctcttaaacattctgtatgtgtttttcaaataatcgtgggctaaaaaacaattatctttgtcatcttcattaaaagggactgtaaaactgctggatacatcaagtactttcatttgccatgaccgcaaaagcacatgaagaatgcatttctggtttccaaccttgctgattctgttgaaatgatccaccacattgagcagtacctgggggtggactaccaccttctgcaccaccaggtccagcctcatgatacactctggccaccaggcctggctccctgtgacccactggagtttcttttagcatgcaaattcattataattagtgtataataagcagtgagagcaaccgaatgtcacttttgttgccatcttggttgtaactggttttggctgctttctttgctgcatcctgttttgatcagggttttgttcttgttttgttcagcaggctctctggccagtgcttggaaaacaaatcctgcttctctcctacctcactccccccacagagattatatactccccttcaatcttacagggttttagaagggtggaagtccatcttctgtgactgcttcctgttgattttatgggcattggccctgcctagcactggaggagtaaaaatctcttgatgcctcatctaaggggtcagaacaaggatgtgttggaagccacttgctagcattatcttcacatggaaattgttgcaatctagaagacacacactacaaggaggctaaaagaggcagggccaaagattcatagttacaagatagctgctagaggtcctaaaaagagtagaaaccaggtgagacttgggagggttttttttgttgttgttattttttgggttttttgagacaggatctcgctctgtcacccaggctggagtgcagtggtgtgatcatggcccactgcagctttaacctcccaggctcaagtgatcctcctgccttagcctcctgagtagctgggaccacatgtgtttgccagcaacacccagctgatttttaaatgtttttatagagacacagtctcactatgttgcccgggctggtcttgactcctgagctcaagtgatcctcccactttagcctcccaaagtactggtattacaggcgtgagccactctgcctggccaggagggtgttttttatggtcaaccagatatagttggggtcagttccctggttatatatatgtaaccaggtggcttgctcttagaacttttgaatgttaacctcagcctgtccagagttgttaatatatgtgcagtcggtcttattgataacagtgcagactctacctttttcagtcagtaaacaatccaagactagtctgttgtcagggctacaattgccaaagagtccagagattcctgaatttttcttaatgtctgactagtgttggtggccagagattctagggcctgagttatgtttcttagcattgacttgtggtatgcaaagcccctgccaaggggccaccacccctattgctgccccaattcctgtaaaaattaatcctattgctcttttacttcttgtttttctagattttatggggttatgaatggataccccctgaagggataatggtggccaaaatacattcactggtgtttcaagtttttgataagcaaaatggaaagctattcctagaagaataaatggttccctacagggttgggagtgggtatggggtaggatttcttcccctaaaggtgagcccagatgggtcacaaattgaatccttgcaagttatgccgtccattttttattgccaaactgggtctatagagataccttttccaggttccaatgggggtgattgagtagccctcgttttccaccagagggtggtacctccatcttcccaaattaagcagtcgtttctcccttgcatgtattggtcctggaggaggcaccatgtatagtctccttgtttaccagtgggatcccgtttgccctcccatggccttgggaatttggctactagggttgggtcagagcatcgtggggaatttctgtctctgtgtcattgtcacaacaatttgtgcaaaagatagtatcattagtacactggagctgtagatacccaacatcctaggtccaggtaatagtagggggtaggagggtggttggagaggagtcaggtcaatctgttaagtgtgggagagagctgttttataagtaggggcctaggtaccaaaggaacactatggccaattaggaggtttggggagatggctgtgaggtttgcagggtgcaccagaaggtgatgctctctatcctgagggtgctgatgacagattctgcaatcatgcaggctatttcctgatgctataattctagaaatgtttactatggagttttgttcccattccacagcgagttagattgattaggagcagggagcaagaagaacagggacaactgagtatcacactgggctttagggtggtccctatactcaataaggacaagtaaggtgtttctcaggaggaggtggttgctacttatctgtcttgtgaaatagcaactttaagtcttccagaggtttgcaggtgtaggtcatggtgtcctcctcttgtgcctgtagggattcaccaaaaacaggtttgtttaatccgggacaggtgtacctagctagtgattccccgaagtttaacagcagtgggagtgcttaacaatacctaatggggagtgggtgcccttccatattggttatattataattgatcttcaaggaatccttctttccaagttttttttttttgagatgaagtcttgctctgttgcctaggctggagtgcagtggtgctatcttggctcactgcaacctccgcctcccgggttcaagtgattcccctgcctcagccttctgagtagctgggactacaggcatgtgccactatgcccagctaaattttttgtattttactagacacagggtttcaccatgttggccaggatggtcttgattccctgacctcgtgatccacccacctcggcctcccaaagtgctgggattatgggtatgagccactggcccggccctttccaagttttttttttttttttttttttttgagatggagtctcgctctgtcgcccaggctggagtgcagtggcacgatctcggctcactgcaacctccacctcccgggttcacaccattctcctgcctcagcctcctgagtagctgggactacaggtgcctgccaccatgcccggctaattttttgtatttttagtagagacgaggtttcaccatgttagccagtaaggtctccatctcctgatctcgtaatccactcgccttggcctcccaaagtgctgggattacaggcgtgagccaccacccctgccccaagtttttaataggactaggtgtcctggttaaacagggaacaatcttttcctttgtgggaaagggcaatactttattttcatattcttagagtgccttttgaacctggtctcttaagttccaaaggggagcggggggaaggtatagtgaggcttgtccaaccccttgtttcttgtcatggcctgaattagtttttcaagtttctttttttttttgagacggagtcttgctctgtcactcaggctgtagtgcagtggcacgatctcagctcactgcaacagccgccttccaggttcaagtgattctcctgcctcaggctcccaggtagttgagattacaggcgttcgccaccacgcccagctactttttgtatttttagtagagatggggtttcaccatgttggacaggttagtctccaactcctaacctcaggtgatctgtctgccttggcttcccaaagtgctgggattacaggtgtgagccactgcatccagctgccagaggcaatattgctggccaagcttttattttgttccataccaatgctgaggtggtgtgctacctgccccaggtccctcatgtcccttggtgggacgctgatggccaagggacttagattcaagtgacttatagccaattaaacattgtaggccagatggaagtggaggtaggcaggcactcattattatctcttaaaaccccttttaagcaatataagagccaaaaccagaagccaaaaaataaggttataaaactgacttatctataaattctgtgcattgagctattgtaatcttggcttgcagcaattaggtttacaaaacacaaacattttgttcagctatttaggtatctgtgtgcctgtccttgatttggaaggtctgaattaattatatccctcaaaacccagcccctataatctctcatgcccacctcttcagtagtccttgggcctggaggaattgaatagttttaaattctgtagataaaacaacacataaagaattagcaatgtttcaaacaaaaaagtcataagccctgccctagttttgagaatgacaggaaaggaatcttacaggtacctaaacatttaaattatttagtatcaaggcatagaataagttatattaattcatatagaggcaaaattattaaatgaatacaagcttgtccctgtgtctcattaaagcagtttactttttttttgagactgagtttcactcttgttgcccaggccggagtgccatggcatgatcttggctcaccgcaacctccgcctcccgggttcaagcgattcccctgcctcagcctcccgagtagctgggattacaggcatgtactaccacgcccagctaatttttgtgtatttttgatagggacggggtttctccatgttggtcaggctgatcttgaactcccgacctcaggtgatccacccacctcagcctcccagagtgctgggattacaggcgtgatcaactgcgcccgtcctaaagcagtttactttgccccttttgcccaggtctaaagacaaggctttggttaacttgagtttggtgttagatcctggcaagagttggtgccttctctagatgagctgtctgtacccaggagtcaaagccctgtaactcaaaagcacattgattagttaatagcacccgataaggaactttttaaagggctggcagtggtaatgctggagtccacaacctgtcaggaggctgtaaaaatatatcacaaccttgcagtgattagtttttatagctttgataaagcccagcaacaagccagacaatcaagctaggattcgattctgggggcatttgtaaaagatgttaaaaagcccaaaatactgtattgacacagaaccacaggttactgtaagtaatagttacttatttacccaaagtggtaatctctctgcagtgtaattgtctctccttatgggaagcccacttaactaatcttgaagttaaatttgatgaagagaaaaataatacttgaatttaatcggacaaagtatgttcaaggttttgaatatagcaggtgaacatgaaaagttttctggttactctgaaaatttagacatgtcaagaaaaaccaagagtatagaatcaagttatactggaggaaaacattgcttttatagacctctaagctaaaatatttcagcatctgactgtaaaaacagaactggaagagaaaaagttacagcaactgatgaaaaggttgaaggagagactaatgtctcaggctttctcaaggggagaaaaagctgaaagcagtgagatagaacaattgaacttatgagatatgaatctgagaaattttcaaaagaaacaagttatagaattgaaaagcaaattttcttgtaatttcattaagagcaaatcaataccttgaaacccttactttaacataggagaccattctttagaaagattccacttttaattatagctaacttaatcacataaacaattctttttataaattctcctttataaatcttatgacctgcacagaccatgtatgatatggttgaatgaactttctgacttgtccaatactacctttttttttttttttttgagacagagtctcattctgttgcccagactggtgtgcagtggtgtaatcttggctcactgcaacctccgcctcccgggttcaagcaattctcctgcctcagcctcaaaagtagctggaattaacaggcgtgtgccaccacacccagctaatttttgtattttttagtagagacaaggtttcaccatcttggccaggctggtctcaaactcctaacctcaagtgatccacccaccttggcctcccaaagtgctgggattacaggcataagccactgtgcctggcctatactacttttcctaaataactagtcattctactactctagaacaataccatataagatccttttttttttcccactgagatctgcaggattctttcttatgtagaattattctcttttatttataacctttcttaccaaaaatacctctgaacatccataactttctttacctatctctcccctacttactggttcctttctacctggttatataaataaccttttcaagtccataatttgaatcaacctttagataacttttgaattagacacaattattctttttctcaataaaaacacatcttctttggtaagttttatataaacctaagaaggaagaaatcctgaactatcagatattagcattttatagatgagaaccattccacagtttttaaaattttttattttattgtaaaatgtttccctatataatattcctttcttaattggaaatgacccaggcatccaataagcatccaaaacgattttaagattttaaattatacaaaaagttcacttataagcatttatctcattatatttacctaatttattattattatttataattttttttctttttttttttttgagacagagtctcactctgtcacccaggttggagtgcaatggcataatcttagcttactgtaacctctgcctcccggattcaagagcttcttgggcctcagcctcccaagtagctgggatgcatgcaccaccacgcctggctaatttttgtatttttagtagccatggggttttgccatgttggccaggctggtctcaaactcctgacctcaagtgatccacctgccttggccacccaaagtgctgggattacaggtgagagcccctgtgcctagctggaactatattagacaaaattggtcattattcaaagttatttcctggttaaccatttttaaactctgaacattaggtgaacccctaagtaagaatcttaaacacatgggcattttgccagtaactgagaagattcagctattttcattgagccaacaatcttaaattcgtcttatttatacaattctgaagacatttctatttccatcaattatttaatttaattaattaattttttgagacaaggtttctgttgcccaggctggagtgcagtggcatgatcacagctcactgcagcttccgcctcttggggtcaagtgatcttccacctcagcctcctgagtagctgggactataagtgtgtgctgtcacacctggctaattttttttgttttgttttagagatggagtctcactatgttgcccaggctggtcctgaactcctgggctcaagcagtcctcccaccttagcctcccaaaaggttgggaggtgtgagcgacagcacccagtctttattaataatttgaaaacaagttttatttaccaaaggattcatgtgaacttgaaaagcctttggactttattaaagatagctggatttaaatatttctgacaattttgaaacctgttcacatggctaaactttttttttctaataggtaatccaaggaaactgtagactagaatttgggtaaggtagttttcataacagttttaattttaaaaccctcttttatccttttttcccccttcagcttcagaggaggaggagatgatttaaaagggcaggaaagaaaaagagggaaaggagggagagtagggggatgaggggtacctttccctttgtttctctggtgggggagagagagagagagagatacagcaagccagaacactcattgatggatgaagggtcaccttaccatgacaacttcaatatcagatatcttggacccaagaccttgggactgtcccagggacccacaatcctagagagacatgaaccagtagaagtataataaaagaagactgaaaaggcagaaagggaaaggaagctaggaaaaacaggctcccgtagcagcaaatgtgaattggggaagagaggggttgttgttcagggcgtgtccttggagtccctgagacagtggagaactcacccatcagtggagacaccaaaaaaagtgttcaggcggctgcttttctgccattgcagggagtcgtcattaggtcaggggttcagggcctccagaaaaatgggcttgaacaaggcagctcatttgggaccctcattttgagcagaaagaaagacaggaagagacctgttgcagaaaagaaaatttatgattttaggagggactagaagaagttgctgaagtggatggaatgacagagtaaggaaaaaaatgaaacggcaccaaatgctgaaaaacctggagtatctagacattggccagtgagggtccccataccaaatgctgaaaacctgggggtggccaacagtgaggcccaaaggcatgagacctaacacagttggggccatagaataatgtgactctgacatcccagagtcagcacaaaggaatacctctcaaaataacaaaagcctgccttacatggaatagaaacaactgcccaaattgccaaaacagggactacaaacatgacaactggataaacataagtgtgcatttaggcactaagagcagaaaagtaaaatgactggtcattagaagctaaagagaaaaggtctgagagagaaggtgacaaagtaaattacaaaggacgtggatgtccaggtgtgcttctgtctggggcacccagatgatgggggacaacgaactgactaacaacccagagacactattccccatttcctgattgatttgaaaaggtaaagggagaggagagtgaaagagaaagtaaatcagttaaagaacaccacatcggccaggcgtggtggctcacgcctataatcccagcagtctgggaggccgaggcggggggatcacgaggtcaggagttcaagaccaacctggccaatgtggtgaaaccctgtctctactaaaaatacaaaaattagctgggtgtggtggcaggcacctgtcatcccagctactcgggaggctgaaagcaggagaatcgcttgaacccgggaggcgaggttgcagtgagccgagattgtgccactgcactccaccctgggtgacagagcaagatgtcgtctcaaaaaaaaaaaaaaaaaacgaaaacaaaacacacattgagggggaacaaaggggacactcatcttttcgtggaggccaaatggtgccagtcagtctttgggttcaagcaattctcatgcctcagcctcccaagtacctgggactacaggcgtgcaccaccatggctggctaattttttgtatttttagtagagccggggttttgctctgttgcccaggctagtatcgaactcctgagctcaggcaatccacctgccttggcctcccaaagtgctaggattacaggcgtgagccacggtgctcaacccaatcagtcttaatttagggtctggctaaaggtctccctcagttccttttggcttattattggtctcttcatggtcaccaaggaatgacgcaggtgaaccccaaattggggctcagcccaggagcattcttggcttcgcactggaaggaatcatgaatgggccaacagtgaattgaaagtaagtttattagagcaacagaggaagggaaatggctgctctgtaagagaagcagccgcagcagcagacctgcggattgctggctagctgtatgtatacaaagacaacatggaaaaaaaatgaaacggtgccaaatgccaaaatacccagagtatccaggcatcagcccatgagggtccccataccaaatgacgaaaatcccagagcacctagggggtggccaacagtgaccctcaaaagcatgagacctgtatagccatatatatatgggtatactttgattatatgctaaaataaggggcagatttttttttttttttaattgatcattcttgggtgtttctcgcagagggggatttggcagggtcataggacaatagtggagggaaggtcagcagataaacaagtgaacaaaggtctctggttttcctaggcagaggaccctgcggccttccgcagtgtttgtgtccctgggtccttgagattagggagtggtgatgacttaacgagcatgctgccttcaagcatctgtttaacaaagcacatcttgcaccgcccttaatccatttaaccctgagtggacacagcacatgtttcagagagcacagggttgggggtaaggtcacagatcaacaggataagaatttttcttagtacagaacaaaatgaaaagtctcccatgtctacctatttctacacagacacggcaaccatccaatttctcaatcttttccccacctttcccccctttgtattacacaaaaccgccattgtcatcatggcccgttctcaatgagctgttgggtacacctcccagacggggtggtggccgggcagaggggctcctcacttcccagtaggggcggctgggcagaggcgcccctcacctcccggacggggcggctggctgggcagaggggctcctcacttcccagtaggggcagctgggcagaggcgaaggggcggatttttaatggattttctggaaaaggggcgaggacttcccggaactgagagtccctccccttttaaaccatataaggtaacatctgggggttgccatggcatttgtaaactgtcatggtgctggtaggaggttcttttagcatgcagataaaaggagggcaacaggaggtggctttcatcaccatcttgcttttagctggttttggccagtttctttgatcagctcctgttttgttcagcggggtctttcgaacagtgcttggaaaacaagtcctgctgatctcctacctcaaatggaatgtgaggtgacaatagggccagcaagcaaaaatagaaatctgagattgaagtttagtaagaggcaaggactagaaatgttcagtgttagtcatggttcttctccatggaaacagacatggagggggaagagcagtggattgaagacaaccttgccttgaggaagaagataacagagaaggaacaactggagaagtaatagtaaaagtgaaaagaggaaggagagctttaagaacaaggtactttaaaatgtaaatttaaaatttagtagcaaaggagggataaggataatacctgagaaaaaggttacatttgaagattgatgatcttggagagtagattcaggagtttgttggggaaaggacattatatgaagcagttaaagaggaaggaatggggctgggaacagtggctcacacctgtaatcccaacactttggaaggccaaggtgtgaggatcttgtggccaggagttcaagaacagcctgggcaagatagctaggttccatctctacagaaaattttaaaaattagccaagtgtggtagtgcatccctgtagtcctagctactcaggagtagctagggggatagcttgagcccaggagttcaaggttgcagtgagctctgatcgcaccactgcattgcaacctgggtgacagagcaagaccttgtctgtaaaaaaaagaaaaaggaggaggaatgaaaccccagagatttttctttctttcctctcccccatccccctcctcccctcctcccttcctcccctcctcctctcctcccctctcctccccactctcctcttccctcttatccccttccctcacctcccctccccttccttccctttttttttttttttttttttttttttggagacagagtctcgctttgttgaccaggctggagtgcagtggtgtgatctcggctcactgcaagctccacctcccgggttcacgccattcttctgcctcagcctcccgagtagctgggactacaggcacctgccatcatgcctggctaattttttgtatttttagtagagatggggtttccccgtagccaggatggtcttgatctcctgaccttgtgatctgcccgcctcggcctcccaaaatgctgggatcacaggtgtgagccaccatgcctggccttccttcctttttttgcagtgggagaatgggtgagaaatagctagagaaggcagcgagattattgcatattttttcaagataagttgtcagaaggaactggaggaaattataagattaaaatgctagagaaggaatggataaataactatgggttcatagtcactcagttattgataagtgtaattaagagattttaaaaatcagttcacagatatccggatttaaataaacatttattgtttagtattatctgtgatatcactccccttcattaatctggagaactgaaaattgattatactactttgcactttaattagttgtatatacaagtaatagcaataaaagtacactatgagtgtctctccagaatttttcttcaagtaactttttttttttttttttttgccaatcagataatgtaacacaaaacagagaggaagaaagaaagattgacaattcacatatatctactttggaaaatattgaaaactttaaaggagaaaataaaaatcacccgtagccctgctgtttagtatgtgtttttgttgttttactttcttttaagtaacattttagttttctgattatgaaagcagcagcatcatatacactgtagaaaaaatgaaaatacatagaaagatagttggattattttcaagtattgacattttgttacaattgatacctttttgttgttgttattgtttgtttgtttgtttgtttttgagacagagtctcgctctgtcacccaggctggagtgcagtggcatgatcttggctcaccacaacctccacttcctaggttcaagcaattctcctgcctcagcctcccgagtagctgggattacaggcgcctgccaccacacctggctaatttttgtattttcagtagaggtggggtttccccatgttggtcaggctggtcttgaactcctgaccttgtgatccacctgcctcggcctcccaaagtgctgggattacggtgtgagccactgcgctaggcgcaccttgccgggcaatacattgttaaatcatgtttcttttttctttttttttctttctttttttttttttttttttttttgagacggagtcttgctttgttgcccaggttggagtggagtgtagtggcgtgatcttagctcactgcaacctccacctcccgggctcaggtgattctcttgcctcagcctcccgagtagctgggattacaggcatgtgccactgcgcctggctaagttttgtatttttagtagagatagggtttcgccatgttggccaggctggtcttgaactcctgatctcaagtgatccacccacctcggccttccaaagtgttgggattacaggctggagtgcagtggtgtgatttcggctcactgcaagctccgcctcctgggtttgcattgtccagcctaaatcatgtttcttgactgcaggtattagtgtttaaaccttttctttatttattttttttaaagagatgaggtctcaccctgtcatccaggctatagtccagtggtacgatcatagctcactgcagcttctaactcctgggctgaactgatcctaccaagtaactggcactataggcaggagccacatcatccagctaaaaaaagctgcgactacagacctgcaccaccacacccagctttttttttttttgactttttgcagacacaaggtctctataagttgcccagcatagaaatgttttttgtttgtttgtttgtttaacaggtgaggtctcataattcactgcaacctacaattcctggccttaaatgatcctgctgcttcagccttctaaagtgctgggcttacaggtatgagccactgggctcaactagaaataactttttatttatttatttatttatttatttatttatttatttatttatttttaacgagacagagtcttactctgtagcccacgctagagtgcagtagcacaataatggctcactacaacctctaactcttggcttcaagtaatctttctgccttggcctcccaaaacgctggaattacaggcatgaagccacacataacttttttttagacagggtcccaccgtgttacctaggctggagtacagcagtgcaattacggctcactgctgccttgacctcctaggctcaagtgattctcccaccttagcctcccaagtagctgggactacaggtgtgcaccaccatgcctggctaatttttgtattttttgtcgagatagcgtttcaccacattaaccaggctggtatcaaactcctgagctcaagtgacctgtccacctcagcctcccaaagtgctgggattacagccatgagccaccatgcccagcccacaaattactttttaaacaagcataccagaacttttaaatctaagcaagtattgcccttcaaaacacagagattcactttggtaggcagagcctcttccactgacatttttactacttaaaaaatatttggggtcaggcatggtggttcacacctatccctgtacattgggaggctgaggtgagaggattgcttaaggccaggagttcaagaccagacttggcaacatagtgagaccccatctctacaaaaataaaataaaattagctgggcatggtggcaggaacctgtagtctcagctacttgggatgctgaggtggaaggatcacttgagcccaggaggttgaggccgcagtgagctgagatcgtaccactgcacttcagcctaggggacagagcgagaccctgtctcagcaacaacaaaaaaattggaactacttggccaagtgcggtggctcgtgcctgtaatcccagcactttgggaggcagaggtgggcggatcacctgaggtcaggagttcgagaccagcctgaccaacatggagaaaccccatctctactaaaaatacaaaattagctgggcgtggtggtgcatgcctataatcccagccactcgggaggctgagccaggagaatctcttgaacccgggaggcggaggttgcggtgagctgagatcgtgccattgcactccagcttaggcaacaagaatggaactccgtctcaagaaaaaaaaaaaattggaactgctttttaaaactgtccctgcagggctgggtgcgtggctcatgcctgtaattccagcactttgggaggcctagagggacagattacctgaggtcaggagttagagaccagcctggccaacatggtaaaaccccatctctactaaaaataaaaaattagctgggcgtggtgacacacgcctgtaatcccagctactcggaaggctgaggcaggagaattgcttgagcctaggatacggaggttgcagtgagctgagatcatgccaccgtactccagcctggcccacagagcgagactctgtctggaaaaaaaaaaaacaaaaaaactgtccctgcaagcacattatcagctgcaccacaaaatcatttttcatactctagaggaaatgttccttttttctacaacctttttttcccctctgactccacaatgcttttcaatttatttccccttcctagagccctttaggaccccaccttcctttatagatatgctggatgctaaaagacctcagaaagagaagctgagcagaataagagaaatagagaaagcaaaccttattcagagcatatctgtaacttatgtactgccagcctgagaactgtatgttgataacatcaaaattattattttttaatttatattgtttattttttggagacagtgcctcgctctgtcgcccaggctggaatgcagtggtgcaaccttggctcactgcaaccttggctcactgcaacctctgcctccccggttcaggtgattctcgtgcctgttgaatagctgggattacaggcacctgccaccacggctggctaattttttgtattttagtagagacgaggttttaccatgttacccagcatggtctcaaactcctgagctcaggcagtccgcccaccttggcctcccaaagtgctaggactacaggtgtgaaccaccatgcctggctgatcataacatcaaaattagctgagaacagtacaaatcaactaattataagctaaaatcatgctactcacttttaggaggcaaagaaaggagaagcataagtggaaattagggtatgtaagtcaaattcagaagaacaagtaaaattctattagaataaacaccattaaagcagaagatttagctggatggtgtgatggaagtaagctataacaatgctactgcactccaggctaggcgacagagtgagacccaagtataaagactggccatgtgttttgaaagaaaatgttcaactaagtaatacacaaactagggaaaaaattcagaaatataaaaagtacacagtgaaaatttaggcatcctttcactttgtactcttgctccccaagtcctcttcccaggtaactgttaaacaattttttgtgtatagtccagggattttctgtatatatgcaagctatttccttgatagcctgatttctgatgtttaccatttttttttttttttttttttgagacagagtctctctctgtcgcccaggctggagttcagtggcgcgatctcggcacactgcaacctccgcctcctgggttcaagcagttctcctacctcagcatcctaagtagctgagattacaggtgcccgccaccatgcctggctaattttttgtatttttagtagagacggggttttgccgtgttggccaagctggtctcaaactcctgacctcaagtgatccacccatctcagcctcccaaagtgctgagattacaggcgtgagccactgtgcccagcattcttttttggtttgtttgtttgttttgtttgagatggagtttcgctctgttgccctggctggagtgaagtggcactactatcttggctcactgcaacctctgcctgccaggttcaagcgattctcctgcctcagcctcccaagtaactgggattacaggtgcctgccaccatgcctggcttatttttgtattctttttttacagccgaggtttcatcatgttggccaggctggtctccaactcctgacctcaagtgatctgcctgcctcagccttccatagtgctgagattacagatgtgagccactgcgcccagcctacttttaatactacatgaatatttctttgcgtgtgtgtgtgtgtgtgtgtgacagtgtcttgctctgacacccaggctggagtgcaatggcatgatcacagctcactgcagccttgaactccagggtccaagtgattctcccaccacaccctcctaagtagctgggaccacaggtgtgtaccaacacacccagctaattttagagctctatatttttgtagagacaaggtatctccaaatgttgctcaggctggtcccgaactcctggatcctggctaaagcgatcttcctgccctggcctcccaaagtaatgggattacaggtgtgagccacctggcctagcctaattttttatttttatttttagtagagacaaagcctcgatatgttgctcagactggtctcaaactcctgggttcaagtgatcctcctgcctcagcctcccaaagtgctgggatgatagtcatgagccacctcatgactataagcacctggcttttttttttgtgtgtgtgtgtgtgtgacggggtcttgctgcgttgtccagtctggagtgcagtggtggaatcgtatctccctgtaacctcaaaatcctggcctcaagccatcctcccagctcagcccccccaagtaactaggactacaagcatgcaccatcaccccttttttctctgtctttttaatgctagcctcacctactcccctcacaaagggagtgtttatgaagtgttgaggtgagaaagttgtctaatgaactgtagaaccatatatttacaattttatggtgacagttactcttctgctctgccaaattgatttacaaagtcagggcattttatgattatatttatagttgatgaaatatggtgttaatggtcatctatataaaatgtcatcaggaatttcctttacaagtctgatttttcataggaaaaaatgcaaaactgaaagcatattagaaataaaaagacctcagcaattacctagtttaactccctgagtttacagatgagtaaattggatctgagctttgatttaagagaggaaaattcctatatagtatatgcttaattcatgaagttgtctacctaaaaacactataataagatgctaaattctacaacagagtatgactgagaatggtcaaagtgtggagcaatatttgtgattcttccagggaaacctcaaatgaattctgaaggggagataccttccctgccatcaggcagccaatctgcaaaaccagtaagccagcccaggaaatcaacccagccagatgtttgtgcctctcctcaagaaaagccactcaggactctgtttcaccaacctgaggaagagatagaagatggtggactcttcattccaatgggtaggctttctttttctttttaattaaatgaaacctctttattgaagtataatatgtagaaaactgcacatgtcctaagatatcctgaattcactatatttttacaaatttaatacacccttgtaagcaggacccagatcaagatagagaatgttatcaatacccagaagtccatcttgtcttccctttcaattaccctctacccataggttaaccactatcctgatgtctagcatcatatattggttcaatttttttttttttttttttgagacggagttttgttcttgtcgcccaggctgaagtacaggggcgtgatctcggctcacggcaaccgctgcctcctgggttcaagtgattcttctgcctcagcctccggagtagctgggattacaggtgcctgccaccacacccggcttaatttttgtatttttagtagagacagggttttgctatgttggccaggctggtctcgaactcctgacttcagatgatccacccaccttggcttcacaaagtgctgggattacaggtgtgagccactgcgcctagccagttgttctgtctttttgtcttttatttgaatggaatcgtgtgtacattttataactgcctttttttttttaaagacagggtctcactctgtcactcagactggagtgtagtggtgccatcacggcttactgtggccttgacctcctgggttaaagtgatctttttgtctcagccctaagtagctgggactataagcgcgtgccgtcacagccagctaattttttttctttttttttgagacacagtcttgctttgttgcccaggctgctggaatgcaatggcttgatctcaggtcactgcaacctccgcctcccaggttcaagcgattctcccgcctcagcatccctagtagctgggattacaggcacctgccatcatgcccagctaatttttgtattttttgtagagacggggtttcaccgtgttggccaggctggtcttgaactcctgacctcaggtgatctgcctgccttggctttccaaagtgctgggattacaggcatgagccaccgcacccggcccagccagctaattaaaaaattttttttgtagagacggagccccactatattgcccaggctggtctcaaactgctgtgctcaattgatcctcttgcctcagcctcccaaagtgttgggatgacaggtgtgagccaccgtgcctggcattgtgactgcgtttattctctcaattttttttttttttgttttgagacagagtcttgctctgtcacccagactggagtgcagtagcgcaatctcggctcactgcagtgtctgccttccgggttccagcgattctcctgcctcagcctcctgggtagctgggattactggcacggccaccatgcagggctagtttttttatttttagtagagacgggctttcaccatgttggccaggctggtctcgatctcctgacctcaggtgatctgcccgcctcggcctcccaaggtgctaggattacaggcgtgagccaccgtgcccggcctcaacattgttttatgaaattcatccatattcttggatgtacttgtagattgttcatttttattgctgtatatcattctgttgtttgaatagtttatgtatgttttcttttctttaattttttttttagagataggtactgctctgtcacccaggctggaagttcagtgccatgatcatagctcactgcaatttgaactcctaggttcaagtgatcttcccacttcagcctccccagcaactcggactctaggtgcacgccacaatgcctggctaattttcatttttattttattattattatttttttagagacggttttcactatgttgcccaggctggttttgtatttctgggctcgagcagtccctccttgatctctcaaagtgctgggattacaggcatgagcctcctcacctggtttgctttacgttttctttatccattcaactctttgttttttctttttgcttccttgtgcccattgttacccattcaattcttcttcttcttttttttttttttttttgcgacagagtctttgttttgaaccagagtctcactctgtcgcccaggctggagtgcaatggtgtgatcttggctcactgcaacctccgcctcccaggttcaggtgattctcctgcctcagcctcctgagtagctgggattacaggtgcgctccaccactcctctgctaatttttgtatttttagtagagatggggtttcatcatgttggtctggctggtctcgaagtcctgacctcatgatccgcctgcctcagcctcccaaagtgctgggattacaggcatgagccaccgtgcctagccttttttttttttttttttttttttttttgatgtggagttttgctctcgtcacccaggctggagtgcaatggtgcaatctcggctcactgcaaccgcttcctcctgggttcaagcaattctcctgcctcagcttcccaagtagctgggactacaggcacgtgccaccatggccggctaatttttgtattatttttttttttttagtagagacagggtttcaccatgttggtcaggctggtcttgaactcctgacctcaaatgatctgcccgccttggcttcccaaagtgctgggtcacaggtgcaaaccactgcacctggccccattcaattcttgatgagcatttggatacttttcagttgtgggctactgtgagtggtgctgctgtgaacattctatagattttttgctgaacatgtgtacttctttttcgttgggtggaaatgctagcttataagtttgggcatccttaaaattcttttgaaatactaaattttttattgtgaaacataacacagacacatgactaaagacttctttatttgatttagcaaatggtttttttgtgtgtgtgtgtgaatcttgctccgtcgcccaggcttgagtgcagtggtgtgatctcggctcactgcaacctccgtctcctgggttcaagtgattctcctgtctcagcctcatgagtaattgggattacagggacacaccaccatgcccggctaatttgtattttcagtagagacgaggtttcaccatgttggccaggctggtcttgaactcgtgacctcaggtgatccacctgccttgggctcccaaggggctggaattataggtgtgagccactgcgtccagcctcactttggcaaatgcttttaaaatggacacgtaatttttcttattgcatattctagaccttcattgctatgtaggttgtaagtagtagtggtagtcgacatctgtgtcttatttctggacaaaacaggaaaatgttcagtattccttcattatatatgaggatagttataggcttttcatagaaatattttttaggttaaggaaataattttcctaagttttctgagttttttcatatattgaatttcatcaaatgctttttcctatctctattaagatcatgtttttttctctttcattttgttaatgtggtaagtttcattaggtttattgagatataaaataaaatgtatctgatgagttttgaaaaatatgtacagttgggccaggtacggtggctcacacctgtaatcccagagctttgggaggctgaggcgagtggatcacctgaggtcaggagttcaagaccatcgtgagcaacatggagaaaccccatctctactaaaaatacaaaattagccgggcgtggtggcacatgcctgtaatcccagcactttgggaggctgaggcaggtggatcacctgaggtcgggagttcaataccagcctgaccaacatggagaaaccctatctctactaaaaatacaaaattagccgggcatggtggcacatgcctgtaatcccagctactcgggaggctgaggcaggagaatcacttgaacccaggaggcggaggttgcgctgagccgagattgcaccattgcactccagcctgggcaacaaagagcgaaaactccgtctcaaaaaaacaaaagaaagaaaaatatatacagttgtgttaactgctaccacaaccaacgtggaacatttctgtcaccccaaaagttgcctaattcccctttgctatccccctttctcaaacattggcaagcactgatttctatttccatagttttgcatcttctatgcaaatgttctatacttgttataccgtcatataatatgtgtccttttacatctggtttctttcacagcataatgcttttgagatttatccactttactgttggctttctgggctaagttcctggagcagctattttggaattctgatgatgttcttggtttatttgcagaagaacaagacaatgaagaaagtgagaaaaggagaaaaaagaaaaagggtaccaagaggaaacgagatggaaggggtcaagaagggaccttggcatatgacctgaaactggatgacatgcttgaccgtaccttggaggatggtgccaagcagcacaatctaacagcagtcaatgtccgaaacatccttcatgtgagtaagactggggcagttatgtaaatggaagggaactttttcatggaaagcatataaaaatgttcagcaaattcttgactcttgatacgtgaattaccgattttgtgggttacccgtgacagaacattttacatttttacatatttaagatagctttctccttgcactcagtacaagtttgaaatatgaacacatgttaaagaagaatttaattggaaagataaactgttcctgtttccttccactgattttcatatttactgtattgtttagtagattcaatgttgataatgttcatagtgggtttactcttgtgggtcgatatgtctaaaaagatgcctggttaatagtttattgcactttgtacatatgtaaatacttttcttgatatgtagcaacacagctatttgcagagcctttgctcttgttactctttctcttaagcatatagttacttacctcaggatctccttttatgtgagccattcctgttcctagtagcagctaatgagattggttcatttgctgctacattgtttgaaactgtgtggttctggccaaaacttacttctgccttctttgctttcagttgccttgctttaccccagtctgatgctattcgagtatatggttctcatttgtcctgtacataggtctgacagttacatggagagatgagtattgtctaggtgacaaacccttgttgcataaagtgaaatttcatctttctccaggaagtaatcacaaatgaacacgtggtagctatgatgaaagcagccatcagtgagacggaagatatgccaatgtttgtgagtagttgattatcactcttttaatgtcttggaacagagttatctctaaactggctaagggtaggaggtcacttaggagtttgtaaacagtttggcagctggggttaaagttagcatttcaaaacataagaattacttggtaatttttacttattttatttgttattttattattattattattttattattattatttttttttgagacggagtcttactctgtcacccaggctggagcgcagtggcgcgatcttggctcattgcaagctccgcctcccgggttcaggccattgtcctgcctcagcctcctgagtagctgggactacaggggcctgcaaccacgcccggctaattttttgtatttttaatagagacggggtttcaccacgttagccaggacggtctcgatctcctgaccttgtgatccgcccgcctcggcctcccaaagtgctgggattacaggcgtgagccaccgcgcccggccttgttattttattattattatttttttagagacagggtcttgctctgtcaccaaggctggactcaaactcctaagctggactcagcgatcctcccagttcagcctcttgagtagctgggactacaggaacatgcgactatgcccagctaatttaaaacaatttttttgtagggagggtgtctcactctgttgctcaggctggtctcaaactccttgcctcaagccatcctcccaccttggcccctaaagtgctaggattataggcatgagccacctcactgagctgtgatttttattgaggatttcctttctgtttttttctccttaggagcctaaaatgacacgctctaaactgaaggaagtagtggaaaaaggagtggtaagtattctgtttttttgttgttggtttttttttagcttggtgaataggatctaattcacccatagggaaaaatataggaaagattgtggtctgaatttgcctctttaaagaaatatttataaaagacagtagaattgtttctacatgatcataagctatgataatcatagtttattttagtagatatgaagcattgctttttggaattgctagatagataaccatttggaatagttgaaatcaataggtgagaccagtttttctatttatgttacaacacatgttgcaaagtgtttagtatttttcatagtgtgttccaggggccagttgcataaaaatcactttggtgtgggatccctcaggcatgcttattaaaaatgcatacttttggctgggtgtagtggctcatgcctgtaatcccagcactttgggaggccgaggcagatggatcacttgaagtcaggagttcgagaccagcctggccaacatagtgaaactctgtctctactaaaaatacaaaaattagctgggtgtggtggtgtgcgcctataatcccagctgcttgggaggctgaggcacaagaatcacttgaacccgggggcggaggttgcagtgagtggagattgcaccactgcactacagcctgggcaacggagtgaaactgtctcaaaaaaacaaaaacaaacaaaaaaatctccatacttttgagcccaccccagacctgagaatcaggacccatgggcagggccttggaatatgcattggcaaaaacacaacagttaattcttttgaatactaaagtgttgagaaccacttgaagacatctgaagtattctgtgcagcaagctctttggtgcttggagctgtgctatatccttcttaataagcacttgactagtttgtgcttacaaggcaggtaatagtcatgagggagttcattatatttctgatagtaaggaagatttgccttacagaccgaaaatatgtatcataggttttatctgtcctggttttattccttggagactgatagaagaaacaggtctaggctgggcttggtggctcatgcctgtaatcccagcactttgggaggtggaggtaggaagattgcttgaagccaggagttcaagaccagcctgggcaacgtaatgagaccgagaccttgtctagaaaaaaaagcaagaaaaggaattggtgtattcttccacattacttttcctacagttgaagaaaactagtatgttatttcataacattcttttcttggctatacatcccccaatttctccccccctttttattttgggagtcttgcttcatcgtccaggctggagtgcagtggcacaattctggctcactgcaacctctgcctcccaagctcaagtgattctcctgcctcagcctcctgagtagctgggattacaggtgcgtgccaccatgcccggctaatttttttgtattttttaaaatttttattagagatggggttgcaccatgtttggccagcctggtttcaaactcctgacctcaaatcatctgcccgccttggcctcccaaagtactgggattacaggcatgagccactgtgcctggcctttttgttttgagatggagtctcactctgtcacctaggctggagtgcagtggtgcgatctcagctcactgcaacctctggctcccaggttcaagcgattctcatgcctcagcctgctgagtagctgggattataggcatgcaccaccacacgcatctaatttttgtagttttagtagagatggggtttcaccatgttggccaggctggtttccaattgacccatgtgatcgcccgccttgtcctcccaatgtgctaggattacaggcgtgagccactgtgcccgtcccatatccttttaaaagtatgccaaaagaagactctactgaaccagatatggtttgactagtagttagattatctccacagtgttccagattacatatttctcctaatgtagcctaaggtcaaattgacctttgtttttggcaatcacatcactttttttggtctggttgactaactcttgttgcataaattgaaatttcatctttctctaggatgtgttcacaaatgaataggtggtagctatgatgaaagcagccatcagtgaggaagttctatgaagtctacttgacatatagaatataattaacatggctgggcacggtggctcatgcctgtaatcccagcactttgggaggccgaggcagctggatcacctgaggtcaggagtttgagaccagcctggccaacatggcgaaaccccgtctctactaaaaatacaacagttagctgggcgtgtggtgggcgcctgtaatcccagctacagagacgagaggatcgcttgaactcaggagggagaggttgcagtgagcggagaccatgccactgcactccagcctgggtgatagagcaagactctgtcttaaaaaaaaaaaagaatataattaacattaattctttatttgatttggggaaaaaaaatccaaggagatcaaattaggctctgaattatgtttattggccatgaatatagatgtggagaagttgggccatccaagacggtatagtttacgtaggagagcaagtattaaaatgtaggtctcttgcttcttaattctttctttttttttttttttttttcagtgacttgctctgttgctcaggctagagtacagtggcctaatcatagctcactgcagccttgaactccttcctgtgctcaagggatcttcctgccttagcctcgcagacagctaggcctataggcatgtgccaccatgtccagctaattggtttttttgaaacattcttttgtagaaatagggtcttaatgtgttgcccaggctgaactcaaactcctgggctcaagtgatccttctgccttgatctcccaacatggggggattacaggcatgagccgctatacttggccttcttaattcttactagactgactccaacacacttctgaatgctggcttgcctttctaatggatttggcagtaggtaggaaagggaaatgggcctgaatcacatcattccctttaccctatattggtcccacctacacagcactagataaatggtcagaacatagcagggctgatttgatttgagaagctaagactccttttagagacagaacctaatggccagttggcttttgttcataaggtgcttttggttgggttacaattaaatggtcaagaaattatacatcctcaatggcattttatcagcagtatataagaactttaaaaaagttctttaggctagatgtggtggctcacacctataatcccagtgctttgagaggctaaggtgggaggattgtttgagcccaggattttgagaccagcctgggaaacctaatgagactccatctctacaaaaaatttaaaaaattagtgaggcctggtgaggaggcatgcctgtagtcctagctaattagtaggctgaggcaggaggatcgcttgagctcaggaatttgaggctgcagtgagctctgattgtgctgctgctctagcctaggcaacagggcaagatcctgtctcaaaacaaaaacaaaaacaagaaaaactttccccctagctcttataaaaattttcaaacattcaaaaagttgaaagattgttacaatgaatctaaattccaagagtaatattttgccatatttgctttatatctctctgtgttgttttttcctgtactattggaaaaataagtgtggacaacatgaaactttgccctaaatgccctggtaaaagcttttttttttttttttttttttaagaaaaaaaaaagcccataggcagagcagggctaccccataggcagaatagtccataaaagcttttcatggctggctttttggagttgtacttatggtggattcatgtaactgattacaaaaatatattgctgttaaaagactactgtaaccaaaatatcttaggtttgtgtagtttaatagtttataaatagttgtcacatctgttgttccatgtaaaccgcagctgtgatatgaacaaggtagacattgttttcttcatttatagaaagaagtgaggcttaccaggtgtaaggcagaaatgctaatgacagtaatagattctttcctggtttcttctttctaactctgacaaataattgagagtataccctcagggataatcaacacctctagatcactgcagttacttgttaagtatatggctgttagtgatggtacagaggaagtaaacatgaaaaacaattatttcagttaagataacttaattatttatattctttgttggtaggtaattccaacatggaatatttcaccaattaagaaggccaatgaaattaaggtaaacttggaagaaataattgttattcttttccagaaagacttcatcggttttgaaacttaagtacttcctctttaacttttcttgatcaatctttgttttaattccagctttgtttttttccattctattactcttaggtttgtatctcatggaattcactttaacctctgcctcgtgttatttgctttagctgtacattatgctcttaggattttttttttttctgccctgcttcttccccttattttccaaatacgtatgatttgtgtttcccattacttcatttctttctaattgtactaatgtagcctcctcagtttgtggatatccaccttgaagaagatgattcctcagatgaagaataccagccggatgatgaagaagaagatgaaactgctgaagaggtcagtgaatgttagttggtaatatttgtcttaatagagcagggtatactttgcttccttagtaatgtcacttgtagagaggattgagacatggttcttttttcagctcatttctgtgctttaagctgtttttctgccctttatactcccttaattttagaatttgttgtattatgaaatacagcatagaaacgtgcatagaataaaaatgtatagctttggttattataatgcaaatcctcatgaaactcatagcaaagtcaagaaatatatcattactaggacaacccctgtataccctccccagtcacaatcacctccctccccctaaaaataaccactaccctgccttttagtaattatttctttgcttttctttatagttgtatcacctcaatatgtatctctacacactgtagttcaattgttactgttttgaactttatataaatggacccatgtttatatgttttgttcctagctttttaaaattcaacattaagcttttgagattcatttatactattggttttagctatacttcgttccctttcattgctgtgttaatatgttctttgacttgtttcttaatgtgttctttgaattgttttgtaaaaggattttagaccaaggccttacactttgtaatgcagattaggatagtgatctgatccctgtccccacctttaggattttttttttgagtctcctctgttgcccatggagtgcagtgtgcgatgttggctcactgccatctccatctcccgggttcaggcaagtctcctgcctcagcctcctgagtagctggaattaacaggcgtgcgctaccatgcctggctaatttttgtatttttagtagagatggggtttcgccatgttggccaggctggtctcggacttctgacctcaagtgatccacccgcctcggccttccaaagtgctgggattacaggcataagacactgactgcacctggcctttaagtttctatttaaattttattttctgttactgtaactagttgagtgatggattttatttatttatttatttatttttgagacagagtctcgctctgccacccaggctggagtgcagtggcgtgatctcggctcactgcaacctccatctcctggattcaagtgatactcctgcctcagcctcccgagtagctgggattacaggtgcacgccaccgcgcctggcttatttttgtatttttagcagagacgggtgttcaccatgttggccaggctgagtgattgatattttatgattccttctcttgagatacttcagactttgtggaatgaggtaggggcataaatattaaggcgaactggatttattttgtagagcttattggaaagtgatgttgaaagcactgcttcatctccacgtggggcaaagaaatccagattgaggcagtcttctgagatgactgaaacagatgaggagagtggcatattatcagaggtaaatcggcatcatacaaaagagatgttagacataactgtctaagtagattttttaactgtataagtagattatttatccatggtgattctgggctgtcaccctttttcaaagtttcttaagttagtaaacagttcagagaaggctagaactcagtgatagccaaagaacttttctgagttctcattaaggggccaaaaatgtgcaactagcagagtttcttttctcctacccttctcttctttcatatctgtgctttttaatattgtcctaaagccattgttattaatttcccacattttggtaaactaagtagcattctgttgacttctctagaaataggatgaaaactaattagatcaatacacttggtgtctttgtttttatgtaactctaactagagaagagaaaggacaatggtgtatggaaagtctgcctctttttccctctctttttttcctttttttgctttctctttctttcttacctccttccttttttgatgcagtcacctcttttaatcaggctgagaaagtcaccacaccagccatcaggcacatcagtgctgaggtagtgcccatggggcccccgccccctccaaagccgaaacagaccagagatagtactttcatggagaagttacatgcggtagatgaggagctggcttccagtccagtctgcatggattctttccaggtaaatattaaaactgtacttaactgagaaagtcaagtggagtaatgtagttgttgctcaggctgggaagggagaggaaaagataactacaattttatataagtaagagttagtctttgatactttgtatttggctagtgctattttctgctcaaagtgacaatggcagtttggggttttttttgtttgtttgtttgtttttgagacagggtatcaccctgtcacccaggcttgagtgcagtggtgtgatcttggcccactgcaacctccgcctcccagactcaagtgatcttcccacctcagcctcccgaataggtgggacaggtatatgccaccacacctggctaatattttagttttttgtagagatgaggtctccctatatttttgctcaggctggtattgaactcctgggctcaagtgatcctcccaccttagcctctcaaagtggtaggactactggtgtgaaccaccgtgcctggctgagaatggcagtttctaaggaagaaatgaactatgtagcagagagcattttaaaatgtagaacataggaaaaagcttcacccaaattcccccaaattaaccttttaccacaattgcttgatggttctcttcctctttctctgtatatacacatagtgttttctaaatcattttagagtgtgatgcaggcatgatgccattttacctctgcatgcttttgtgtatattttctaaaaatgagtttattatcttgtattaacacagtataatagtgttaatcaaaatcaggatacaggctgtgcgctgtggctcatgcctgtaatcctagcactttgagaggccaaggttggtggatcacttgaggtcaggagttcgagaccagcctggccaacatggtgaaacccccatctcgactgaaaatacaaaaatttgccaggtgtcgtggcgcatgcctgtaatcccagctacttgggaagctgaggcaggagaatcgcttgaacccgggaggcagaggttgcagtgagctgagattgcgccactgcactccagcctgggcaatggagagagactctgtcccaaaaaaaaaaaaaaatcaggatacagtaatattacataatatattaaagtgcttattctggttttatctgttgtcccaacaatgccctttatgttggaggaaaaaaatttttttttccctattcagcattcaaccctggattaaatatctatttaattatcttgttctttagtctcctttaatctggaacagtttctcagtctttgtcttttataaccttgacagttttgaggagtatgcaccatttattttgtagaatgttcttcaatttttatttttctaatatttcctcttagattcaggttttgcacttttgttacaaatactggaagagtgatgtgtgtttctcattgcatcatatcagaaggcacgtgatccctgtaatgttaactttcatcacttggttaaggtggtgtgtgcttggttttcccattgtaaagttattattttccatttttaattagtatatatcatgtggggatatacttcaaagccgaattcctttctttctgtttttttttcctagatggagtctcactctcttgcccaggctggagtgcagtggcgcgacctcagctcactgcacctctgcttcctgggttcaagtgattctcctgcgttagcctcctgagtagctgggattacaggtgcccaccaccacgcctggctaatttttgtattttttagtagaaatggagtttcactgtgttagccaggatgatcttgatctcctgacccgcctcagcctcccaaagtgctgagatgacatgcgtcagccaccgcgcccagccttctttttttttttttttttttttttttgagacagagtcttgcctgtctcccaggctggagtgcagtggtgccatcttgggtcactgcaacctccacttcggggttcaagcgattctcctgcctcagcctcctgagtagctgggattacaggtgactgacaccacacccagctaattttttgtatttttagtagagatggggtttcaccacattggccaggctggtctcgaactcctgacctcaagtgatctgcccaccttagcctcccagagtgctgggattacagacgtgagccaatgcacccagcccaatcaatcaaattatttttctcacactaatattagcatccattgattattctttcttttttttttttttttttttttttttgagacggagtcttgctctgtcctctaggctggagtgcagtggtgcgatctcggctcactgcaagctccgcctcccaggttcacatcattctactgcctcagcctcccgagtagctgggactacaggcgcccgcaccatgcgcggctaattttttgtatttttagtagagatgggggtttcaccgtgttagccaggatggtcttgatctcctgacctcatgatccacttgcctcggcctcccaaaatgctgggattacgggcgtgaaccaccacgcttggcctgattttctttcttgaaacagtctttactatggtcgttgtcaaatgatgactttgtaattctaacatttagtgagtaattttttattttttggatatggagtcacagtctgtcacgcaggctggagttcggtggtgtgatctcagctgactgcaacatctgatctgcctcccgggttcaagcagttctcgtgcctcagcctcctgagtagctgggaccagaggcacacaccactacgccagctaattttttgtattttttagtagagacagggttttattgttggccaggctggttttgaactggccttaggtgatccacccttgtcaacctcctaagtgctgggattataggcatgagccactgcgcctggccttagccagtaaattttttttttttttttttgagacggagtctcactctgtcgcccaggctggagtgtgatggcgtgatctcggctcactgcaagctctgcctcccaggttcatgtcattctactgcctcagcctcccgagtagctgggactacaggcgtgcacaccatgcccggctaattttttgtattttttggtagagacggggtttcactgtgttagccaggatggtctcgatctcctgacctcatgatccgcctgccttggcctcccaaagtgctaggattacaggcgtgagccaccatgcctggccttagccagtaaattttaatgttccaagtttcccctatcattcttgcaggtcaatgaaaaatgtctgtcctaaaattttaaagtatgatataataatttaaaaagaaatcctaaaattaaaaaatataattaaggctgggtgtggtggctcacacctgtaatcccagcactttgagaggcccaggcgggtggatcacccgaggtcaggtttgagaccagcctggtcaacatggtgaaaccccgtctccactaaaaatacaaaaattagctgggcattgtggcaagtgcctgtaatcccagctactcgggaggctgcggcacgaaaatcgctttaacccaggaagcggaggttgcagtgagccgagatggcgccagtgcactccagcctgggtgacagagcaagactacatttcaaaaatatatatatatatataattatatatatatataatttataattatatatgtatataatttataattatatatgtatataatttataattatatatgtatataatttataattatatatatgtatataatttataattatatataagtatataatttataattatatataagtatataatttataattatatataagtatataatttataattatatataagtatataatttataattatatataagtatataatttataagtatatataagtatataatttataagtatatataagtatataatttataagtatatataagtatataatttataagtatatataagtatataatttataagtatatataagtatataatttataagtatatataagtatataatttataagtatatataagtatataatttataagtatatataagtatataatttataagtatataatttataattatatataagtatataattaaaaatagaatattgaatggaatagctctgagtcatttaatcaccatgctttggagtatgtagtagtaggagcagtaatagttttttatgtaatcatttatttaccaaacacatactgaatggttgaagttgagaaacaacagtgtagaagacagaaaaaattgttcttcatggaacttagtctgttgaggagagatagactataaacatataaacaagtaaattcggatgtggttaagtgctatgaactaaattaaaatgaggaaatatgaaacttcctgtcagagaactttagataggctgatcaaaaaagacctccttggctgtaattccatcactttgggagtcctaggctagaagattgcttgaggctaggagtttgagaccagcctaggcaatatagtgagactccatctctccaaaaactcagaaaaattatataggtgtggtggcgcatgcctgtattcttagctgcttggtggctgaagcaggaggattgattaagcctgggagcttgagactacagtgagccatgactgcacccctatactccagcatgggtaatagtatgagaacttttttaaaaaaaattttaaaaaacagggtccggtttggtggcttatgtccataatcccaacactttaggaggccaaggagagtggatcacttgagcccaggaggtcaagacaagcctgggtaacctagtgagaccttgtccctaccaaaaaaaacacaaaacttagctgggcatcctgttacacacctgtagcctcagctacttgggaggctgagcctaggagatcgaggctgcagtgagctgtgatcatgctacagcactctagcctgggccacagagcaagactgtcaaaaaaacaaaaaacaaaaagaaaaaaggcctctttgaggagatggcatttaaactgagatccgaatgagaggaagccaggcatgtaaaagatctggggagaaaaagtgctccatatggaagaaacagcacattctaagtcgctaagatagaaacaaccttggcatggttaaggaacagaaactacatgaagggtgggatcgtgaaaaagaggtagaaatgaggtcagagagcaaggcaagagctagatcatgaaggtcttaggaaaccatgataaggggtgtagattttattttaaacattagaacagatgcccagtgtggtggctcatgcctgtaatcccagcactttgggaggccgaggcgggtggatcacctgaggtcaggagttctagaccagcctggccaacatggtaaaaccccatctctaacaaaaaatacaaaaaatgtcctgggtgtggtggcgcacacctgtaatcccagttacttaggaggctgaggcaggagaatcgcttgaatgtggggagtggaggttgcagtgagctgagatcatgcccctgcactccagtctaggaaagagtgagactccatctcaaaaaaaaaaaaaaataaataaataagaaaagatttttgtgatatttttggattaatgttaaaaattccttttggttaacgtgtgggaaatggactagagtaaagcaagagggtaaacagaaacccattagcaggttgatgcagtgtagtctagggagagcttcccaaattgatctacagattcaatgcagtccctatccaaatcccagctaccatttttgtggaaattaacagtctaatcctaaaattcatgtggaattgcacaggcccagaatagccaaaacagtctttaaaaagtacaaagatggaggtctcacactttctgattttcttttttttttttttttttttttgagacggagtctggctctgtcacccagactggagtgcagtagtgcgatctcggctcactgcaagctctgcctcccgggttcatgccattgtcctgcctcagcctcctgagtagctgggactacaggcgcctgccaccatgcccagctaattttttgtattttttatagagacggggtttcactgttagccaggaagttcttgatcttctgacctcgtgatccgcccaccttgtcctcccaaagtctgggattacaggtgtgagccactgcacccagcctcatttttttaaaataaatattttaaataagagtcttgctctgttgcccaggctggagtgcagtggtatgatctcagcttgctgcagcctcaacctcctcctgtgttcaagtgatcctcccacgttggctcttgcatagctggaactacaggcatatgccaccactcccatctaactttttattttttgtagagatgggggtcttgctgtgttgcccagctggtcttgaactcctagactcaagcgatcttgtcaccacagcctatcaaggtgctgggtttacagatgtacaaatgtgagcctctgtgcctggccctgttttttttttttttttgagatgtctctcttgcttaggttggagtacaatggtgcaatcatggctcactacagccttgatctcctagtctcaagagatccttctctttcagcctcctaagtagctgggactacaattggtgccaccacacgcaactaatttgtttgtttgtggcagagatgaggtctcactgtgttacccaggctggtctcaaactcctagcttcaagcagttcttcctgggcctcccacagtgttgggattgcaggtgtgagccaatgcattcagccagcggtattatacttaattgccccacagtggaaacaatctgaattccatcaacagataattggataaacaaaagtggtatatctatacaatgggatattattgggtgaaaaaaggaattcggggccaggcatggtgactggagtgcagtggtacgtgtctcactgtcaccttgaactcctaaacccaagcaattctcctgactcagcctcttgagtagctggtaccacaggcacataccaccatgcctttaatcccagcagttaggaaggccaaggcaggaggattacttgagcccagtccaggagtttgaaacttgcctgggcaacatagggagtccccccacccccatctctacaaaaaatgaaaaaaattagctgagtatggatccagtggctcacacgtgtaatcccaacactttgggaggctgagcaggtaggtcacctgaggtcaggaattcaagacaagcctggccaaccccatttctactaaaaatacaaaaatttgccaggtgtggtggcacacgcctgtagtcccaactatttgggaggctgaggcaggagaatcacccgaacccgggagatggaggttgcagtgatccgagatcgtaccactgcactccagaatgggtgacagagcaagactccatctaaaaaaaaaaaaaaaaattagccgagcatggtagagcatgccgatagtcccagctacttgggaggctgaggcaggagaattgcttgagcccaggagttcgaagctgcagtcagctctgattgtgccagtgctgtagcctgggtgagagattgagactctatctcttaaaaaaaaaaaaaaaaacaccaggcatggtggctcacagctgtaatccgaacactttgggaggctgaggtgggcagatacctgaggtcaggacttcgagaccagcgtgcccaacatggtgaagctccgtttctagtaaaaatacaaaaattagtcagatgtcgtggctggtgcctgtaatcccagctccctgggaggctgaggcaggagaatcacttgaacccaagaggcagaggttgcagtgagccgagatggcaccactgcattctagcctgggcaacaaagcaagactatgtctcaaaaaaaaaaaaaaagtattgatagatattacaacagggtgggatttaaatgcattatgctaactgaaagcggccagagacaggccacacattttatgattccatctaagtgaaatgtccagcagaaacaaatccatagagacagaaaatagattaatgcttaacaggggctgggaggagggggaaagggaagcgactactaatgggtatgggatttctttttgggttaatggaatgttctgaaattagataatggtgatggttgtataactctgtgaatatatgaaaatcctttcaattatacactttaaaagggtaaattttatggtatgtgaattgtatatcaataaagctgttataaattttcctaaaatgttggtttcaaactgatgtcatttattttatttcttttttatgtcgtgtttcttaaagtttctcaaacaataataaatccaaattgtttagaggaaggatcctgttacttaagctaagatgagaagaaaaggagtgatgatgaggtttggaaacatcactcactcagtgacttttctttctccattgtccagcccatggatgacagtctcattgcatttcgaacgcgttctaagatgcccctgaaagatgttcccctgggccaattagaggcagagctccaagctccagacatcactccagatatgtatgaccccaatacggcagatgatgaggactggaagatgtggctggggggacttatgaatgatgatgtggggaatgaaggtaagttttggtttgtgatttattatgtatactgtccattatctgttgtaaaatttttagtatttggaagggtatagaatggaatggtttgggttaattgatttaatttgtatttaactgataatttatcttaaatcagtagttaatttttctttttttttttttcctgagacagggtctcactctgtcacccaggctgagtgcagtgttgcagtcacggttcattgcagccttgacctcctgggctcaagcaatcctaccccttatcccactgagtagctgggactacaggcacatgccactgtgcccgactaattttttattttttgtagaaacgagatgtcactatgttgcccaggctgttcccaaactcctggcctcaaacaatcctcctaccttggcctcctgaatgctagaattataggcatgagccaccgtgcctgggccaattcttaacatttctttttctgggtaaggaatcttttgaatcctaagattgttgaatgctaagatttgaatcccttgaaacatacatgcacatgtagttttgttgttgtcttttgtttttgagacactgtcccaaaacagggtgttgcccagggtggatcacagtggggtgatcatagctcactgtagccttaaactcctgggctcaagagatcgtcctcaggtctcagcctcccaagtagctgagattataggcacgcaccaccttgcctggctaattttttaaaaatttctgtagagaaatgttgctcaggctggtcttaaactcctgcctcaagtgatcctcccaccttggcctcccagagagctaggattacaggcatgagccactgtgcctggcccactcaaaattttatgtatgatttcattagggttcagtgatttaccaaaagaacactgtgttagttaagggtcttcatgatgcaagtgaaagaatcctaactctatcttgctggggtgaaatgaaaccagactttgggaagtgtagtaaatcagcagtggaactgaggcactgttaggatccccctttcctctctattttacttccttttgtcactcagctccattctcacatttatttttctacaaggttagagctctgttcataaacactccgtgattactttttgctttgtctacacttcaggactctcccctgcaagctccagttataaaatccaggggaacaagtcagatcgacttggtttgatctcatgcccagtctcttggtactacatgggattgatagggagactgttcagcatggagtctggtgattgatagcacctcatagaacagtgtggttgaagtatgtggtgaccctaaagaagtaatggtattatcagaaatggggaagaaatattgatcagataaaagtttggatggaaacagactaagtaggctgggcgtggtggctcacacctattatcccagctctttgggaggccgaggcgggcggatcacaaggtcaagagattgagaccatcctggccaacagggtgaaaccctgtctctactaaaaataaaaaaatttgctgggcgtggtggtgcacgcctgtagtcccagctactcaggaggctgaggcaggagaatcacttgaacctggcaggcgaaggttgtagcgagccgagattgcgccactgcgctccagcctggcaacagagcgagactccatctcaaaaaaaaaaaaaaaagaaaaagaaatagactgagtaaatggctgggtaggtaatgctaggagtaagtcaggataagtgaatgaaagaaaataacaggtccttgaatgtaccttatgatactattaatagttatatagtatatcatttggcaaatgtttgagtactttctttatacaaggcattgtgctagaatctgtgagggataaaggagcataatcatttggtcatggaataaaagctttatgaatgacagggtgcctggcccattgttaggttcacaatacattgtacttttttgtgtgtgtgtgagacagggtctcactctgtcacccaggctggagtgcagtggtgagatcttagctcactgcagccttgacctccttggcgcaagcaattctcccacctcagccttctaaatagctgggaatacaggtttgtgccatcatgcccggccaatttttgtattttttgtagagttggggttttgccatgttgcccaggctggtctcgaactcctgcgctcaagcgatcctcctgcctctgctttccaaagtgctgagattacaggagtgagccatcgcgctcagccagtatattgtaaatgaatgaagttgttgaataaactcagatatgccatcaaagtggcataaatgctgttgtaagattttagaagaggacagggtaacttttgtttaggatgatcagagacagctacatgaaagagctggtaattgaaatggaccttggaaagatttttgaaaacagtgacagggaagagagaaggcatctgagtagaagtgacatgatatactctatatgctggattctgtaggatatattctttccagagttttctcttttttcactgtaaaactgtaagagtaatatatgcttggtataaagaaatcaaatattacagaaataaaacaattaaagccttccccccccccaaggaaaatgtacatatctacatacatgaaatttttcatatgatttttttggggtttatgtatctcttagagtttatttattggcacttcattttcctaccagtcatttccaaagcctttgacaccaaggttcaagtttggttccccagagggactactgataatactttggtatgcatctgtgagagttttcaatgtgtagttactttttagttttccacattaatgtggggataaaaataattaaattttagtcctaaatttaaatttaagacttttctcaaacatttagaaaagatagtccaggcgtggtggctcatgcctgtaatcccagtactatgggaagccaaggcatgaggattgcttgaggccaggaagtcaagaccagcctgggaaacacagtgagacctcatttctattttttttttcttcgacagagtctcgctctgtcgcccagactggagtgcagtggtgtgatctcggctcactgcaacctctgcctactgggttcaagcgattctcctgtctcagcctccccagtagttgggattacatgcgcctgccaccttgcctggctaatctttgtatttttagtagagacagggtttcaccatattggtcagactggtctcaaactcctgacctcaggtgatccaccctccttggcctcccaaaatgctgggattacaggcatgagccaccgcacctggcatttctatttttaaaataaaataaaattttaaaaaagagagagaaaataacaagaagcaaattgttttaaatcttatcatatttcttttttttacccaccctctgtagtagaggggctaacaagccacaaaatgaaaaaaattgtgtaaggagaaaaagatggagtttgaagctgagtcattaacatgcaaagtatagaatcagttccttcataattagcaactgatatattatcccattagtcattctgataggagtctaagcttctgagttttccattactcacccctttgacaatctgatgaaaactatgcagccttcccccagaaaaaaatgtacatatccaaatacatgaaatttttatatgatttttgggagatacatatcttttaaagtttattgacacttcctgtttctaccaggttcagaaatctccacaaaaaggaatagacaggacagagagttctttttttttttttttttttttttgagcagcagcaagatttattgtgaagagttaaagaacaaagtttccacaacgtggtaggggacccgagtgggttgcccaaggacagatagttctaaccactttgtaggcagtgaaatctcagagaaattcattgtcttgctcaaagttacagaatcaatttgttatactcctaggagtagaacccagtttaatattctaggaacatgtctcaatcagacaggtttcacggtaagttaaacctttttttttttttttttttttctgagacagagtctggctctgttgcccaagctagagtgcagtggcacaatccctgctcactgcaacctccacccgggttcaagcgactcttctgcctcagcctccagagtagctgggactacaggtacgcgctaccatgcccagctaatttttgtgtttttagtagagatggggtttcaccatattggccaggcttgtctcgaactcctgaccttctgttccactcgcctcagcctcccaaagtgctgggattacaggcttgagccaccgcacctggcctaaaccatttttttttgagagagtttcactcttgtcccccaggctggagtgcagtggcgcgatctcggctcaccgcaacctccgcctctcaggttcaagcgattctcctgtctcagcctcccaagtagctgggtttacaggcatgtgccaccatgcctggctaattttgtatttttagtagagtcagggtttcaccatgttggtcaggctgttcttaaactcctgatctcaagtggtccacccaccttggcctcccaaagtgctgggattacaggtgtgagccaccacgcccggcctaaaccattttttaaaagtatatgacttttcataatgagctgtgttttttgttttgttttgttttgttttgtttttgagatggagttttgctcttgttgcccaggctggagtgcaatggcacgatctcagctcaccgcaacctctgcctcccaggttcaagcgattttcctgcctcagcctcccaagtaactggattacaggcatgtgccaccacgcctggctaattttgtatttttagtagagatggggtttctccatgttggtcacgctggtctcgaacttccaacctcaggtgatccgccctcctcggcctcccaaagttctgggactacaggcatgagccactgctcctagccttcataataagctgtgctttttatctttggcacaggctaatacaaaataattacagtaagaaagtcaggttctcctagcgttattggtagcagcagctttggtgctcattttcatcactttggttcaaaggcctaagatggtagctattgggaaggaaaggccaggcagaactgactttcaggattttgtttctcataatttggttccgagaacttgaatcagaattgaagagtgtatggatatgtagggtgatgtttattaaagatacagatttcagggcttcaccccttacctactgaatcagaatctaatgagtatggtctagggatctaattctgatatatctaaaggattggaaactactggtctgggaaaggtaagagtgcatgataaaggttgattggggaattggactaatggttagggggagggtgaaaatcctcttttcttaaaataaaacttcagtttgttttgttttgttttgagacagggtctcactcttgtcacccaggctggagtacaatggtgtgatcttggctcactgccacctccacctctcaggttcaagcacttcttctgcctccacctccctagtagctaggattacaggcacatgccaccatacccagctaattttgtatttttagtagagacggggtttcaccatattggtcaggctggtcttgaactcctaacctcaggtgatccgcccgccttggcctcctaaagtgctgggattacaggcgtgagccaccacgcccagcaacttcagtatttttgtatgtgcctattcggacagatttttaaaagagcacacaaagccaatgattaggatgggtgtggcctccagatctaccagttgagttaaaagacaatacaggaggggtatatcagctgggtaaatactgacattgttaataagtcaaaaaagtgattaagctcagaggacatattccacaatcagggtactaaaagctaagcagaactcagaagaatccccctaaatgatttttcagcatctttgttaaatgagtgctctgagaataatattcgctgacccatttgtgtggtgtgggcagaactatctattgcagttcttgcatccaaacagatggagtccaaacctgtgcacactactcattattatgggctcttccagaactttcgttattcagcaatgtttgttaagaactttttgatcaggcgcagtgtctctcacacttctaatccctgcgctttgggaggctgaggcaggcagatcatgaggtcgggagatcgagaccatcctggctaacacagtgaaaccccgtctctactaaaaaaaaaaaaaaaaaaaaaaaattagcctgacgtggtggcgggtgcctgtagtcccagctacttgggaggctgaggcaggagaatggcgtgaacccgggaggcagagcttgcagcgagccgagatcgcccctctgtgctccagcctgggcgacagagtgagactccatctcaaaaaaaaaaaaaaaaaaagaacttgctgtgaagagacttatatagaaagtactatagagattatgaattatgaagacagtattctattcctaaagaaataaagaatctgtactgataagttaaacccacaaatagatgaaaaagatttgataattagttatgtgtaaagaatgcaaattaatatattataagctgagtataaatgttgagtaaagaattatcaagttagattagggtttaatcagcacagatttttcagtgattgtgaattttaaatgtgtgtctgtataagtatatatatatttatatatatttatatttatataaaaaatatatatttgtttttgagacagggtctcactctgtcaccctcgctggagtgcagtggcgtgatcatgactcactgcagcctcaaactcctgggctcaagcagtccttccagctcagccttctgagtagctgggactataggcacacaccacgacacttggctaatttttaaaaagtcatttgtagagattggttcccactgtgttgcccaggatatatatatgtgtttttttttttttttcttgttagatggagtctcactctcgcccaggctggagtgcagtggcatgatcccagctcactgcaacctctgtctcctgggttcaagtgattctcctgcctcagcctcccaagtagctggaattacaggcacgcaccattactcttggctaatttttgtatttttggtagagacgggagggggggggtctcaccatgttggccaggctggtctcgaacccctgacctcaagtgatcttcccacctcggcctcccaaagttctgggattacaggcgtgagccaccatgcttggccccaggctgtatatgtctgtttataacaaaagatgtttatttatggccaggcacggtatccagtctgggcaacaagagcgaaactccctctcgaaaaaaaaaaaagatgctcatttattatgaaaagttaaaacattatggaagaggcgccagactctgtggctcacgcctgtaatcccagcactttttaggggccgaggcaggtggatcacctgaggtcaggagtttgagaccagcctgaccaacatggtgaaacgccgtctctactaaaaatataaaaattagctgggcatggtggtgcacatctgtagtcccagctactcgggatgctgaggcaggagaatcgcttgaacccagcaggtggaggttgcagtgagctgagatcgagccactgcactccagcctgggcgacagagcgagactccaccttaaaaaaagaaagaaaaaaaaaatattgtgggagggtacacagagaaatctttgttaatagttttatgtgtttctttctagatactctgtgggtgttcagtcaagcatgtatttatctcaaacaagaatttttttccacaaaaagaatcatactatacatattggtcttcatctgcaacttgcttctttcacttagcagtataacatatatttttccattataatacatagagatcacctcttctatttaatggatacatgatagtaagaaatttaggtattctctttttggtctttttttttttaaatcagttcctcagtcacactagctgcatttctcaagtcacatgtggctaatggctactgtatgatacaatacaatacatgtatagatcatttccatcatcacagaaagttctgttagacaacactgatctaaaattatctggagaaaaatattaccttaatatataataattccataatttaatgactccttcataatttttacttagtaattgaaaagacagtttagcattaacattaaagaaaattaggctgggccctgtggttcactcctgtaatcctagcactttcggaggccaatgcaggcggatcacctgaggtcaggagttcgagaccagcttggccaacatggtgaaaccttgtctctactaaaaatagaaaaattagccgggcgtggtggtgggcatctgtaatctcagttacttggtaggctgaggcaggagaattgcttgaagctgggaggcagagtttgcagtgagccaagatcatgccactgcactccaacctgggtgacaaagtgagactccatgtcaaaaaaaaaaaagaaaaaagaaaattaaaagggagaagaacatccatatttctattattctaacctaacaaatgtttattatttttgtatatttttagttatttatgattcttattgtaaggatataatttttcatgcttatgattattatgtatatattgtacttttgtcatacatgtattgaacttttatagaatggttacatattcacattttatatgtgtacgtgttgagtatccccttcatccaaaatgctcaggaccggaagtattttggatttcagattttttcagatattagaatatatgtattattatacttaacagataagcatactaaatttgaaaatttgaaatctgggcagggtgcaatggctcacactgtaatctcagcactttgggaggccgaggcattcagatcgcttgagcccaggagttcaagaccagtctgggcaacataccaaaaccctgtctctactaaaaatacaaaaattagttgggcatggtggcatgtgcctaatcccagctacttgggaggctgaggtgtgacaatcgcctgatcctgggcagtcaaggctgcagtgagccatgatcgtgccactgcacttcagcctgggtgacagagtgagaccctgtctcaaaaaaaaggaaaaagaaaatttgaaatctgaaatgctccaatggctattccctttgagagtcatgtttgcactcacagagtttcagattttggagttttggatttggaatgctcaacctgtactattttatactaagaaattataattatatagtcattctctaattgttgggaatttgggccactccttttttcactgtcagcttcactgtacaagtagcttttacagaaagtattattttcatggaatatactacacaaaattagctgggtgtggtggcgtatgcctgtggtcccagctactcaggaggctaaggtgggaggatcacttgagcccgggaggtggaggttgcagtgagctgaggctgtaccactgcactccagcctgggcgacagagtgagaccctgtctcaaaaaaataaagaataaatgtgctttattggaacagattcttagaagtttgagaacagagttaatgagcatctgaaacacttttttttcctagatgaagcagatgatgatgatgatccagaatataatttcctggaagacctcgatgaaccagacacagaggatttccggactgaccgggcagtgagaatcaccagtgagtctgtgtttattctaagtcctgctcttgactgctttgcagctgtctttgtttactttgtagatttttaggggtgaagtttgcagctcatccatgttaagacatttaggtttcctttacccatttattgatctgattctttaaatttaggtacatattcagaaagcccatcagttattcatttgtatatcccacagtcgtgtattcagtccttactgtttggcagggattgtgcaagatgaataagacatggcatctgtgctgtaggagttcagcctagtagggtgatagaaacagaaaaagttacaatacaaagtgataaatgctgtaacaggttttacataaggtataataatgacctaaaagagagtgtcatctcctagtgtatgatatggactaggataggagaacttaggaaagaatttgcagaatgaaatggctttttatcttagttttgaaggaggaataagaaatttggtgaatagggacagagaggaatattgcaaatagaagagcatctgcaaaccacagaattgtaaaacatcaaaaaagtatgtttggaaaatactaagtactttggtggtggtgtatgagtgaaaagacagagaagtggtagataagattaggtagtgtttacatcatggaggatttttaagctctcaaaatgaggtttaagggcgggcatggtggctcacgcctgtaatcccagcactttgggaggtggaggcaggcagatcacctgaggttaggagttcaagaccagcctggccaacatggcgaaaccctgtctctactaaaaatacaaaaattagccaggcgtggtagtaggcacctgtaatcccagctactccggaggctgaggcagaaaaattgcttgaactcaggcgggagaggttgcagtgagccgagatcacgccaatgcactccagcctgggcgacagagcaaggctccgcctgaaaaaaaaaagaggtttaagcagtaaatcagtaggaactgatttggattttagaaagatcactttgatttaataccagtttaatgtattaatttgttaggtaaagtgaacaagactggaggtatggaaaacaattatgataacttagcttgagttatttctataaaaaattatatcattgagctaggagtggtggcttacacctgtaatcccagcactttgggaggctggggcaggaagattgcttgagcttaggagttcgagaccggcataggcaacatagagaaactttgtctgtactaaaaatttaagaaattagcctaatgtattggcacgtacctgtagtcctagctactcaggaggctgaggcaggaggattgcttcagcccaggaggtcaaggattcagcaaactatgatagtgccactgcactccagccttggtggcagagggagatcctgactcaaaaaaaaattatatcattggctagtgtgtcaagcatagaaaacatacatttcatcctgaagaaattctacctatggggagaaagaaaaataaaaaatatatttcataagccattgatttttattgcatgtatgcatgaccctgtactggaataatatacacgacatggagaaggtaagatgctggctcttgaccaggttatgcagagagctttataaacatccaagatatacctaattaatgcagttctttgtgtaaagagaattatgtaaatacaatcctttagaacttacattttattttattgctttattgtgcctttcaccttgcttttaagattagaataccatttcctttgtgaagatctttcatttattttgatatactatgacagggatagtggaagcattgaaaggaaagcaccaggaattagagaaaatgtagaatgaaaaggtttgaggatttaggctttgagaaaactgaaaggagaatctaggaaggtacaagaaaaacctagaaaatctagtgtcgtagaaaccaaaggaagagtcttttggctggggcacagtggctcatggctataatcccggcacttgggaggctgaggcagaggcagaaggatcgcatgagcccaggagttcaagaccagcctgggcaagatagtgagacattgtctctacaaaaacattttaaaaataaaatgaaaattagttgtcgtggtgcatgcccgtagtcccagctacttgggaagctgaggtgggaggatcacttgagcccaggaggtggaggctgtagcgagcagagatcccaacactgtactccagcctgggtcagagcaagaccctgtttcaaaaaaagagtctttcaagaaggacagaatggtcaacagtaaagaaacaagtaaagaaacatctgcttaaagcacaaaagcagatcttaagttcagctatcatcctggaatatatttgccttccctttttgattgttactttcttcagtttacgtataatttctcagggagatcctccttcgttaggattgatcttcttgctttgcattcccgtaccactctttttgtccttttatatactgatcacctcataattgcttatttaatatctgtcttctcccctagactgtgaacttctcaagagctttgttttgtttattgctgtaaagctggtggcaatatttgccagtcgaatagagatgggtaaatgaagggcagtctttctagtcatacagttctgtaatgatagtgaaagctggagtagaatttttaatttttttttctgcctcttgtcctcttgtgtctcattgtcatatttgattataatctctttaaaaggacttatccttatatggataactaaaataaaaaaattaaaaagcatagaatcacagagtttgaaaagctccatgtggtcacatgttttttgcccgcttgagaatttgtttacacctcctctgaggtggcctttttagtcctgtttgtataccttcagtgacagggagctcaacaattctgcagatagtgtattgtaaacttgaacacctcctcaattaatactttccttattgaacccaaatctgaatgcaaattcagatactttccttattgaacccaaatttgaatgcaaagcaggaagatcaatccttttatattcctcctatttgtctttatgttatgttatgttatgtgatgttatgttatgttatgttatgttatgttatgttatgttatgttatgttatttttgagatggagtttcgctgttgtcgcccaggctggagtgcaatggtgcaatctcagctcactgcaaactctgcctcctgggttcaagcgattctcctgcctcagcctccagaatagctgggattacaggtgcccgccaccacgcccagctaatttttgtatttttagtagagacggggtttcaccaggttggccaggctggtcttgaactcttgacctcaggtgatccacctgcctcggcttcccaaagtgttgggattacagtcatgagccgcactgtgcccggcctcctatttgtcttttgttgttaagaaaaaaaaaagcaatttattcccaagtgtacatattaaaagatgtttcttaagtttttttttttttttccctatgcaaaacataggaaagtttcaagtttcttctgccaggtttcttcttctccaaagccttggtgtccagacctctcaccatgcacattactcttctctggattctagcatttattttctttaaacttttcccctgttacatcttattatgaaatttaaaaatatatatagaaaaattgaaaaattatacagctaacattcatatactcaccacctacttttttttgagacgaagtctcactcttgttccccaggctagagtgcaatggtgtgatctcggctcactgcagcctccgcctcccaggttcaagcggttctcctgcctcagcctcctgagtagctgggattacaggcgcctgccaccatgcccggctactttttgtatttttagtagagaagaggtttcaccatgttggccaggctcatctcgaactcctgacctcaggtgatctgcccgcctcagcctcccaaagtgctgggattacaagcgcgagccactgcgcccagcctcaccacctactttctatagtttgttggtttttttttgagaaggagtctcgctctgtctccaggctggagtgccgtggcgccatctcagctcactgcaacctccgactccctggttcaagtgaatctcctgcctcagcctcccgagtagctgggattatagtcacgcgccaccatgcccagctaatttttgtatttttagtagagacagggtttcaccatgttggccaggatggtctcgatctcctgaccttgtgatccgcccacctcggcctcccaaagtgctgggattacaggcgtgagccactgtgcccggccaaactttcagtagtgttaatataaactgtgcgcctttcatatgtgcgggtttcacagctgcagattcaaccaaccttgaaaatattctgagaaaaaaaaatgcaacagcaaaaaataatactaactgggcgtagtggctaacatctgtaatcccagcactttgggaggctgaggcaggaggatcgcttgagcacaggagtttgagatcggctgggcgacatactgagattccatctctacaaaaaactttaaaattatctgggtgcagccgggcatggtggctcacgcctgtaatcccagcactttgggaggccagggtgggcagatcacgaggtcaggagttcgagaccagcctggccaatatggtgaaaccccatctctactataaatacaaaaattagccgggtgtggtggctcacgcctgtagtcccagctactaaggaggctgaggcaggagaatcgcttgaacctgggaggcggaggctgcagtgagccgagatcgcgccactgcactctagccagggcaacagagtgagacgctgtctcaaaaaaaaaaaattatctgggtgcattggtgtgtgcttgtagtcccagctactctggagacagagtcaggaggatcccttgagcccagaagttcaaggttgcagtgagctgtgatcataccactaccactgcactccagcctgggtgacagagtgagagcttgtctcaaataaataaataaaaaataataaggtataacaagcatttacattgtattaggtgataagtaatctagagataaggtatacaggaggatgtgtgtagattatatgcaaatactacatcatttttatataagggacttgagcatcctcagattttggtatccatggatacgaaatggttccaggagattggctcctggaaccaacctccacagatactgagggatgactttatttgccttatcatgcagctgtccatctccctgtccgtctgtggatgcatcttagttttcaaatgcatttcagagtaaattatacttcacttttttttctttttttttttaaattcagacaaggtctatgttgcatgggttggtcttgaactcttgcggtcaagcgatcttcccacctcagcctcctgaccagctgagattacaagtgtgcacaatggcacctggctatatgtcactttttttttgtatttttagtagagacggggtttcaccatcttggccaggctggtctcgaattcctgacctcgtgatcctcccacctctgcctcccaaagtggtgggtttacaggcatgagcctatacttcacttttaaccacttcagcacgcatataatgaactagagctccatatttgtttatgatttctttttataggtaattttacacacagtgtatcacacacatctcaagtgtaccatttaatgaattttgacatgtgtgtacctatgtgacacaaatccctgtcaggatatagaatcctcaccccaggaagtttcctcatgccccttccaagtcaatccccacaccatcccttcagaggcaaccactgttctgatttttttttttttttttttccgagacggagtctcgctctgtcacccaggctggagtgcagtggtgcggctcactgcaagctccgcctaccaggttcacgccattctcctgcctcagactcccgagtagctgggactacaggtgcctgctaccatgcccggctaattttttgtatttttagtagagacggggtttcaccgtgttagccagggcgatctcgatctcctgaccttgtgatccacctgccctggactcccaaagtgctgggattacaggcgtgagccactgcgcccggctttttttttcttaatcacaggttatgtttgccagttttagaacctcacataaatggaatcatataggatgtgctttgtgtgtaaggcttctttcactcagcataatatttttgagattcatttgtgttgcatgggtcgttagtttgttcccttatattgttgagtagaatttcgttgtgtatatatactacagattatctatttttgtgttgatcacctgggctatttttaattttgggtaacgaataaagctgcgctgaacttttttgtgcaagtctttgtggaaatgcttcatttctctctctctttcatttgttcccacctatgagttagaaaagccgtatttcatttatcttgggtcagctgtataggagacaaatcactgggtcacagggtatgtttagttttataagaaattgccagaccattttccaaagtggctttccattttacattcttatcagagttctggttgctctacatcctcagtaacatttggattttaattttttttgttggctgggcatggtggcgcacacctgtaatcccagcactttgggatactgaggcaggcagatcacttgaggtcaggagttcaagaccagcctgggcaacatggtgaaacaccgtcgctactaaaactacaaaaaattagccaggcgtggtggcgcatgcctgtagtcccagctacttatgaggctgaggcatgagaattgcttgaagccggaaggtggaggttgcagtgagctgagaccgcgccaccgcgctccagcctgggcaacagagtgagactcagtctcaaaaaaataaaataaaaaataattaaattacttaaatgattttgtttttgtttttgttttgtgtttgagacagagtctcactctgtctctcaggctggagtgcagtggtactatctctggtcagcgtagcctctgcctcccgggtttaagagattcttgtgcctcagcctcccaagtagctgggattacaggcatgtgctaccatgactggctaatttatttatttatttatttttgagatggagtcctcgccctgttgcccaggctggagtgcattggtgctgtattggctcagtgcaacctccacctcctgggttcaagtgattctcctgcttcagcctcccgagtagctgggattccaggtgcatgccaccatgcctggctaatttttgtatttttagtagagacggggtttcaccatgttggtcagactggtctcgaactcctgaccgcagatgatctgcctgcctcggcctcctaaagtgctggaattacaggcgtaagccactgcccgtggcctggatcttaatttttttaatgtcctcttaagaagggcctttatagaattgttcacagtcctccagacatagtgttagactctgctctagttcagtgatatgtttgccttgttggttatgagccccgttttggagcaactgtgtcttattgaacttgatatcaaccaaaacttttttttttcctcagattcttgtaacaaccaaaactttcaggtcttgttcacattatttttaagccacgtcaccttttcatgcagttaataaactgatctttaaaactcttgctgggcgcggtagctcacgcctgtaatcccagcattttgggaggctgaggcgggtggatcacgaggtcaggagatcgagaccatggtgaaaccccgtctctactaaaaaatacaaaaaattagccaggcacggtggcaggcgcctgtagtcccagctactcaggaggctgaggcaggagaatggcgtgaacctgggagatggagcttgcagtgagctgagatcgcgccactgcactccagcctgggcgacagagcaagactccgtctcaaaaaaaaaaacgaaaaaactcttaactgtaggactgggcaccgtggctcacacctgtaatcccaacacttagggaggccaaggtgggaggatcgctggagcccaggagtttgagaccagcctgggcaacatagcaacatgctgcctctattaaaaaaaaaaattcttaaacatagaactttaaatttatccgtatatgttgcatccagttgatttgagaaaatataattttgaattttccgtctgttggattggcagtccctttcagctttacatcatctacagatgtgttaggtatgttctctgggtcttctaagtcaccgatggagttcttgaatagttcagatccaaagacagcgtcctgtgaaaccctgctggaaacttgtctttctctctctcttttttttttaagacaatatcttgctctgtcgcccaggctggaatgcagtggcatgatcttggcacactgcagcctctgcctcctggactcaagagatttctctcacctcagcctcttgagtagctgggactgcaggtgtgcgtcaccaagcccagctaaatttttttgtagagatatggtttcaacattttgcccaggctaggagactcatctcttgattccattcagtactgtgtggatttggataggtcatctaattataaaatcatctagctcacattttctcctgtcttcttccttttagaatttaagcttcatgagaatagaactctctctctctatctctctttcattctctcatatatcccaagcatctaaaacatggattgaagcatagtgctcaataaatgtgttttgttgttgttgttgttgttgttgttttttgagacagagtctcgctctgttgcccaggctggagtgcagtggcgcagtcttggctcactgcaagccctgcctcccgggttcacgccattctcctgcctcagcctcccgagtagctgggactacaggcgcccaccaccacggctggctaattttttatatttttaatagagacggggtttcaccatgttagctaggatggtctcaatctcctgactttgtgatccatctgtcttggcctcccaaagtgctgagattacaggcatgagccaccgctcccggcctcaataaatgtttttgaataaatgaatgaaggatagccagtcatggtggctcacacctgtaatcccaccattttgggaggccgagttgggctgatcacttgagctcaggagttcgagaccagcctggtgaaccctcatctctacaaaatatacaaaaattagccaggcatggtggcatgcgtctgtggtcccagctacttggggagctgaggtgggaggagcgattggaccagggaggggatgcggaggttgcagtgagctgagatcgtgccactgcgctccagcctgagtgacatagtgagacccatctcaaaaaaagaaggatagatatgaagaatttgtcatgccttgttgaaaacattatacattgtcttcatggaattcctccttattgtaaaatctaatttataccaacaatatactgtctggctttcttgcagaaaaggaagtaaatgagctgatggaagagctgtttgaaactgtgagtaatgatcctcgagtgagaacacgggattttaagtcagttctccagcaagatgtgtcatttggtctctgtgatgctccctctaggagagggggtctgactgaaccaattctccttttagtctacctgggaaagaatataatgacaagggaattttgctaactactagactcttgattatatacatgtatgttgttcttattaacattttccttgaaacttctttttgtttgagggggttcttgctccatcacccaagccagagtgcagtggtgaaattacagctcacagcagccttgaccttctaggctcaagcagtccttcgtctaagcctcctgagtagctgggacataccaacacacccagctaattattttatttgtagagacagggtcttaccacattgctcaggttgttctggaacttctgggctcaagcaattttcctgccttgggcctcccagtgctggaattataggtgtgagccagcatgcctggcccctggaaaacttttgatgacttcccctactgtcatttggtgtgtccttaaagattgtcaactagttttaaactactttgtgtacaaataattacctttttcataaatttgtttcaaaagatttttcattttaagagattgatcattttgaggctgggtgcagtggctcacgcttgtaatcccagcactttgggaggccacggcaggtggatcatctgaggtcaggagtttgagaccagcctggccaacatgatgaaaccctgtctctattaaaaatacaaaaattaggcatggtggcgggcacctgtagtcacggttactgcagaggctgaggcaggaaaattgcttgaacctgggaggcggaggttgcagtaagcccagattgtgccactgcactccagcctgggcaatagagcaagactgcaagactctgtctcaaaaaaaaaaaaaaaaaaaaaaaaaaaaaaaaaaaaaggagagagagattgataattttgagttatccacgctctgtccttactgttacaagttgactggttgaatgacttctttcttggcataatagccatcccaagtgtgggtttgtgggaatcctgaagtgagaaagttctgacattggctctttctgggtgccagcattattatagtcttgtaatctatagttttcactcttccttcccaatactggagcaacattcagaggcccattccccaggaaaaccctccctttcctttgcccacagttccaagatgagatgggattctccaacatggaagatgatggcccagaagaggaggagtgtgtagctgagcctcgtcctaactttaacacccctcaagctctacggtaggctagttgaagaccttgagatttggaatagaggaaaagtttatttctgaaaaggttttcagaagttgcaattgataatttttcatcccaaaccagcttctgttactgatgtaaggatgcagagccctgtcaggagttaggtgtcaagtgaagtctccttgttatggggcagtgcagctgtaggccaagctatatccgtttgggaagggagaaaaaacagtagctggcatccatatccacttctccgggtgagtggtgctggagaggtatgtaggactcaatgtggccagccacacaaactaccccatattgtaatatcctgtctgtcccttttgttctttttatgtgccattaatatctgctaaatgtgactgaaaatttgttagtcacctaggcattagtggagcaaaccctgaagcacctgcagtaaggagtctgaaacatacgtgctgacctttttgcctaaagttggcacttgtgttacagcatccagaaagtagaggctttaattttttcctcattttgtggtggatttgcatctgcactttattgtattgttatccattgcgagtagcagcatgtagtcattagatggatggctagatgtcaggatgcagtttgtgccataagtggaacaaagcaaagagaatagtccctgtaattcgtcctgggtttgaacctaacagcattactaagcagagagcttgggatccatctgaaagctagacctttagagatttttcaatttagtgaaaaaagataagatatgccaaccaatgtctaaaaactagaaataccagtaattctccattacaacaaatatcacaatacaactacatcaaaaacctcaagattgctaagtcagtatttgacccattattttaagttacagctcatacaacaaaattctgttatagcagaatggaaccattcatcctgggaacatataatgggatttgatctataaacgtgttttggttctgctgattgactctttgtaacttcttaaaatttgggaagtgtaggctgggcgcagtggctcatgcctgtaatccctgcactttgggaggcggaggcagggggatcacctcaggttaggagtcgagaccagcctggccaacatggtgaaaccccatctctactaaaaatacaaaaattagccaggcatggtggcgggtgtgtgtaatcccagctactcaggaggctgaggcaggatactcacttgaacccggaaagcggaggttgcagtgagctgagatgacagcctgcttgacagagagagactctgtctcaaaaaaataaaataaaataaaataaataaaatttgtaaagtatagaaataatttaaaactcttgttagaattcagttaccttctggtattcagtagaatacagtcatatatcatctcatggtgatacattctgtgaaatgttatcattaaacgatttcatcattgtgtagaaagcacttggataaacctagatggtttagcctactgcatacctaggctatacggtataacatattgctcccaggccacaaacctgtatagcatgttattctgctgaatattgtaggcagttgtaacacaatggtaagtacatatgtatgtaaacatagaaaaggtacagtaatcttatggagccatctctgaatatgtggttcattattgactgaaacattatgtggcacatgactgtacttgggcagctgctgcttctctttcagttgcaaatgcaaacctgttataatctttgactaaataaagcatcctggattctgtaagtccatagatagtaaaaacttcttaaaacacaataaagaagagagaggaaaaaaaagaacaaaacaaaaaccctgggaaagtgagttatctgtgcttcccttgtcagttatccaagtaatacttattaaaactaggtgcaaggccacgtgtggtgactcacacctgtaatctcagcactttgggaggctaaggcaggcagatcactttaggtcaggagttcagaccagcctggtcaacatggtgaaaccccatctctactaaaaatacaaaaattagctgggtgtggtggcacacgcctgtaatcccagctacttgggaggctgaggcaggagaaacacttgaaccctggaggcggaggttgcactgagctgagattgtgccactgtactccagcctgggcaacagagtgaaactgtctctcaaaaaataataataggccgggtgcggtggctcacgccagtaatcccagcattttgggaggccaaggcaggcggatcacaaggtcaggagtttgagaccagcctgaccaacatggtgaaaccccgtctctactaaaaataaaaaaattagccaggcatggtagcactcgcctgtaatcccagctactcaggaggctgaggcaggagaatcgcttgaacccaggacgcagaagttgcaatgagccaagatcatgccactgcactccatcctgagagagagaaaaagactccatctcaaaaaataataataataataataataataattatagatcaggcgtggtggctggcacctgtaatcccagcactttgggatgccgaagcaggcatatcacctgaggtcaggagttcgagaccagcttggccaacatggcgaaaccttgtctctactaaaaatgcaaaaaaaattagtcggacgtgttggcaggtgcctgtaatccccgctacttgggaggctgaggaaggagaattgcttgaacctgggaggcagaggttgcagtgagccgagaccactccattgcactccagcctgggcaataggaacgaaactccatctcaaaaaaaaataatagtaataataataataataataaaaaatacaactacgtgcaggctatgttttcattacctacttttttatgcttctggtcttctgttccttcagtggtagtagtgcaggtgatcaggttttcagttctcagaagattgcataagacagtcccacaggctttaggtttttaccctgtgctgcccaaacccacagtaaatactataaaagaaagaatgatttttatccccaatagataaatgataacttttaaaaattaactattgaaaacacttatttatctattgctgtaatattggagattacttgaaatatgataacctgcttgttgtaactacatcagcaggtcttatcctgattgcatagggtatcagcacgtgcttaatcacttaagtatctttttctccttttacttcagaactgtcatgctgggtttttcagtttttgcttcagccctggaaacagtctctcaggagggtaggggtgggaagttagggttaggaaccttagaagaggaatttattttatttatttatttattttattttatttttttgaaatggagtcttgctctatcgcccaggctggagtgcagtggcgcgatctcggctcactgcaacctctgcctcccgggttcaagtgattctcctgcctcagcctcccaagtagctgggattacaggcacgcatcaccacggccagctaattttcgtattttttcatagagacagggtttcgccatgttagccaggctagtctcgaaccactgacctaaagtgatccacctgccttggcctcccaaattgctggcattactggcttgagccaccacgcccgactgtttcttgaccttttaataattgtcattctgactggcaaggcttgctttcttaacaagtcaaaaatcttctagcatgaagcaggaaaaggatatactaaaataactaaagtaatgatagtttacctgaacagaactgagtggttggttcaaatattaccctactgctctccatgaaggtattttattttagccctttaaattcctcttcctggctgggtgcagtggctcacgcctgtaatcccagcaatttgggaggccaaggcaggtggatcactttaggtcagtggttcgagactagcctggctaacgtggcgaaaccctgtctctacaaaaaaatacaaaaattagctggccgtggtgatgcgtgcctgtaataccagctactctggaggctgaggcaggagaatcacttgaacccaggagacagaggttgcagtgagccgagatcatgccactgcagtccagcctgggcgacagagcaagactccatttcaataaataaataaataaataaataaattcctcttctaaggttcccaaccctaacttcccacccctaccctcctgggagactttttccagggctgaagcaaaaattcaaaaacccagcatgtcagttctgaagtaaaaggagaataagatagctaagtgattaagcatgtgctgataccctatgcagtcagggtaagatctgttggccaggcctggtggcttacgcctgattccagcactttgggaggccgaggcaggtggatcatgaggtcaagagatcgagaccatcctggccaacatgatgaaaccccgtctctactaaaaatacaaaaattagctgggtgtgatggcgtgtgtctgtagtcccagctactcaggaggctgaggcaggagaatcacttgaacctgggaggcggaggttgcagtgagccgagatcatgccactgcattccagcttggcgtcagagcgagactccgtctcaaaagaaaaaaaaatctgtttatgtagctacaacaagcaggttatctttctttcttttttctttttttttttttttttttttgagacagagtcttgctctgtcgcccaggctggagtgcagtggcgggatctcggctcactgcaagctccaccttctgggttcacgccattctcctgcctcagcctcctgagtagctgggactacaggcccccacgactgcgcccagctaattttttgtattttcagtagagacggggtttcaccatggtcttgatctcctgacctcgtgatccgcccacctctgcctcccaaagtgctgggattacaggcgtgagccaccgcgtccggccaacaagcaggttatcatatttcaaggaatccccgatattacagcagtagataaataagaaaatgtagtatcccaccagggaatactatacagccataaaaaggtatgatatcatgtccgtttcagggacatggatggaggtgaagccatcagcaagctaacgtaagaacagaaaaacaacactgcatgttctcacttataagtaggagctgaacaatgagaacacatgggcacagggtggggaacaacacacactggggcctgttgggggagcgggggaagggagaggatcaggataaactgctaatgcagctgcacttaataccaaggtgatgggttgataggtgcagcaaaccaccaaggtgcacgtttacctgtgtaacaaacctccatgtcctgcacatgtattctgaaacttaaaattaaaattttgagggctaggcatggtggcttacgcctgtaatcccagcactttgggaagccgagatgggtggatcatgaggtcaggagatggagaccgtcctggctaacacagtgaaatcccatctctactaaaaatacaaaaaattagctgggcgtggtggcacgtgcctatagtcccagctacttgggagggtgaggcaggagaattgcttgaaccctggaggcggaggttgcagtgagctgagatcgtgccactgcactccagcctgggcgacagagcgagactgtgtctcaaaaaatatttaaattttgaaaaaaaaatgcaaggcagtgcagcctgagtggatagggaaatgggacaagctgaacctgggatgggagtaacaagtaaatgagagaagaaatgagaatgatgagttcccaccagctccttggctgctttcttatccagatatttctctgttcctagcattttaattttttctttatttgtatattatttagaagaggaattttagaggaatgggatagagtgtaatatagaatcatcatatttgatgcatgctaactactttggcaaaagatttgtaaaaggctgagagtttgactgttggctaaagtgagatgggggattagtagggaatgaaaattgttcaggctctttgctcatcattggaacgaattggatgtgttgtggacctacggaaacactcaaattcagtcatctccctgttgggaataggtttgaggaaccactggccaacctgttaaatgaacaacatcggacagtgaaggagctatttgaacagctgaagatgaagaaatcttcagccaaacagctgcaggaagtagagaaggttaaaccccagagtgagaaagttcatcagactctgattctggacccagcacagaggaagagactccagcagcagatgcagcaggtaggacttttcttggtcatgttaacattggatttttttttttgagacagagtctggctctgtctcccagcctggagtgcagtggcccgatatcggctcacttcaacctctgctttctgggctcaagcatttctcctgcctcagcctcccaagtagctgggattacaggcatccaccaccacacccagctaatttttgtatttttagtagagacagggtttcaccatattggccaggctggtctcgaactcctgaccttgtgatccgcccgcctcggcctcctaaagtgctgggattacaggcgtgagccactgcgccctgctgttaatactggattataccaaggcctaactctgaggccagaaattaacagctttgtaaaagtcagagatagttaccttaccacctcctaaaaccatagtatcttcacatcattaggagctcgagaagtcatcatgttcatgccttatggctcaaggaagagagcacacaaggacactaatggtattcagaaatatagatttcaaagagtccttagtaatctattctgaaatttaacaaccttcactgtgagaagtaggtttgtttttcctttttctaacctcagtccctctggattgaggttaagcttcctctggttctgtcattttgttcaagggaacatgtctgagagatttatgccaagatcctatgttattttcatactcctttcagaaagcaaaatatatgtgataaagttgcaaacatcttggttattgtctctctgggggctgggttacggtggctcacacctgtaatcccagcactttgggaggctgaggtgggaggattgcttgagccagggagttcgagagcaacctgagcaacatagtgagaccctgtctctgcaaaaaataaaaataaattagccaggcatggtgccatgcatctgtggtcccagctactcaggaggctgaggtgggaggattgcttgagcacaggaagttgagagggcgtggagccatgattgcatcactgcacatcagcctgagtgacagagagagatcctttctccaagaagaaaaaaaaaaaagatctctctggattcctgaaatgacaatgtggtaacatgtcacttcatcattttctttccatccccagcacgttcagctcttgacccaaatccaccttcttgccacctgcaaccccaacctcaatccggaggccactaccaccaggatatttcttgtaagtttccaaatatccataactctaaagactagagtatgaaattagcttggcaggttatttctcagttattcactgatcataatctatatttattcttctctcgggtatttttgattgttttgcctgctttctgttaaggcttcctgtgtttgctgagagaacgtaagccactgattcccatgaaaggacaaggagtgtattcaattttcttaatactgtctttctgatatttttattgaatcctcctcatctttagatccaacctaacttcttaggtttttggtaccactgttcgttttatagatgttgagactgggcacggtggctatgcctgtaatcccagcactttgagaagccaaagcaggcagattatatgaccccagtagttccagactagctggggcaacatgccgaaagcccgtctctacaaaatacaaaaattaaccagatgtggtggtgcgtacctgtagtctcagctacttgggaggcagaggtggaaggatagcttgagcctaggaggtgagggttacagtgagctgagatcgcgccactgcactcaagcctgggcagcagagtgagacccagtctcaaaataaataaataaataaaataaaagtaatagtcctaattcttggctgggtgcggtgacttgtgcctgtaatctcagcactttggtaggctgaggtggctggatcacttgaggtcaggagttcgagaacagcttgaccaacatggtgaaatccagtctctacttaaaatacaaaaaatagccgggcgtggtagcgggcgcctgtaattaatcccagctactcgggaggtagatggagaagaatcgcttgagcccaggaagtggagacttcagtgagtcaagatcgcaccactacgctccagcctgggcgacagagcgaaactccgtctcgaaaaaaaaaaaaaaaatgagtcctcattcttcataatcttacttctagttcaggagctagaccatatattccttagtgtttctcactaagtctaaaagtaaaacaagaatacaatccctgaatatctgggaactcaggcataatcttaacagagtagtttattgtgaaagactttatgatgatttttacctgtttttatcctgtagtaggaaggtcagcttctcatttagattctgaaggctactggtattaattgtctggaattgtcttaaatctttcttgtgtcctgttttcccagaaagagctgggaacctttgctcaaagctccatcgcccttcaccatcagtacaaccccaagtttcagaccctgttccaaccctgtaacttgatgggagctatgcagctgattgaagacttcagcacacatgtcagcattgactgcagccctcataaaactgtcaagaagactggtaggagacagatgtgtcagctttaagtttttacttgcggtgagaggtggtgggaatcttatcccatagataactaaggatacttgcctaggaatggaggacacaggacatttgtaatttcttccttctctcttttatcctccctttgtactcattatccaagttctagaattacatgataatctctgggcctgggtaaagtgtggaggcagtggacagtataggaatatgggaggtagagatctgaggctcagtgctaagaattggactacagcaatatgaggggtaagtattaggagtcagatcgagataaactggggcctggtaaagatgaaagtcaggtggtaaagtttggtcatgtttagctttttactgtcttcattaagatcaactaaggccaggcgcggtggctcacgcctgtaatcccagtactttgggaggccgaggcacggggaacacaatgtcaggagatggagaccatcctggcgaacacagtgaaaccccgtctctactaaaaatacagaaattagccaggcatgggggcacgcgcctgtagtcccagctactcgggaggctgaggcaggagaatcgcttgaacccaggaggcagagtttgcagtgagccaagatagcatcattgcactccagcctgggcgacagagcgagactcagtctcaaaaaaaaaaaaaaaaaaatcaactaactttatttaccatactgactgcagcataagtgatatctccattctgaatgaaatattgacttgcaagttaggcataagttagagattatacatttgccatgttcagtattttaaagaaatttgcaagtttagattctaccttgcattagtttagtattttttagaaaatacttgctatttacttaagccaaatatttgcttctgatttgtttcttgatttagcaaattagttgtggtttgttctggatttgggtttgtctttggattctattttaaatccctgagtcttatcgttaagttgaaaatagttgtatttaagtgtattatatcatagacacggatcccaaactgctttaacagctatattaaatgatatgaaatggtaatgaaaacttgatttaacaccaaattataataatatcttacacatctgttgacctgttgctttcttctggggatataaaaataacacttatggaaggagaaatatggatatagtagttttgtctctagaaatgcagaggtgcctgaaagtgagaggctgagagagggagagagaaatgaatgagactgaattgtctccttccttttatggttcttttgttcccagcctcaggaggaatctgggagaacttaagtaagaatcaaataaaagtaaaatttggaataccagatttgtgagggagattaaagaagttggaatcttattctggaagaaagaaagcattgttgaaggtctcttatccttcaagtatttaaggggggaaggaggtaaaacatttttgagcatacgctattgttagcaccttattttactaggtgctttttaagtgtttgttttacttagtgaataaagtgttccacataagaaagaatgagtcaacttttattgccattgaatgggactccctttagatataatgttagcttaagaaagactggaaacttttggggggatggtgggcagatgggagggaatcaagttaggtaaggatagctcctacctaaatgcaaaaatgcattcacaggcttttatgaagccctcttttgtcctagaagttgatttatccgagatttattttcttatagcgaatgaatttccctgtttgccaaagcaagtggcttggattctggccacaagcaaggttttcatgtatccagagttacttccagtgtgttccctgaaggcaaagaatccccaggataagatcgtcttcaccaaggctgaggacaagtaagtgtttactctgggggatcaaaacagcagaacatcccaaggagaagatgtagttcctttgaggagtttaggggaagtaagacttgtataataagacacggacacaaaagacaaaaggaaaagcaatatagatgagcagagccctctaggacgtgcttgttctagcagtgccaaatactgctttttgggagatgtcacacacatttttaaagcattttagaccggacatggtggctcacacctgtaatcccagcactttgaaaggccaaggcaggaggttcgcttttattttattttatgttatttatttatttatttagaggcagaatcttactgtgtcacccaggcagtcacagctcactgcagccttgaactcctgacatcaagcgatccttgcacctcagcctccacggagcagctgagaccacaggcgtgtgccaccatacatggctaaatttttttttttttttttgtagagatgagggtctctctgtgttatccaggcatctctcaaactcctggactcaaggcatcctcccaccttggcctcccaaagtgctgggattacaggcatgagccaccacacccaccagattatgaacatttttatggccctttgtgtgtattgccacactgttatcagcacatatgtgtatatgtaaccacgatcatatatgttgttagagggtagtattggtgccggtttaagttgtctgacagggtacctattcattttgtattagttttattagaattattctccttcctttctattctctttgaacttcctttgtattgttagtatacagctcgtcatgatacagctcatcatgatctcacgtttattaatgatttatgcctagtttcttatgttcccacataattgtgaagtatttgattttttttttttaaacagagtttcacttttgtcacccaggctggagtgcaatggtgcgatctcggctcactgcaaccttcgcccccggtttcaagtgattctcctgaccaagtagctggcattacaggcacctaccactacacctggctattttttgtatttttagtagagacgaggtttcaccatgttggccaggctggtctcgaactcctgactcaggtgatctgcctgcttcggcatcccaaaatgctgggattacaggcgtgagccattgcgcctggccttattcttattcataatacttaatcagtactcactaagtatctgaaattttctgttgagtagtcaccaacttgtacaagaattagatttacaaaaagtagattgaccaggcatggtgggcttacaactgtaataccagcactttgagaggctgaggcaggaggatcgcttgaggccaggagtttaagattagcccaggcaacatagtgagaactggtctctacaaataatggaagaaaaaaattagcccggcatggtggtgaacgtctgtggtcacagatacttgggaggatgaagtacgggaatcgcttgagcccaggcattcaaggctgcagtgcgctgtaatcatgccacccgctctccaacccgggcaacagagcaagaccctgtctgaaaaaaaatgaaaaggtagattgggccacacaccatggctcatgcctgtaatcccagcactttgggaggctgagactggagaattgcttcagcctaggaagtagaggttgcagtgagctgcgatggtgccactgcactccagcctgggtgacagcgtgagaccttgtctcaagaaaaaaatgaaagagtagattgtaaaatgtgttagtctggggagaccctttagaaggaaggactgtgaagtgagatttagtgttattctcctttctcagtttgttagctttaggactgaagcattttgaaggaactgagtttcctaatcctctaatcagcaagtaccttctaacctgcaaaactgcccaccaactgacagtgagaatcaagaacctcaacatgaacagagctcctgacaacatcattaaagtgagtgtttcctgcatgcgccatccgggcacctcaccaatatgtacccattcttttatcttgttattctcaaagaaaagaggaaccttcttttatctaaagctaatttctcccactttacactagattaattcccctattgccttttgggcaatattccgctggcagtattccacttatttgctttttgttgttgttgttgttagacagactcttgctctgtcactcaggcttgagtagagtggcgcaatcttggctcactgcagtctttacctcccaggttcaagcgattctcctgcctcggtgtctcctgcctcagcgtcccaagtagcttggattacaggcatgcaccaccacacctggctaatttttgtattttcagtagagatgaggtttcaccatgttggccaggctggtcttgaacctctgacctcaagtgatccacccgccttggcctcccaaggtgctgggattacaggcatgagccaccgcacctggtttcttcttttttatttagatatttatgttgtgtttttagagacgggttcttgctctatcatcctgtttggagtgcattggctcagtcataggtcactgtagcctcaaactcctgggttcaagtgatccttccactttagccttccaagtatcctggactacaggcgtgttccaccaaggctagctcattattttattttgtgtggagatgctgtgtcactttgttgcccagactggtcttgaagttttgacatgtgtcagtccgcctgcctcagcttggcctcccaaagtgttgggattacaggcgtgagccactatgcccagccttttgttttgttttgtttttgtttttttcttgagaaagggtcttactctgctacccaggctggagtacagtggtacagtcatagctcactgtaagctccagctactgggctcaagcattcctcccacctcagcctcccaaggagctggggattatatgcatgagccaccatgcttgcctattaatttttttttttttttttttttttttttttttttttaagaaatggagtgtccctatattgcccaggctggtctcgaatttttggccttaggcattctcctgtctcagcctctaattgctacttcctggtatattggatttaggccttatttattaaccattaaccataagccaaggaagctgaggatttacctgtctcctcactcccttactcccaccacaaacatgcacattttctgctctccaatctcctcgctagtaattatgtcacaattttggttaggttgtattcagggtttacactataagattttaaggactgtataaatactcttcacagctatgttattgtgataccttgcctttcctgctgaacattttgtttttcttggagtaaataatcgcatttttagggggatggggctggacttgattttattatgtaattattcccaggtcaacagtaaaggttacttaaattttcttaatctcctttcagcgtgtctggccttctagatattccgtcactttcatcttgaaggaattgctccttgagccctctgacactattccactctaagcgtgttgctctctgggcttgctgcactgatgttttgggctttttcctccccatcatcctgggaattctttttgcctcttactgtgttggatcttcttatttcctgaattctacatctgtgtttttgttttacttccttcctttagtgaaacacattctagtagcattttttattttaatttttttctaaatttttaaaaattgaggccgtacacggtggctcaggcctgtaatcccaggtctttgggaggctgaggcaggcagatgacctgaggccaggagttcaagaccagcctgggcaatatggtgaaaccccgtctctactaaaaatacaaaaattgaccaggtatggtgccactcacctgtaatcccagccactcgggaggctgaggcacaaaactcacttgaactagggagacagaggttcagtaagcgtggatcactcccctgcactccagcctgggcgacagaggagtctctgtctcaaagatcaagaagcagagaaacaaacaaaaagtacaaagatgtgcacagaaaatgacacacaactcaaacgtgaaggaaaaagatttttctgcagcagaatacggtttatcaagtgccttagcaccacggatgaaactagacaaattctaagccatattatcatgaattttcaaaacattggagccaaaggaaaaatcttacatgctatcagaggttgggagaaacaggtgttacatgaatattcaagagttaaatggggccgtggctcacgcctataatcccagcactttgggaggccaaggtgggagaattacttgagcccaggagttcaagaccagcctgggcaaaaaagtgagacctgtctcaatttttttttttttttttgagatggagtcttgctgtgtcatccaggctggagtgcagtggtgtgatctcggctcactgcaagctccgcctcccaggttcatgccattctcctgcctgagcctcctgagtagctgggactacaggcaccagccaccacgcctggctaattttttgtattttttagtagagacggggtttcaccatgttagccaggatggtctcaatctcctgacctcgtgatctgcccacctcaacctcccaaagtgctgggattacaaggtgagccactgcgcctggcctattctttttttttttttttgagacggagtctcactgtgtcacccaggctggagtgcagtggcactgtctctgatctcagctcacctcaacctccacctcccaggttcaagcaattctcctgcctcagcccgctgagtagctgggattacaggtgcgtgccaccatgcctggctaatttttgtatttttgtaggaataggggttttgccatgttggccagtctggtcttgaactcctgaccttaggtaatctgcccacctccgaaagtgctgggattataggcatgaaccaccacgcccaaccttcatttactcttaaaattgaactttctcaggctctttttttccccccttctcttctaatgcctttcacaccaccatttgcttaaaaggaagctttcatgtgtccaaggtatagattacgatgttgtctttgcagctgttgatcaagaacaaatcttacataagattgctctgagcatctgcttccttttctctctgtgacctaaactctccccttcctggcaaccagaatggagatcatcagttagaaaatattgaataattgtgaaatatttaaatagagattagtttaatttgaaatgtacaagtattcagcatatgctatttatatatgtgcgttcatggatgtttgtgtatgtggtcttgtgtgtgtgtgtgtgtgtgtgtgtgtgtttctcttgatccaccaccaccccattcaccagcctgacaggggacagtgtttccagaaggaatgtaattcatgcgcatttttttcatgttaagttttataagaagaccaaacagctgccagtcctaggaaaatgctgtgaagagatccagccacatcagtggaagccacctatagagagagaagaacaccggctcccattctggttaaaggtacagccctcttcctcgaagtctgtaggaggcagaaggtcactgaaagttctgagagaatatcaagggcttccttaatcgtctaatgctttagttgtagaactaggactttagaaatcttcctgattcacctttcttcccttacttttctgcccttctctgggtgattctacagcattttcaaaataataggtaaaataataatttgctaaaggaaattcacagaagtttctaaagtgtataattagaatgtggtctttgtagatttgatatgcagagagacccttcttggaaagatgccttgagactgtctaaggtctctaaaacctagaaagccctattgtttttcccaaattctttttttgttgttgttttgttttgtttttgagacagagtcttgctctgtccacccaggctaaggtgcgatctcggcttctcgcaacctctgcctcccaggttcaagtgattctcctgcctccgcctcctgagtagctgggattacaggcacatgccaccacacccaactaatttttgtatttttagtagagacggggtttcaccgtgttggtcaggctcatcctgaactcctgacctcaagtgatctgcccacttcagcctcccaaagtgctgggattacaggcgtgagccactgtgccaagcctctttttcccaaattctgacatatgctggatcagagtgttcttgtttccaataggccagtctgccatccatccaggaagaactgcggcacatggctgatggtgctagagaggtaggaaatatgactggaaccactgagatcaactcagatcgaagcctagaaaaagacaatttggagttggggagtgaatctcggtacccactgctattgcctaagggtgtagtcctgaaactgaagccagttgccacccgtttccccaggaaggcttggagacagaagcgttcatcagtcctgaagcccctccttatccaacccagcccctctctccagcccagcttcaaccctgggaaaacaccagcccgatcaactcattcagaagcccctccgagcaaaatggtgctccggattcctcacccaatacagccagccactgttttacagacagttccaggtgtccctccactgggggtcagtggaggtgagagttttgagtctcctgcagcactgcctgctgtgccccctgaggccaggacaagcttccctctgtctgagtcccagactttgctctcttctgcccctgtgcccaaggtaatgctgccctcccttgccccttctaagtttcgaaagccatatgtgagacggagaccctcaaagagaagaggagtcaaggcctctccctgtatgaaacctgcccctgttatccaccaccctgcatctgttatcttcactgttcctgctaccactgtgaagattgtgagccttggcggtggctgtaacatgatccagcctgtcaatgcggctgtggcccagagtccccagactattcccatcactaccctcttggttaaccctacttccttcccctgtccattgaaccagtcccttgtggcctcctctgtctcacccttaattgtttctggcaattctgtgaatcttcctataccatccacccctgaagataaggcccacgtgaatgtggacattgcttgtgctgtggctgatggggaaaatgcctttcagggcctagaacccaaattagagccccaggaactatctcctctctctgctactgttttcccgaaagtggaacatagcccagggcctccactagcagatgcagagtgccaagaaggattgtcagagaatagtgcctgtcgctggaccgttgtgaaaacagaggaggggaggcaagctctggagccgctccctcagggcatccaggagtctctaaacaaccctacccctggggatttagaggaaattgtcaagatggaacctgaagaagctagagaggaaatcagtggatcccctgagcgtgatatttgtgatgacatcaaagtggaacatgctgtggaattggacactggtgccccaagcgaggagttgagcagtgctggagaagtaacgaaacagacagtcttacagaaggaagaggagaggagtcagccaactaaaaccccttcatcttctcaagagccccctgatgaaggaacctcagggacagatgtgaacaaaggatcatcaaagaatgctttgtcctcaatggatcctgaagtgaggcttagtagccccccagggaagccagaagattcatccagtgttgatggtcagtcagtggggactccagttgggccagaaactggaggagagaagaatgggccagaagaagaggaagaagaggactttgatgacctcacccaagatgaggaagatgaaatgtcatcagcttctgaggaatctgtgctttctgtcccagaactccaggtgagagctggagaatattctcaagtatttcgtggactcagtaatatgtatcacttattgatatgccacctgcttgcttgctgcactatggatagtcctaaaatcatttgtatttgatttgtgaatgcattatgggacatgattgtggagttgaggtgaaatgagatggaaaggatgaaattttacttattatattaaactcgtttacacattaaa

SEQ ID NO: 15600 - DNA, 30218 bp, Homo sapiens
gaccccaatacggcagatgatgaggactggaagatgtggctggggggacttatgaatgatgatgtggggaatgaaggtaagttttggtttgtgatttattatgtatactgtccattatctgttgtaaaatttttagtatttggaagggtatagaatggaatggtttgggttaattgatttaatttgtatttaactgataatttatcttaaatcagtagttaatttttctttttttttttttcctgagacagggtctcactctgtcacccaggctgagtgcagtgttgcagtcacggttcattgcagccttgacctcctgggctcaagcaatcctaccccttatcccactgagtagctgggactacaggcacatgccactgtgcccgactaattttttattttttgtagaaacgagatgtcactatgttgcccaggctgttcccaaactcctggcctcaaacaatcctcctaccttggcctcctgaatgctagaattataggcatgagccaccgtgcctgggccaattcttaacatttctttttctgggtaaggaatcttttgaatcctaagattgttgaatgctaagatttgaatcccttgaaacatacatgcacatgtagttttgttgttgtcttttgtttttgagacactgtcccaaaacagggtgttgcccagggtggatcacagtggggtgatcatagctcactgtagccttaaactcctgggctcaagagatcgtcctcaggtctcagcctcccaagtagctgagattataggcacgcaccaccttgcctggctaattttttaaaaatttctgtagagaaatgttgctcaggctggtcttaaactcctgcctcaagtgatcctcccaccttggcctcccagagagctaggattacaggcatgagccactgtgcctggcccactcaaaattttatgtatgatttcattagggttcagtgatttaccaaaagaacactgtgttagttaagggtcttcatgatgcaagtgaaagaatcctaactctatcttgctggggtgaaatgaaaccagactttgggaagtgtagtaaatcagcagtggaactgaggcactgttaggatccccctttcctctctattttacttccttttgtcactcagctccattctcacatttatttttctacaaggttagagctctgttcataaacactccgtgattactttttgctttgtctacacttcaggactctcccctgcaagctccagttataaaatccaggggaacaagtcagatcgacttggtttgatctcatgcccagtctcttggtactacatgggattgatagggagactgttcagcatggagtctggtgattgatagcacctcatagaacagtgtggttgaagtatgtggtgaccctaaagaagtaatggtattatcagaaatggggaagaaatattgatcagataaaagtttggatggaaacagactaagtaggctgggcgtggtggctcacacctattatcccagctctttgggaggccgaggcgggcggatcacaaggtcaagagattgagaccatcctggccaacagggtgaaaccctgtctctactaaaaataaaaaaatttgctgggcgtggtggtgcacgcctgtagtcccagctactcaggaggctgaggcaggagaatcacttgaacctggcaggcgaaggttgtagcgagccgagattgcgccactgcgctccagcctggcaacagagcgagactccatctcaaaaaaaaaaaaaaaagaaaaagaaatagactgagtaaatggctgggtaggtaatgctaggagtaagtcaggataagtgaatgaaagaaaataacaggtccttgaatgtaccttatgatactattaatagttatatagtatatcatttggcaaatgtttgagtactttctttatacaaggcattgtgctagaatctgtgagggataaaggagcataatcatttggtcatggaataaaagctttatgaatgacagggtgcctggcccattgttaggttcacaatacattgtacttttttgtgtgtgtgtgagacagggtctcactctgtcacccaggctggagtgcagtggtgagatcttagctcactgcagccttgacctccttggcgcaagcaattctcccacctcagccttctaaatagctgggaatacaggtttgtgccatcatgcccggccaatttttgtattttttgtagagttggggttttgccatgttgcccaggctggtctcgaactcctgcgctcaagcgatcctcctgcctctgctttccaaagtgctgagattacaggagtgagccatcgcgctcagccagtatattgtaaatgaatgaagttgttgaataaactcagatatgccatcaaagtggcataaatgctgttgtaagattttagaagaggacagggtaacttttgtttaggatgatcagagacagctacatgaaagagctggtaattgaaatggaccttggaaagatttttgaaaacagtgacagggaagagagaaggcatctgagtagaagtgacatgatatactctatatgctggattctgtaggatatattctttccagagttttctcttttttcactgtaaaactgtaagagtaatatatgcttggtataaagaaatcaaatattacagaaataaaacaattaaagccttccccccccccaaggaaaatgtacatatctacatacatgaaatttttcatatgatttttttggggtttatgtatctcttagagtttatttattggcacttcattttcctaccagtcatttccaaagcctttgacaccaaggttcaagtttggttccccagagggactactgataatactttggtatgcatctgtgagagttttcaatgtgtagttactttttagttttccacattaatgtggggataaaaataattaaattttagtcctaaatttaaatttaagacttttctcaaacatttagaaaagatagtccaggcgtggtggctcatgcctgtaatcccagtactatgggaagccaaggcatgaggattgcttgaggccaggaagtcaagaccagcctgggaaacacagtgagacctcatttctattttttttttcttcgacagagtctcgctctgtcgcccagactggagtgcagtggtgtgatctcggctcactgcaacctctgcctactgggttcaagcgattctcctgtctcagcctccccagtagttgggattacatgcgcctgccaccttgcctggctaatctttgtatttttagtagagacagggtttcaccatattggtcagactggtctcaaactcctgacctcaggtgatccaccctccttggcctcccaaaatgctgggattacaggcatgagccaccgcacctggcatttctatttttaaaataaaataaaattttaaaaaagagagagaaaataacaagaagcaaattgttttaaatcttatcatatttcttttttttacccaccctctgtagtagaggggctaacaagccacaaaatgaaaaaaattgtgtaaggagaaaaagatggagtttgaagctgagtcattaacatgcaaagtatagaatcagttccttcataattagcaactgatatattatcccattagtcattctgataggagtctaagcttctgagttttccattactcacccctttgacaatctgatgaaaactatgcagccttcccccagaaaaaaatgtacatatccaaatacatgaaatttttatatgatttttgggagatacatatcttttaaagtttattgacacttcctgtttctaccaggttcagaaatctccacaaaaaggaatagacaggacagagagttctttttttttttttttttttttttgagcagcagcaagatttattgtgaagagttaaagaacaaagtttccacaacgtggtaggggacccgagtgggttgcccaaggacagatagttctaaccactttgtaggcagtgaaatctcagagaaattcattgtcttgctcaaagttacagaatcaatttgttatactcctaggagtagaacccagtttaatattctaggaacatgtctcaatcagacaggtttcacggtaagttaaacctttttttttttttttttttttctgagacagagtctggctctgttgcccaagctagagtgcagtggcacaatccctgctcactgcaacctccacccgggttcaagcgactcttctgcctcagcctccagagtagctgggactacaggtacgcgctaccatgcccagctaatttttgtgtttttagtagagatggggtttcaccatattggccaggcttgtctcgaactcctgaccttctgttccactcgcctcagcctcccaaagtgctgggattacaggcttgagccaccgcacctggcctaaaccatttttttttgagagagtttcactcttgtcccccaggctggagtgcagtggcgcgatctcggctcaccgcaacctccgcctctcaggttcaagcgattctcctgtctcagcctcccaagtagctgggtttacaggcatgtgccaccatgcctggctaattttgtatttttagtagagtcagggtttcaccatgttggtcaggctgttcttaaactcctgatctcaagtggtccacccaccttggcctcccaaagtgctgggattacaggtgtgagccaccacgcccggcctaaaccattttttaaaagtatatgacttttcataatgagctgtgttttttgttttgttttgttttgttttgtttttgagatggagttttgctcttgttgcccaggctggagtgcaatggcacgatctcagctcaccgcaacctctgcctcccaggttcaagcgattttcctgcctcagcctcccaagtaactggattacaggcatgtgccaccacgcctggctaattttgtatttttagtagagatggggtttctccatgttggtcacgctggtctcgaacttccaacctcaggtgatccgccctcctcggcctcccaaagttctgggactacaggcatgagccactgctcctagccttcataataagctgtgctttttatctttggcacaggctaatacaaaataattacagtaagaaagtcaggttctcctagcgttattggtagcagcagctttggtgctcattttcatcactttggttcaaaggcctaagatggtagctattgggaaggaaaggccaggcagaactgactttcaggattttgtttctcataatttggttccgagaacttgaatcagaattgaagagtgtatggatatgtagggtgatgtttattaaagatacagatttcagggcttcaccccttacctactgaatcagaatctaatgagtatggtctagggatctaattctgatatatctaaaggattggaaactactggtctgggaaaggtaagagtgcatgataaaggttgattggggaattggactaatggttagggggagggtgaaaatcctcttttcttaaaataaaacttcagtttgttttgttttgttttgagacagggtctcactcttgtcacccaggctggagtacaatggtgtgatcttggctcactgccacctccacctctcaggttcaagcacttcttctgcctccacctccctagtagctaggattacaggcacatgccaccatacccagctaattttgtatttttagtagagacggggtttcaccatattggtcaggctggtcttgaactcctaacctcaggtgatccgcccgccttggcctcctaaagtgctgggattacaggcgtgagccaccacgcccagcaacttcagtatttttgtatgtgcctattcggacagatttttaaaagagcacacaaagccaatgattaggatgggtgtggcctccagatctaccagttgagttaaaagacaatacaggaggggtatatcagctgggtaaatactgacattgttaataagtcaaaaaagtgattaagctcagaggacatattccacaatcagggtactaaaagctaagcagaactcagaagaatccccctaaatgatttttcagcatctttgttaaatgagtgctctgagaataatattcgctgacccatttgtgtggtgtgggcagaactatctattgcagttcttgcatccaaacagatggagtccaaacctgtgcacactactcattattatgggctcttccagaactttcgttattcagcaatgtttgttaagaactttttgatcaggcgcagtgtctctcacacttctaatccctgcgctttgggaggctgaggcaggcagatcatgaggtcgggagatcgagaccatcctggctaacacagtgaaaccccgtctctactaaaaaaaaaaaaaaaaaaaaaaaattagcctgacgtggtggcgggtgcctgtagtcccagctacttgggaggctgaggcaggagaatggcgtgaacccgggaggcagagcttgcagcgagccgagatcgcccctctgtgctccagcctgggcgacagagtgagactccatctcaaaaaaaaaaaaaaaaaaagaacttgctgtgaagagacttatatagaaagtactatagagattatgaattatgaagacagtattctattcctaaagaaataaagaatctgtactgataagttaaacccacaaatagatgaaaaagatttgataattagttatgtgtaaagaatgcaaattaatatattataagctgagtataaatgttgagtaaagaattatcaagttagattagggtttaatcagcacagatttttcagtgattgtgaattttaaatgtgtgtctgtataagtatatatatatttatatatatttatatttatataaaaaatatatatttgtttttgagacagggtctcactctgtcaccctcgctggagtgcagtggcgtgatcatgactcactgcagcctcaaactcctgggctcaagcagtccttccagctcagccttctgagtagctgggactataggcacacaccacgacacttggctaatttttaaaaagtcatttgtagagattggttcccactgtgttgcccaggatatatatatgtgtttttttttttttttcttgttagatggagtctcactctcgcccaggctggagtgcagtggcatgatcccagctcactgcaacctctgtctcctgggttcaagtgattctcctgcctcagcctcccaagtagctggaattacaggcacgcaccattactcttggctaatttttgtatttttggtagagacgggagggggggggtctcaccatgttggccaggctggtctcgaacccctgacctcaagtgatcttcccacctcggcctcccaaagttctgggattacaggcgtgagccaccatgcttggccccaggctgtatatgtctgtttataacaaaagatgtttatttatggccaggcacggtatccagtctgggcaacaagagcgaaactccctctcgaaaaaaaaaaaagatgctcatttattatgaaaagttaaaacattatggaagaggcgccagactctgtggctcacgcctgtaatcccagcactttttaggggccgaggcaggtggatcacctgaggtcaggagtttgagaccagcctgaccaacatggtgaaacgccgtctctactaaaaatataaaaattagctgggcatggtggtgcacatctgtagtcccagctactcgggatgctgaggcaggagaatcgcttgaacccagcaggtggaggttgcagtgagctgagatcgagccactgcactccagcctgggcgacagagcgagactccaccttaaaaaaagaaagaaaaaaaaaatattgtgggagggtacacagagaaatctttgttaatagttttatgtgtttctttctagatactctgtgggtgttcagtcaagcatgtatttatctcaaacaagaatttttttccacaaaaagaatcatactatacatattggtcttcatctgcaacttgcttctttcacttagcagtataacatatatttttccattataatacatagagatcacctcttctatttaatggatacatgatagtaagaaatttaggtattctctttttggtctttttttttttaaatcagttcctcagtcacactagctgcatttctcaagtcacatgtggctaatggctactgtatgatacaatacaatacatgtatagatcatttccatcatcacagaaagttctgttagacaacactgatctaaaattatctggagaaaaatattaccttaatatataataattccataatttaatgactccttcataatttttacttagtaattgaaaagacagtttagcattaacattaaagaaaattaggctgggccctgtggttcactcctgtaatcctagcactttcggaggccaatgcaggcggatcacctgaggtcaggagttcgagaccagcttggccaacatggtgaaaccttgtctctactaaaaatagaaaaattagccgggcgtggtggtgggcatctgtaatctcagttacttggtaggctgaggcaggagaattgcttgaagctgggaggcagagtttgcagtgagccaagatcatgccactgcactccaacctgggtgacaaagtgagactccatgtcaaaaaaaaaaaagaaaaaagaaaattaaaagggagaagaacatccatatttctattattctaacctaacaaatgtttattatttttgtatatttttagttatttatgattcttattgtaaggatataatttttcatgcttatgattattatgtatatattgtacttttgtcatacatgtattgaacttttatagaatggttacatattcacattttatatgtgtacgtgttgagtatccccttcatccaaaatgctcaggaccggaagtattttggatttcagattttttcagatattagaatatatgtattattatacttaacagataagcatactaaatttgaaaatttgaaatctgggcagggtgcaatggctcacactgtaatctcagcactttgggaggccgaggcattcagatcgcttgagcccaggagttcaagaccagtctgggcaacataccaaaaccctgtctctactaaaaatacaaaaattagttgggcatggtggcatgtgcctaatcccagctacttgggaggctgaggtgtgacaatcgcctgatcctgggcagtcaaggctgcagtgagccatgatcgtgccactgcacttcagcctgggtgacagagtgagaccctgtctcaaaaaaaaggaaaaagaaaatttgaaatctgaaatgctccaatggctattccctttgagagtcatgtttgcactcacagagtttcagattttggagttttggatttggaatgctcaacctgtactattttatactaagaaattataattatatagtcattctctaattgttgggaatttgggccactccttttttcactgtcagcttcactgtacaagtagcttttacagaaagtattattttcatggaatatactacacaaaattagctgggtgtggtggcgtatgcctgtggtcccagctactcaggaggctaaggtgggaggatcacttgagcccgggaggtggaggttgcagtgagctgaggctgtaccactgcactccagcctgggcgacagagtgagaccctgtctcaaaaaaataaagaataaatgtgctttattggaacagattcttagaagtttgagaacagagttaatgagcatctgaaacacttttttttcctagatgaagcagatgatgatgatgatccagaatataatttcctggaagacctcgatgaaccagacacagaggatttccggactgaccgggcagtgagaatcaccagtgagtctgtgtttattctaagtcctgctcttgactgctttgcagctgtctttgtttactttgtagatttttaggggtgaagtttgcagctcatccatgttaagacatttaggtttcctttacccatttattgatctgattctttaaatttaggtacatattcagaaagcccatcagttattcatttgtatatcccacagtcgtgtattcagtccttactgtttggcagggattgtgcaagatgaataagacatggcatctgtgctgtaggagttcagcctagtagggtgatagaaacagaaaaagttacaatacaaagtgataaatgctgtaacaggttttacataaggtataataatgacctaaaagagagtgtcatctcctagtgtatgatatggactaggataggagaacttaggaaagaatttgcagaatgaaatggctttttatcttagttttgaaggaggaataagaaatttggtgaatagggacagagaggaatattgcaaatagaagagcatctgcaaaccacagaattgtaaaacatcaaaaaagtatgtttggaaaatactaagtactttggtggtggtgtatgagtgaaaagacagagaagtggtagataagattaggtagtgtttacatcatggaggatttttaagctctcaaaatgaggtttaagggcgggcatggtggctcacgcctgtaatcccagcactttgggaggtggaggcaggcagatcacctgaggttaggagttcaagaccagcctggccaacatggcgaaaccctgtctctactaaaaatacaaaaattagccaggcgtggtagtaggcacctgtaatcccagctactccggaggctgaggcagaaaaattgcttgaactcaggcgggagaggttgcagtgagccgagatcacgccaatgcactccagcctgggcgacagagcaaggctccgcctgaaaaaaaaaagaggtttaagcagtaaatcagtaggaactgatttggattttagaaagatcactttgatttaataccagtttaatgtattaatttgttaggtaaagtgaacaagactggaggtatggaaaacaattatgataacttagcttgagttatttctataaaaaattatatcattgagctaggagtggtggcttacacctgtaatcccagcactttgggaggctggggcaggaagattgcttgagcttaggagttcgagaccggcataggcaacatagagaaactttgtctgtactaaaaatttaagaaattagcctaatgtattggcacgtacctgtagtcctagctactcaggaggctgaggcaggaggattgcttcagcccaggaggtcaaggattcagcaaactatgatagtgccactgcactccagccttggtggcagagggagatcctgactcaaaaaaaaattatatcattggctagtgtgtcaagcatagaaaacatacatttcatcctgaagaaattctacctatggggagaaagaaaaataaaaaatatatttcataagccattgatttttattgcatgtatgcatgaccctgtactggaataatatacacgacatggagaaggtaagatgctggctcttgaccaggttatgcagagagctttataaacatccaagatatacctaattaatgcagttctttgtgtaaagagaattatgtaaatacaatcctttagaacttacattttattttattgctttattgtgcctttcaccttgcttttaagattagaataccatttcctttgtgaagatctttcatttattttgatatactatgacagggatagtggaagcattgaaaggaaagcaccaggaattagagaaaatgtagaatgaaaaggtttgaggatttaggctttgagaaaactgaaaggagaatctaggaaggtacaagaaaaacctagaaaatctagtgtcgtagaaaccaaaggaagagtcttttggctggggcacagtggctcatggctataatcccggcacttgggaggctgaggcagaggcagaaggatcgcatgagcccaggagttcaagaccagcctgggcaagatagtgagacattgtctctacaaaaacattttaaaaataaaatgaaaattagttgtcgtggtgcatgcccgtagtcccagctacttgggaagctgaggtgggaggatcacttgagcccaggaggtggaggctgtagcgagcagagatcccaacactgtactccagcctgggtcagagcaagaccctgtttcaaaaaaagagtctttcaagaaggacagaatggtcaacagtaaagaaacaagtaaagaaacatctgcttaaagcacaaaagcagatcttaagttcagctatcatcctggaatatatttgccttccctttttgattgttactttcttcagtttacgtataatttctcagggagatcctccttcgttaggattgatcttcttgctttgcattcccgtaccactctttttgtccttttatatactgatcacctcataattgcttatttaatatctgtcttctcccctagactgtgaacttctcaagagctttgttttgtttattgctgtaaagctggtggcaatatttgccagtcgaatagagatgggtaaatgaagggcagtctttctagtcatacagttctgtaatgatagtgaaagctggagtagaatttttaatttttttttctgcctcttgtcctcttgtgtctcattgtcatatttgattataatctctttaaaaggacttatccttatatggataactaaaataaaaaaattaaaaagcatagaatcacagagtttgaaaagctccatgtggtcacatgttttttgcccgcttgagaatttgtttacacctcctctgaggtggcctttttagtcctgtttgtataccttcagtgacagggagctcaacaattctgcagatagtgtattgtaaacttgaacacctcctcaattaatactttccttattgaacccaaatctgaatgcaaattcagatactttccttattgaacccaaatttgaatgcaaagcaggaagatcaatccttttatattcctcctatttgtctttatgttatgttatgttatgtgatgttatgttatgttatgttatgttatgttatgttatgttatgttatgttatttttgagatggagtttcgctgttgtcgcccaggctggagtgcaatggtgcaatctcagctcactgcaaactctgcctcctgggttcaagcgattctcctgcctcagcctccagaatagctgggattacaggtgcccgccaccacgcccagctaatttttgtatttttagtagagacggggtttcaccaggttggccaggctggtcttgaactcttgacctcaggtgatccacctgcctcggcttcccaaagtgttgggattacagtcatgagccgcactgtgcccggcctcctatttgtcttttgttgttaagaaaaaaaaaagcaatttattcccaagtgtacatattaaaagatgtttcttaagtttttttttttttttccctatgcaaaacataggaaagtttcaagtttcttctgccaggtttcttcttctccaaagccttggtgtccagacctctcaccatgcacattactcttctctggattctagcatttattttctttaaacttttcccctgttacatcttattatgaaatttaaaaatatatatagaaaaattgaaaaattatacagctaacattcatatactcaccacctacttttttttgagacgaagtctcactcttgttccccaggctagagtgcaatggtgtgatctcggctcactgcagcctccgcctcccaggttcaagcggttctcctgcctcagcctcctgagtagctgggattacaggcgcctgccaccatgcccggctactttttgtatttttagtagagaagaggtttcaccatgttggccaggctcatctcgaactcctgacctcaggtgatctgcccgcctcagcctcccaaagtgctgggattacaagcgcgagccactgcgcccagcctcaccacctactttctatagtttgttggtttttttttgagaaggagtctcgctctgtctccaggctggagtgccgtggcgccatctcagctcactgcaacctccgactccctggttcaagtgaatctcctgcctcagcctcccgagtagctgggattatagtcacgcgccaccatgcccagctaatttttgtatttttagtagagacagggtttcaccatgttggccaggatggtctcgatctcctgaccttgtgatccgcccacctcggcctcccaaagtgctgggattacaggcgtgagccactgtgcccggccaaactttcagtagtgttaatataaactgtgcgcctttcatatgtgcgggtttcacagctgcagattcaaccaaccttgaaaatattctgagaaaaaaaaatgcaacagcaaaaaataatactaactgggcgtagtggctaacatctgtaatcccagcactttgggaggctgaggcaggaggatcgcttgagcacaggagtttgagatcggctgggcgacatactgagattccatctctacaaaaaactttaaaattatctgggtgcagccgggcatggtggctcacgcctgtaatcccagcactttgggaggccagggtgggcagatcacgaggtcaggagttcgagaccagcctggccaatatggtgaaaccccatctctactataaatacaaaaattagccgggtgtggtggctcacgcctgtagtcccagctactaaggaggctgaggcaggagaatcgcttgaacctgggaggcggaggctgcagtgagccgagatcgcgccactgcactctagccagggcaacagagtgagacgctgtctcaaaaaaaaaaaattatctgggtgcattggtgtgtgcttgtagtcccagctactctggagacagagtcaggaggatcccttgagcccagaagttcaaggttgcagtgagctgtgatcataccactaccactgcactccagcctgggtgacagagtgagagcttgtctcaaataaataaataaaaaataataaggtataacaagcatttacattgtattaggtgataagtaatctagagataaggtatacaggaggatgtgtgtagattatatgcaaatactacatcatttttatataagggacttgagcatcctcagattttggtatccatggatacgaaatggttccaggagattggctcctggaaccaacctccacagatactgagggatgactttatttgccttatcatgcagctgtccatctccctgtccgtctgtggatgcatcttagttttcaaatgcatttcagagtaaattatacttcacttttttttctttttttttttaaattcagacaaggtctatgttgcatgggttggtcttgaactcttgcggtcaagcgatcttcccacctcagcctcctgaccagctgagattacaagtgtgcacaatggcacctggctatatgtcactttttttttgtatttttagtagagacggggtttcaccatcttggccaggctggtctcgaattcctgacctcgtgatcctcccacctctgcctcccaaagtggtgggtttacaggcatgagcctatacttcacttttaaccacttcagcacgcatataatgaactagagctccatatttgtttatgatttctttttataggtaattttacacacagtgtatcacacacatctcaagtgtaccatttaatgaattttgacatgtgtgtacctatgtgacacaaatccctgtcaggatatagaatcctcaccccaggaagtttcctcatgccccttccaagtcaatccccacaccatcccttcagaggcaaccactgttctgatttttttttttttttttttccgagacggagtctcgctctgtcacccaggctggagtgcagtggtgcggctcactgcaagctccgcctaccaggttcacgccattctcctgcctcagactcccgagtagctgggactacaggtgcctgctaccatgcccggctaattttttgtatttttagtagagacggggtttcaccgtgttagccagggcgatctcgatctcctgaccttgtgatccacctgccctggactcccaaagtgctgggattacaggcgtgagccactgcgcccggctttttttttcttaatcacaggttatgtttgccagttttagaacctcacataaatggaatcatataggatgtgctttgtgtgtaaggcttctttcactcagcataatatttttgagattcatttgtgttgcatgggtcgttagtttgttcccttatattgttgagtagaatttcgttgtgtatatatactacagattatctatttttgtgttgatcacctgggctatttttaattttgggtaacgaataaagctgcgctgaacttttttgtgcaagtctttgtggaaatgcttcatttctctctctctttcatttgttcccacctatgagttagaaaagccgtatttcatttatcttgggtcagctgtataggagacaaatcactgggtcacagggtatgtttagttttataagaaattgccagaccattttccaaagtggctttccattttacattcttatcagagttctggttgctctacatcctcagtaacatttggattttaattttttttgttggctgggcatggtggcgcacacctgtaatcccagcactttgggatactgaggcaggcagatcacttgaggtcaggagttcaagaccagcctgggcaacatggtgaaacaccgtcgctactaaaactacaaaaaattagccaggcgtggtggcgcatgcctgtagtcccagctacttatgaggctgaggcatgagaattgcttgaagccggaaggtggaggttgcagtgagctgagaccgcgccaccgcgctccagcctgggcaacagagtgagactcagtctcaaaaaaataaaataaaaaataattaaattacttaaatgattttgtttttgtttttgttttgtgtttgagacagagtctcactctgtctctcaggctggagtgcagtggtactatctctggtcagcgtagcctctgcctcccgggtttaagagattcttgtgcctcagcctcccaagtagctgggattacaggcatgtgctaccatgactggctaatttatttatttatttatttttgagatggagtcctcgccctgttgcccaggctggagtgcattggtgctgtattggctcagtgcaacctccacctcctgggttcaagtgattctcctgcttcagcctcccgagtagctgggattccaggtgcatgccaccatgcctggctaatttttgtatttttagtagagacggggtttcaccatgttggtcagactggtctcgaactcctgaccgcagatgatctgcctgcctcggcctcctaaagtgctggaattacaggcgtaagccactgcccgtggcctggatcttaatttttttaatgtcctcttaagaagggcctttatagaattgttcacagtcctccagacatagtgttagactctgctctagttcagtgatatgtttgccttgttggttatgagccccgttttggagcaactgtgtcttattgaacttgatatcaaccaaaacttttttttttcctcagattcttgtaacaaccaaaactttcaggtcttgttcacattatttttaagccacgtcaccttttcatgcagttaataaactgatctttaaaactcttgctgggcgcggtagctcacgcctgtaatcccagcattttgggaggctgaggcgggtggatcacgaggtcaggagatcgagaccatggtgaaaccccgtctctactaaaaaatacaaaaaattagccaggcacggtggcaggcgcctgtagtcccagctactcaggaggctgaggcaggagaatggcgtgaacctgggagatggagcttgcagtgagctgagatcgcgccactgcactccagcctgggcgacagagcaagactccgtctcaaaaaaaaaaacgaaaaaactcttaactgtaggactgggcaccgtggctcacacctgtaatcccaacacttagggaggccaaggtgggaggatcgctggagcccaggagtttgagaccagcctgggcaacatagcaacatgctgcctctattaaaaaaaaaaattcttaaacatagaactttaaatttatccgtatatgttgcatccagttgatttgagaaaatataattttgaattttccgtctgttggattggcagtccctttcagctttacatcatctacagatgtgttaggtatgttctctgggtcttctaagtcaccgatggagttcttgaatagttcagatccaaagacagcgtcctgtgaaaccctgctggaaacttgtctttctctctctcttttttttttaagacaatatcttgctctgtcgcccaggctggaatgcagtggcatgatcttggcacactgcagcctctgcctcctggactcaagagatttctctcacctcagcctcttgagtagctgggactgcaggtgtgcgtcaccaagcccagctaaatttttttgtagagatatggtttcaacattttgcccaggctaggagactcatctcttgattccattcagtactgtgtggatttggataggtcatctaattataaaatcatctagctcacattttctcctgtcttcttccttttagaatttaagcttcatgagaatagaactctctctctctatctctctttcattctctcatatatcccaagcatctaaaacatggattgaagcatagtgctcaataaatgtgttttgttgttgttgttgttgttgttgttttttgagacagagtctcgctctgttgcccaggctggagtgcagtggcgcagtcttggctcactgcaagccctgcctcccgggttcacgccattctcctgcctcagcctcccgagtagctgggactacaggcgcccaccaccacggctggctaattttttatatttttaatagagacggggtttcaccatgttagctaggatggtctcaatctcctgactttgtgatccatctgtcttggcctcccaaagtgctgagattacaggcatgagccaccgctcccggcctcaataaatgtttttgaataaatgaatgaaggatagccagtcatggtggctcacacctgtaatcccaccattttgggaggccgagttgggctgatcacttgagctcaggagttcgagaccagcctggtgaaccctcatctctacaaaatatacaaaaattagccaggcatggtggcatgcgtctgtggtcccagctacttggggagctgaggtgggaggagcgattggaccagggaggggatgcggaggttgcagtgagctgagatcgtgccactgcgctccagcctgagtgacatagtgagacccatctcaaaaaaagaaggatagatatgaagaatttgtcatgccttgttgaaaacattatacattgtcttcatggaattcctccttattgtaaaatctaatttataccaacaatatactgtctggctttcttgcagaaaaggaagtaaatgagctgatggaagagctgtttgaaactgtgagtaatgatcctcgagtgagaacacgggattttaagtcagttctccagcaagatgtgtcatttggtctctgtgatgctccctctaggagagggggtctgactgaaccaattctccttttagtctacctgggaaagaatataatgacaagggaattttgctaactactagactcttgattatatacatgtatgttgttcttattaacattttccttgaaacttctttttgtttgagggggttcttgctccatcacccaagccagagtgcagtggtgaaattacagctcacagcagccttgaccttctaggctcaagcagtccttcgtctaagcctcctgagtagctgggacataccaacacacccagctaattattttatttgtagagacagggtcttaccacattgctcaggttgttctggaacttctgggctcaagcaattttcctgccttgggcctcccagtgctggaattataggtgtgagccagcatgcctggcccctggaaaacttttgatgacttcccctactgtcatttggtgtgtccttaaagattgtcaactagttttaaactactttgtgtacaaataattacctttttcataaatttgtttcaaaagatttttcattttaagagattgatcattttgaggctgggtgcagtggctcacgcttgtaatcccagcactttgggaggccacggcaggtggatcatctgaggtcaggagtttgagaccagcctggccaacatgatgaaaccctgtctctattaaaaatacaaaaattaggcatggtggcgggcacctgtagtcacggttactgcagaggctgaggcaggaaaattgcttgaacctgggaggcggaggttgcagtaagcccagattgtgccactgcactccagcctgggcaatagagcaagactgcaagactctgtctcaaaaaaaaaaaaaaaaaaaaaaaaaaaaaaaaaaaaaggagagagagattgataattttgagttatccacgctctgtccttactgttacaagttgactggttgaatgacttctttcttggcataatagccatcccaagtgtgggtttgtgggaatcctgaagtgagaaagttctgacattggctctttctgggtgccagcattattatagtcttgtaatctatagttttcactcttccttcccaatactggagcaacattcagaggcccattccccaggaaaaccctccctttcctttgcccacagttccaagatgagatgggattctccaacatggaagatgatggcccagaagaggaggagtgtgtagctgagcctcgtcctaactttaacacccctcaagctctacggtaggctagttgaagaccttgagatttggaatagaggaaaagtttatttctgaaaaggttttcagaagttgcaattgataatttttcatcccaaaccagcttctgttactgatgtaaggatgcagagccctgtcaggagttaggtgtcaagtgaagtctccttgttatggggcagtgcagctgtaggccaagctatatccgtttgggaagggagaaaaaacagtagctggcatccatatccacttctccgggtgagtggtgctggagaggtatgtaggactcaatgtggccagccacacaaactaccccatattgtaatatcctgtctgtcccttttgttctttttatgtgccattaatatctgctaaatgtgactgaaaatttgttagtcacctaggcattagtggagcaaaccctgaagcacctgcagtaaggagtctgaaacatacgtgctgacctttttgcctaaagttggcacttgtgttacagcatccagaaagtagaggctttaattttttcctcattttgtggtggatttgcatctgcactttattgtattgttatccattgcgagtagcagcatgtagtcattagatggatggctagatgtcaggatgcagtttgtgccataagtggaacaaagcaaagagaatagtccctgtaattcgtcctgggtttgaacctaacagcattactaagcagagagcttgggatccatctgaaagctagacctttagagatttttcaatttagtgaaaaaagataagatatgccaaccaatgtctaaaaactagaaataccagtaattctccattacaacaaatatcacaatacaactacatcaaaaacctcaagattgctaagtcagtatttgacccattattttaagttacagctcatacaacaaaattctgttatagcagaatggaaccattcatcctgggaacatataatgggatttgatctataaacgtgttttggttctgctgattgactctttgtaacttcttaaaatttgggaagtgtaggctgggcgcagtggctcatgcctgtaatccctgcactttgggaggcggaggcagggggatcacctcaggttaggagtcgagaccagcctggccaacatggtgaaaccccatctctactaaaaatacaaaaattagccaggcatggtggcgggtgtgtgtaatcccagctactcaggaggctgaggcaggatactcacttgaacccggaaagcggaggttgcagtgagctgagatgacagcctgcttgacagagagagactctgtctcaaaaaaataaaataaaataaaataaataaaatttgtaaagtatagaaataatttaaaactcttgttagaattcagttaccttctggtattcagtagaatacagtcatatatcatctcatggtgatacattctgtgaaatgttatcattaaacgatttcatcattgtgtagaaagcacttggataaacctagatggtttagcctactgcatacctaggctatacggtataacatattgctcccaggccacaaacctgtatagcatgttattctgctgaatattgtaggcagttgtaacacaatggtaagtacatatgtatgtaaacatagaaaaggtacagtaatcttatggagccatctctgaatatgtggttcattattgactgaaacattatgtggcacatgactgtacttgggcagctgctgcttctctttcagttgcaaatgcaaacctgttataatctttgactaaataaagcatcctggattctgtaagtccatagatagtaaaaacttcttaaaacacaataaagaagagagaggaaaaaaaagaacaaaacaaaaaccctgggaaagtgagttatctgtgcttcccttgtcagttatccaagtaatacttattaaaactaggtgcaaggccacgtgtggtgactcacacctgtaatctcagcactttgggaggctaaggcaggcagatcactttaggtcaggagttcagaccagcctggtcaacatggtgaaaccccatctctactaaaaatacaaaaattagctgggtgtggtggcacacgcctgtaatcccagctacttgggaggctgaggcaggagaaacacttgaaccctggaggcggaggttgcactgagctgagattgtgccactgtactccagcctgggcaacagagtgaaactgtctctcaaaaaataataataggccgggtgcggtggctcacgccagtaatcccagcattttgggaggccaaggcaggcggatcacaaggtcaggagtttgagaccagcctgaccaacatggtgaaaccccgtctctactaaaaataaaaaaattagccaggcatggtagcactcgcctgtaatcccagctactcaggaggctgaggcaggagaatcgcttgaacccaggacgcagaagttgcaatgagccaagatcatgccactgcactccatcctgagagagagaaaaagactccatctcaaaaaataataataataataataataataattatagatcaggcgtggtggctggcacctgtaatcccagcactttgggatgccgaagcaggcatatcacctgaggtcaggagttcgagaccagcttggccaacatggcgaaaccttgtctctactaaaaatgcaaaaaaaattagtcggacgtgttggcaggtgcctgtaatccccgctacttgggaggctgaggaaggagaattgcttgaacctgggaggcagaggttgcagtgagccgagaccactccattgcactccagcctgggcaataggaacgaaactccatctcaaaaaaaaataatagtaataataataataataataaaaaatacaactacgtgcaggctatgttttcattacctacttttttatgcttctggtcttctgttccttcagtggtagtagtgcaggtgatcaggttttcagttctcagaagattgcataagacagtcccacaggctttaggtttttaccctgtgctgcccaaacccacagtaaatactataaaagaaagaatgatttttatccccaatagataaatgataacttttaaaaattaactattgaaaacacttatttatctattgctgtaatattggagattacttgaaatatgataacctgcttgttgtaactacatcagcaggtcttatcctgattgcatagggtatcagcacgtgcttaatcacttaagtatctttttctccttttacttcagaactgtcatgctgggtttttcagtttttgcttcagccctggaaacagtctctcaggagggtaggggtgggaagttagggttaggaaccttagaagaggaatttattttatttatttatttattttattttatttttttgaaatggagtcttgctctatcgcccaggctggagtgcagtggcgcgatctcggctcactgcaacctctgcctcccgggttcaagtgattctcctgcctcagcctcccaagtagctgggattacaggcacgcatcaccacggccagctaattttcgtattttttcatagagacagggtttcgccatgttagccaggctagtctcgaaccactgacctaaagtgatccacctgccttggcctcccaaattgctggcattactggcttgagccaccacgcccgactgtttcttgaccttttaataattgtcattctgactggcaaggcttgctttcttaacaagtcaaaaatcttctagcatgaagcaggaaaaggatatactaaaataactaaagtaatgatagtttacctgaacagaactgagtggttggttcaaatattaccctactgctctccatgaaggtattttattttagccctttaaattcctcttcctggctgggtgcagtggctcacgcctgtaatcccagcaatttgggaggccaaggcaggtggatcactttaggtcagtggttcgagactagcctggctaacgtggcgaaaccctgtctctacaaaaaaatacaaaaattagctggccgtggtgatgcgtgcctgtaataccagctactctggaggctgaggcaggagaatcacttgaacccaggagacagaggttgcagtgagccgagatcatgccactgcagtccagcctgggcgacagagcaagactccatttcaataaataaataaataaataaataaattcctcttctaaggttcccaaccctaacttcccacccctaccctcctgggagactttttccagggctgaagcaaaaattcaaaaacccagcatgtcagttctgaagtaaaaggagaataagatagctaagtgattaagcatgtgctgataccctatgcagtcagggtaagatctgttggccaggcctggtggcttacgcctgattccagcactttgggaggccgaggcaggtggatcatgaggtcaagagatcgagaccatcctggccaacatgatgaaaccccgtctctactaaaaatacaaaaattagctgggtgtgatggcgtgtgtctgtagtcccagctactcaggaggctgaggcaggagaatcacttgaacctgggaggcggaggttgcagtgagccgagatcatgccactgcattccagcttggcgtcagagcgagactccgtctcaaaagaaaaaaaaatctgtttatgtagctacaacaagcaggttatctttctttcttttttctttttttttttttttttttttgagacagagtcttgctctgtcgcccaggctggagtgcagtggcgggatctcggctcactgcaagctccaccttctgggttcacgccattctcctgcctcagcctcctgagtagctgggactacaggcccccacgactgcgcccagctaattttttgtattttcagtagagacggggtttcaccatggtcttgatctcctgacctcgtgatccgcccacctctgcctcccaaagtgctgggattacaggcgtgagccaccgcgtccggccaacaagcaggttatcatatttcaaggaatccccgatattacagcagtagataaataagaaaatgtagtatcccaccagggaatactatacagccataaaaaggtatgatatcatgtccgtttcagggacatggatggaggtgaagccatcagcaagctaacgtaagaacagaaaaacaacactgcatgttctcacttataagtaggagctgaacaatgagaacacatgggcacagggtggggaacaacacacactggggcctgttgggggagcgggggaagggagaggatcaggataaactgctaatgcagctgcacttaataccaaggtgatgggttgataggtgcagcaaaccaccaaggtgcacgtttacctgtgtaacaaacctccatgtcctgcacatgtattctgaaacttaaaattaaaattttgagggctaggcatggtggcttacgcctgtaatcccagcactttgggaagccgagatgggtggatcatgaggtcaggagatggagaccgtcctggctaacacagtgaaatcccatctctactaaaaatacaaaaaattagctgggcgtggtggcacgtgcctatagtcccagctacttgggagggtgaggcaggagaattgcttgaaccctggaggcggaggttgcagtgagctgagatcgtgccactgcactccagcctgggcgacagagcgagactgtgtctcaaaaaatatttaaattttgaaaaaaaaatgcaaggcagtgcagcctgagtggatagggaaatgggacaagctgaacctgggatgggagtaacaagtaaatgagagaagaaatgagaatgatgagttcccaccagctccttggctgctttcttatccagatatttctctgttcctagcattttaattttttctttatttgtatattatttagaagaggaattttagaggaatgggatagagtgtaatatagaatcatcatatttgatgcatgctaactactttggcaaaagatttgtaaaaggctgagagtttgactgttggctaaagtgagatgggggattagtagggaatgaaaattgttcaggctctttgctcatcattggaacgaattggatgtgttgtggacctacggaaacactcaaattcagtcatctccctgttgggaataggtttgaggaaccactggccaacctgttaaatgaacaacatcggacagtgaaggagctatttgaacagctgaagatgaagaaatcttcagccaaacagctgcaggaagtagagaaggttaaaccccagagtgagaaagttcatcagactctgattctggacccagcacagaggaagagactccagcagcagatgcagcaggtaggacttttcttggtcatgttaacattggatttttttttttgagacagagtctggctctgtctcccagcctggagtgcagtggcccgatatcggctcacttcaacctctgctttctgggctcaagcatttctcctgcctcagcctcccaagtagctgggattacaggcatccaccaccacacccagctaatttttgtatttttagtagagacagggtttcaccatattggccaggctggtctcgaactcctgaccttgtgatccgcccgcctcggcctcctaaagtgctgggattacaggcgtgagccactgcgccctgctgttaatactggattataccaaggcctaactctgaggccagaaattaacagctttgtaaaagtcagagatagttaccttaccacctcctaaaaccatagtatcttcacatcattaggagctcgagaagtcatcatgttcatgccttatggctcaaggaagagagcacacaaggacactaatggtattcagaaatatagatttcaaagagtccttagtaatctattctgaaatttaacaaccttcactgtgagaagtaggtttgtttttcctttttctaacctcagtccctctggattgaggttaagcttcctctggttctgtcattttgttcaagggaacatgtctgagagatttatgccaagatcctatgttattttcatactcctttcagaaagcaaaatatatgtgataaagttgcaaacatcttggttattgtctctctgggggctgggttacggtggctcacacctgtaatcccagcactttgggaggctgaggtgggaggattgcttgagccagggagttcgagagcaacctgagcaacatagtgagaccctgtctctgcaaaaaataaaaataaattagccaggcatggtgccatgcatctgtggtcccagctactcaggaggctgaggtgggaggattgcttgagcacaggaagttgagagggcgtggagccatgattgcatcactgcacatcagcctgagtgacagagagagatcctttctccaagaagaaaaaaaaaaaagatctctctggattcctgaaatgacaatgtggtaacatgtcacttcatcattttctttccatccccagcacgttcagctcttgacccaaatccaccttcttgccacctgcaaccccaacctcaatccggaggccactaccaccaggatatttcttgtaagtttccaaatatccataactctaaagactagagtatgaaattagcttggcaggttatttctcagttattcactgatcataatctatatttattcttctctcgggtatttttgattgttttgcctgctttctgttaaggcttcctgtgtttgctgagagaacgtaagccactgattcccatgaaaggacaaggagtgtattcaattttcttaatactgtctttctgatatttttattgaatcctcctcatctttagatccaacctaacttcttaggtttttggtaccactgttcgttttatagatgttgagactgggcacggtggctatgcctgtaatcccagcactttgagaagccaaagcaggcagattatatgaccccagtagttccagactagctggggcaacatgccgaaagcccgtctctacaaaatacaaaaattaaccagatgtggtggtgcgtacctgtagtctcagctacttgggaggcagaggtggaaggatagcttgagcctaggaggtgagggttacagtgagctgagatcgcgccactgcactcaagcctgggcagcagagtgagacccagtctcaaaataaataaataaataaaataaaagtaatagtcctaattcttggctgggtgcggtgacttgtgcctgtaatctcagcactttggtaggctgaggtggctggatcacttgaggtcaggagttcgagaacagcttgaccaacatggtgaaatccagtctctacttaaaatacaaaaaatagccgggcgtggtagcgggcgcctgtaattaatcccagctactcgggaggtagatggagaagaatcgcttgagcccaggaagtggagacttcagtgagtcaagatcgcaccactacgctccagcctgggcgacagagcgaaactccgtctcgaaaaaaaaaaaaaaaatgagtcctcattcttcataatcttacttctagttcaggagctagaccatatattccttagtgtttctcactaagtctaaaagtaaaacaagaatacaatccctgaatatctgggaactcaggcataatcttaacagagtagtttattgtgaaagactttatgatgatttttacctgtttttatcctgtagtaggaaggtcagcttctcatttagattctgaaggctactggtattaattgtctggaattgtcttaaatctttcttgtgtcctgttttcccagaaagagctgggaacctttgctcaaagctccatcgcccttcaccatcagtacaaccccaagtttcagaccctgttccaaccctgtaacttgatgggagctatgcagctgattgaagacttcagcacacatgtcagcattgactgcagccctcataaaactgtcaagaagactggtaggagacagatgtgtcagctttaagtttttacttgcggtgagaggtggtgggaatcttatcccatagataactaaggatacttgcctaggaatggaggacacaggacatttgtaatttcttccttctctcttttatcctccctttgtactcattatccaagttctagaattacatgataatctctgggcctgg

SEQ ID NO: 15601 - DNA, 109739 bp, Homo sapiens; identical to SEQ ID NO: 1193

SEQ ID NO: 15602 - DNA, 106964 bp, Homo sapiens; identical to SEQ ID NO: 15593

SEQ ID NO: 15603 - DNA, 92452 bp, Homo sapiens
tggcgcatagtgttaggcgcatgctccttgatgcactgcggcgcggcgctccgaggctcggggacgcgcacgcaattcgctgttgttggctgacttccggtggtgccaaagccgtttccgtggaatcaggccggctggtgagggtacaggtttgtgtgtggtggggtgggaagaggcaggtgggagctgggacacctggacgaacgatgtccaggttgagaaggtcgggtctgagggtgggcgctgggtgcgtggcggaagttaagggcgtgaagtccagtgtctagttgggaatggggactggagccagccctgggcaccgaggtggaagcgcggttaggaccccttttgaaaatgttttcctaggagagggccgtgccggggctgcctccacattggcattcattcaccctgctggtccgacttgggttcccaaaaaagtggattctgtcgagctactgctgtgtttgaggtgcctggagctgaagtagctgtctttctttccttctttttctttctttctttttctttttttcccctttttttgatctcagtaattatctgtgaaataaaagagctgccctggctactcccattctatttcttataaggtcaccaccatctctcacaggaatcaacgaaatcttcatgttttattgagctttagttactgagttttaattacatcagttgattgaggggatggagaatctcccctaatgtcttggagaaacagaagggaggtttaaaactaactgtaggtcgggcgcggtggctcacgcctctaatcctagcactttgggaggctggggcgggaggatcgcttgaggccaggagtttgagaccagcctgggtaacaaatcgagaccccgtctctacaaaaaaaaaaaaagaaaaaaagtcgttgagggtggtggcaagtgccttgtagtcctagctactcgggaggccgaggccagagggtcactggagcccaggagtctgaggctgcagtgaactaggatcttgccactgcactccggtctgggcaacagagcgagaccttgtctctggaaagaaagagagagagagagaaagaaagaaaagaagaaagagaaatctaaccttagacgcttagagttacaaataacttttatttttcagttctctagttcaggctttcatctagtactctgataagtggacattcaggcttcgcttgaacattgccagtgatctaacacaaggcggcttattctattattggatctatttatgacagtaaagttttcctgggtaataagatgccttttttttttttttttttttttttttttgacagagtctccctctgttgcccagggtggagtgcagtggcatgatcttggcccactgcaacctccacctcccgggttcaagcgattctcctgcctcagcctcccaagaagctgggactacaggtgcccaccaccatgcccggctaatttttgtattttttagtagagacagcgtttcaccatattgaccaggctggtctcgaactcctgaccttgttatccgcccgccttggcctcccagagtgttgggattacaggcgtgagccactgcaccaagccactatcagtttttatataatgcttaacatttggcccaaatgctgcacagaataagttgtttaacctctgtttcatttattattcagggagcattcattgagtatctacaatattcagtgacacattgagtatcaatactcagtgatacattgagtatctacaatacccaaatactgaactggtgcagtggcttggatgggaccgtaatcccaatgacttgggaggctgaggtgggagcattgcttgagcccaggaggtcgaggctgcagcgaactatgttcgtgccactgcagtgcagcctgggtgacagagcaagaccttgtttcaaaaaaaaaaacccagatactgctggatattagggatatgagttgaaataatcccatttctcgaaaagctgatagttttggaggaaggagatgagaaagagaaagatgagagaccattacaaaactgataagtaccgtaaaagaggtttacaaacagatactaaaagaacatagaggataccctctggtttaggtcagtaatgcccttaaaatgtgataactagaattgaagcaaaaagccaagaagtaacatagcgcagaggatagtaggactcttatcttccttgtttcgacacaaagtttgttgttaatgtagcctaacctttttttttttttttgagatggagtttcgctcttgttgcccaggctggagtgcaatggggagtgatctcggctcactgcaacctctgtctccgggttcaagtgattgtcctgcctcagcctctggagtagctgggatcacaggcgtgtgccaccacgcccggctaattttgtatttttagtagagacagggtttctccatgttgatcaggctggtctcgaactcctgacctcaggtaatctgcccaccttggcctcccaaagtgttgggattacggacgtgagccatctcgtgcccagccaacatagcctaaccttttaaacaatcacactttgcttttgatttgtttctattaatggaaatacctgtttatgaaaacagcaatagcaaacatgtattgatcatttaccatctaatgaagtagatgctattatattccattttatagctgaagacactgagattcaggttgagtaacttccacaaggtcataaagctggagagaaggtgacttgggaaacatccagacagtctgattccacagtttactctcagcatcatgctagtctaccaccctgatggtaataataacaatgtttgctggacgcggtggctcacgcctgtaatcccagcactttgggaggccgaggcgggtggatctcaaggtcaggagttcgagaccatcctggctaacacggtgaaaccccatctctactaaaaatacaaaaaaaattagccaggcgtaggtggtgcacgcctgtagtcccagctattcaggaggctgaggcaggagaatggcgtaaaacgcgagaggcggaggttgcagtgaaccgagattgcgccactgtactccagcctgggagacagagtgagactctgtctcaaaaacaaaaacaaaaacaaaaaaacacaaaaataaacccacagtgtttattaatcacttactctttaattgtaacaattctatgaagtaagagcaattattttttactgttgagggtactgaagacttgcgaggttaaatcacttggcctaggtaacagtagtccatcagtagtaatcagtagagttgagatttgaactcagtcacttaaccactgtctctcaacttccacctaaagggaaattgtgcatttggtgtgaagtattgtgttcatgatcgaacatgaataaatgaaaagataattgagtaaatgttattacttttaattaatatgaaggcagtaagaactttttattctttcagaatggaacaaaagtgggacttttaaaatgttgccctgtaagaagagaagaactacagtgacagagtccctacagcataaaggcaatcaagaggaaaacaacgtagacctagaatcagccgttaaaccagaatctgaccaggttaaggacttgagttcggtgtcactatcctgggatccaagtcatggcagagtagctggcttcgaagtacagtctttgcaggatgcaggaaatcagcttggtatggaggatacatctctgagctctggaatgctcacccagaacacaaatgtaccaattctagaaggtgttgatgtggccatctctcagggaatcaccctaccttccttggagtcttttcacccccttaatatacacattggtaaaggaaaactccacgctactggctcaaagagagggaaaaaaatgacactcaggcctgggccagttacccaagaagacagatgtgatcatcttaccctaaaggagcctttttcaggagagcctagtgaagaagtcaaggaagaaggaggtaaggtatacaaggtctctaggttacattcttgtcaataccactttgccattgctatttctggatacctttacagagtagtatttctgaaaggggatattgatttggtacggaattggaactgctgtgttgctaagggtcaacagtgaactttttttttttcttgagacggagtcttgccatgtcaccagactagagtgcaatggtgggatcttgactcactgcagcctccacctcctgggttcaagcgattctcctgcctcagtctctcaagtatctaggattacaggcatgcgccaccacgccaggctaattttgtatttttaccagagacggggtttcaccatgttggtcaagctggtctcgaactcctgacctcaggtgatacgtttgccttggcctcccaaagtgctgggattacaggtgtgagccaccgtgcctggccagcagtgaactttatgaatggatatagactttcttttcccctcccattcgctatatccacttctgtacccctttcttctttcttttttgagacggagtctcgctctgtcacccaggccagggtgcagtggcgtggtctcggctcactgcaagctccgcctcccaggttcacgccattctcctgcctcagcctcccgagtagctgggactacaggcacccaccaccatgcccggccaattttttttgtatttttagtagaggcggggtttcactgtgttagccaggatggtctcagtctcctgacctcgtgatccgcccgccttggcctcccaaagtgctggattacaagcgtgagccactgcacccagccattgtatccctttcattccattctctcatcctttatttggtgtgtctggagatgtgtatggtcttttgtgattgggcagcagcttaaagggggagactactgcctgggacactgggaaaggctctactgagatgaatgacccttccaatttgaaagatgaattgcggtttaacagaaagtggtatgggcacataggccaagaacagtgcacagagatagactggcagaaaaggatggtgacatggttgcttggaacaggtggtgggagatgacttcttttttttttttttttttttttgtgacagtctcgctctgttgcccaggctggagtgcagtggtgtgatcttggctcactgcaacctccacctcccatgttcaagtgattcccctgcttcagcctcgcgagtagctgggattacaggtgcctgccaccacgtccagctaatttttttatttttattagagaggaggtttccccatgttggccaggctggtctcaaactcctgacctcaggtgatccacgtaccttggcctcccaaagtgctgggattacaggcgtgagccaccacgccctgccaagatgactttagagtagtagattgtactaaggttgtgaaaggttttgtttttcataccaaggcatttgagcttttcctgtaggtaggtgatagtcatttaaacgtctaagtagaacacatttatgctttagaaaagataccaacttctcttattcattttttttttgatacggagtctcgctttgtcgcccaggctggagtacagtggcgtgatctcagctcactgcaacctccacctcccctgttcaagtgattctcctgcctcagcctcctgagtagctggtattacaggcgcccgccaccgtgctcagctaatttttgtatttttagtggagatggggtttcaccaggttagccagcttggtcctgaactcctgacctcaggtaacccacctgcctcagcctcccaaagtgctgggattacaggcgtgagccactgcgcccggcctagattgtgaaggtttttgtttttcatactaaggcatttgagcttttcctgtaggtaggtgatagtcattttttttttttgagacgtagtctggctctgtcgcccaggctggagtgcagtggcgcagtcttggctcactgcaagctctgcctcctgggttcatgccattctcctgcctcagcctcccgagtagctgggactacaggtgtctgccaccatgcccagctaattttttgtatttttagtagagacggggttttaccgtgttagccaggatagtgtcaatttcatgacctcgtgatccacctgcctcgtcctcccaaagtgctgggattacaggcgtgtgccaccgcgcccggccctttttttttttttttttttgaggtggagtctcgctctgttgccaggctggagtgcagtggcacgatctcatctcactgcaacctccgcctcccaggttcaagcaattctgcctcagcctcccaagtagctaggactacaggcacacgctgccacgctcagctaattttttttttttttgtattttagttgagacagggtttcaccatgctggccacgctggtctcgaactcctgacctcgtgatccaccgacctcggcctcccaaagtgctaggattacaggcgtgaaccactgcacccggcctattcattcattttgactgttaagatgttttcttttttgccgcattttaagtccacttgttcttattttgtcctactggtacattctcagtatgtggttttttattgtgtcttgtgtgtgtttatattgaagaatttcatgtttctgactctgctgtatttgaaaactgatggagtgcccaagatgagggagtttagcaataatcttgatggtatactgtgttggtcacgccctctctggcatgagctgcctgaagcacattgtcaaagatgaaagctcttttggggaaaagtgctctcctgtggaatcatcccttgtcatagcatgtggctctaaattttcagcctcattcacagtagcttgcattgttgtattgcttttgggacacctgtgttttatctggaaatgtagacaggaatagcggttttttttgtatgtgtattatatattgtttcactgctaatcttctacacaattttttagaataaaaaagggtaaatagcttgtgccattttgctaattacatagatttgacttttgatcacataaataaaaaataaaacaaggcaggacattgtcctgcacatagttgatgtggacaaatactttttattactttgaaattcttattttgatagttttccacttaatgaggcaagtgcttaagcctcagtctttttgagttctcattatttagacataaggaaaggagaaatgaaggtttttctttattctccccatgcctttcctttttttctcttttattctttttttttttttttaagagcagaatatactagatcaggacaaattaaggtgatactggaatttaggtgtttttactggaaaaaaggcatttcctttgagatagtttaaagaaaatagtaaggagataagaatcagttcaactactaattcaggaagccgggagagatgtacattcaaagcataggacagaatcaagttttctttcttttttttttttttttttttttgagacggagtctcgttctgttgcccaggctggagggcagtggtgcgatcttgactcactgcaacctccgcctcatgggttcaagcaattctcctgccgtagcctcccgagtagctgggattacaggcacccaccaccacacccggctaatttttgtatttttagtagagacggggtttcaccatgttggtcaggctggttttgaactaccttttttttttttttttttttgagacagagtctttctctgtcagccaggttggagtgcagtggcacaatctcggctcattgcaagcttcacctcctgggttcacgccattctcctgcctcagcctcccgagtagctgggactacaggcgcccgccaccacgcttggctaattttttgtatttttagtagaggcagggtttcaccatgttagtcaggatggtctcgatctcctaacgtcgtgatctgcctgcctcggcctcccaagtgctgggattacaggtgtgagccaccgtgcccagccctgctggttttgaatttctgacctcaaatgaccacccgcctcagcctcccaaagtgctgggattacaggcgtgagccacagtgcccagccccttttttttttttttttttttttttttttgagatggagtctctgttgtttaggctggagggcagtggcatgattttggctcactgcaacctctgcttcccgggttcaagcgattctcctgcctcagcctcccaagtagctgggattacaggtgtgcatcaccaggcctagctaattttttgtatcttagtagagatgggatctcatcaggttggccagcctggtctcgaactcctgacttcaggtgatccgcctgcctcggcctcccaaagtgctgggattacaggcgtgagccaccgcgcccgacctacaattccgtagttttagtaaaccattgcagtaacctacaaaacacattttgatgtttaacttttatctctcagatttttttttgtctgaaaatgacaaagaaatcctttgttctgagttttggtttaaaacataatctctatctgtgtgacatttaaaagaagcagaagacatagttctaacctcaggaagtttagaatcttaattgggaaaacaaccataaatatatactttttggaattggagcttgaaggattcacaggatttgatagattgtgagggaagaagtggaagtagaataacatattctgcaaacatgtagaaatgctgtgtttgtgtgggaaagtactaaggcttcaggtagaaagagtagatccagattatggagagccttgaagctttccccttaagaccttaagatttagaataggatgctggcagtaagggtagagaagaatgggtacaccatagacacattacaaagaaatgattaacactgctcagagactgacatgtaagatatctggggtaggggatggtgatgcatgccttcatagggaaggtatttgagagtttgaatatgagttcagatttgggtatgagttatgcaggtgaaccccaaaattggggctcagcccaggggggttcttggctttgtgcaagattcatttgcaagccaatagagaaaaaggaaagcaagtttattagagcagcagagtacaggaaatggctgccccatagacacagcaatagcagcagcccttgtgaatagatagctattccttgattatatactaaataagggcaggttattcatcaattttctagaaaaggggcagggagttcccagaaccaagagatcctcccattttaaaccatataaggtaacttctaggggttgccatggcatttgtaaactgtcatggcagtggtgggacttttcttctttgtatgtatgtatgtatatatttatttattgtttatttattttgagacagagtctcactctgttccccaggctggagtgtagtggcacgatcttggctcaccgcaacccccgcctcctgggttcaagggattctcctaccccagcctttcgagtacctgggactacaggcatgcaccaccacactcagctaattttttttgttttttgttgttttgagatggagtctcgctctgttgcccaggctggagtgcagtggcgccatctcagttcactgcaaccaccacctcctgggttcaagcgattctcctgccccagcttcctgagtagctggggttataggtacccgctaccatgcctggctaatttttgtatttttagtagagacggggtttcaccatgttggtcaggctggtctcaaactcctgacctcatgatctgccctcctcagcctcttaaagtgctggaattacaggcttgagtcactgcacctggctttttttgtatttttaattgagatgcgtttttgccatgttggccaggctggtcttgaactcctgacctcaggtgatcatctgcccgcctcagcctcccaaagtgctgggattacaggcatgagccaccatgcccagcctgtttttattttttaaaaccaatccatttaattgtgtctttcaaggtaaacaatttatggagcctggatcccaagcctgagagtgctagagctatgggtccaaaacttgtggtattctgagttcagaagggttcgaactcacggtgttcaactcacggagtcagagaacatgcggaatttgtgtattccatttagcaattttgtaaattaccagaaacagactgaaagagtctttcaagatggggaaaattcaactcctgtgttttttttgtttttttgtttttgagacagagtttcactcttgtttcccaggccgtagtgcaatggcacaacctcaatggcccctgctcggttgaagcgattcttctgcctcagcctcctgagtagctgggactacagccgtgtgccaccatgccaagctaatttttgtatttttagtagagatggggtttcaccatgttggccaggctgtctcgaactcctgacctcaagtcatccacccacctcggcctcccaaagtactgggattacaggcgtgagctaccgtgcctggcccaggacagctttttaacaagcagttaaagtggaaaagaaccccccagtagcacgctggtttagtttataagattttagtttacaaattaaaaaatctatatgttttacattttctctttatatcacttttttcctttatctttctctttgtcgtcttttgtatccttttttgctctcttctttttcctatctttttttttttttttggtgacagagtcttgctctgtcacccaggctggagtgcagtggcgcgatctcggctccctgcaagctccgcctcccgggttcacgccattctcctgcctcagcctcccgagtagctaggaatacaggtgcccgccaccacacccggctaatttttttgtatttttagtagagacggggtttcactgtgttagacaggctggtctcgatctcctgaccttgtgatccgcccgcctcggcctcccaaagtgctgagattacaggcgtgagccaccgcgcctggccggtttctttttcctgtctttcttctctgcatcccagttggcaatcttgttgatgaggttgtgtagggtgatcacagaatggatcagcgaggccaagtacactgctaccatttggttattggtcttcaggtaaaaggccttgacaaactcctataggctaatgactggcagcagcttgaagacctgcagctgatagatgaattggtggttggtggacagtttgcctgtggcaactttttccaggtagcttctggtacccagaagcttggagttcagtcccttcaaatccaggacctggtttgtgatacactgggaaagagtgcccactgtagtgtctttgatgtcttgtaacaagtgtttaactccaatttccttagcttcctctgctgcagtttcactggtcacatgctcaaatgttttcaaggctgaagttccatcttcatagacttctactgaaatatatgcttctgtaggcagccctaagtcctttggcttcatgtcactagtgaccaatactgagttacggcagtatcttttcatgatttcattgaaggcagtgtcattcttgtgtagtttagggcctatgtggtaccactcaactattctttccctggcattcaccctcttaaacattctgtatgtgtttttcaaataatcgtgggctaaaaaacaattatctttgtcatcttcattaaaagggactgtaaaactgctggatacatcaagtactttcatttgccatgaccgcaaaagcacatgaagaatgcatttctggtttccaaccttgctgattctgttgaaatgatccaccacattgagcagtacctgggggtggactaccaccttctgcaccaccaggtccagcctcatgatacactctggccaccaggcctggctccctgtgacccactggagtttcttttagcatgcaaattcattataattagtgtataataagcagtgagagcaaccgaatgtcacttttgttgccatcttggttgtaactggttttggctgctttctttgctgcatcctgttttgatcagggttttgttcttgttttgttcagcaggctctctggccagtgcttggaaaacaaatcctgcttctctcctacctcactccccccacagagattatatactccccttcaatcttacagggttttagaagggtggaagtccatcttctgtgactgcttcctgttgattttatgggcattggccctgcctagcactggaggagtaaaaatctcttgatgcctcatctaaggggtcagaacaaggatgtgttggaagccacttgctagcattatcttcacatggaaattgttgcaatctagaagacacacactacaaggaggctaaaagaggcagggccaaagattcatagttacaagatagctgctagaggtcctaaaaagagtagaaaccaggtgagacttgggagggttttttttgttgttgttattttttgggttttttgagacaggatctcgctctgtcacccaggctggagtgcagtggtgtgatcatggcccactgcagctttaacctcccaggctcaagtgatcctcctgccttagcctcctgagtagctgggaccacatgtgtttgccagcaacacccagctgatttttaaatgtttttatagagacacagtctcactatgttgcccgggctggtcttgactcctgagctcaagtgatcctcccactttagcctcccaaagtactggtattacaggcgtgagccactctgcctggccaggagggtgttttttatggtcaaccagatatagttggggtcagttccctggttatatatatgtaaccaggtggcttgctcttagaacttttgaatgttaacctcagcctgtccagagttgttaatatatgtgcagtcggtcttattgataacagtgcagactctacctttttcagtcagtaaacaatccaagactagtctgttgtcagggctacaattgccaaagagtccagagattcctgaatttttcttaatgtctgactagtgttggtggccagagattctagggcctgagttatgtttcttagcattgacttgtggtatgcaaagcccctgccaaggggccaccacccctattgctgccccaattcctgtaaaaattaatcctattgctcttttacttcttgtttttctagattttatggggttatgaatggataccccctgaagggataatggtggccaaaatacattcactggtgtttcaagtttttgataagcaaaatggaaagctattcctagaagaataaatggttccctacagggttgggagtgggtatggggtaggatttcttcccctaaaggtgagcccagatgggtcacaaattgaatccttgcaagttatgccgtccattttttattgccaaactgggtctatagagataccttttccaggttccaatgggggtgattgagtagccctcgttttccaccagagggtggtacctccatcttcccaaattaagcagtcgtttctcccttgcatgtattggtcctggaggaggcaccatgtatagtctccttgtttaccagtgggatcccgtttgccctcccatggccttgggaatttggctactagggttgggtcagagcatcgtggggaatttctgtctctgtgtcattgtcacaacaatttgtgcaaaagatagtatcattagtacactggagctgtagatacccaacatcctaggtccaggtaatagtagggggtaggagggtggttggagaggagtcaggtcaatctgttaagtgtgggagagagctgttttataagtaggggcctaggtaccaaaggaacactatggccaattaggaggtttggggagatggctgtgaggtttgcagggtgcaccagaaggtgatgctctctatcctgagggtgctgatgacagattctgcaatcatgcaggctatttcctgatgctataattctagaaatgtttactatggagttttgttcccattccacagcgagttagattgattaggagcagggagcaagaagaacagggacaactgagtatcacactgggctttagggtggtccctatactcaataaggacaagtaaggtgtttctcaggaggaggtggttgctacttatctgtcttgtgaaatagcaactttaagtcttccagaggtttgcaggtgtaggtcatggtgtcctcctcttgtgcctgtagggattcaccaaaaacaggtttgtttaatccgggacaggtgtacctagctagtgattccccgaagtttaacagcagtgggagtgcttaacaatacctaatggggagtgggtgcccttccatattggttatattataattgatcttcaaggaatccttctttccaagttttttttttttgagatgaagtcttgctctgttgcctaggctggagtgcagtggtgctatcttggctcactgcaacctccgcctcccgggttcaagtgattcccctgcctcagccttctgagtagctgggactacaggcatgtgccactatgcccagctaaattttttgtattttactagacacagggtttcaccatgttggccaggatggtcttgattccctgacctcgtgatccacccacctcggcctcccaaagtgctgggattatgggtatgagccactggcccggccctttccaagttttttttttttttttttttttttgagatggagtctcgctctgtcgcccaggctggagtgcagtggcacgatctcggctcactgcaacctccacctcccgggttcacaccattctcctgcctcagcctcctgagtagctgggactacaggtgcctgccaccatgcccggctaattttttgtatttttagtagagacgaggtttcaccatgttagccagtaaggtctccatctcctgatctcgtaatccactcgccttggcctcccaaagtgctgggattacaggcgtgagccaccacccctgccccaagtttttaataggactaggtgtcctggttaaacagggaacaatcttttcctttgtgggaaagggcaatactttattttcatattcttagagtgccttttgaacctggtctcttaagttccaaaggggagcggggggaaggtatagtgaggcttgtccaaccccttgtttcttgtcatggcctgaattagtttttcaagtttctttttttttttgagacggagtcttgctctgtcactcaggctgtagtgcagtggcacgatctcagctcactgcaacagccgccttccaggttcaagtgattctcctgcctcaggctcccaggtagttgagattacaggcgttcgccaccacgcccagctactttttgtatttttagtagagatggggtttcaccatgttggacaggttagtctccaactcctaacctcaggtgatctgtctgccttggcttcccaaagtgctgggattacaggtgtgagccactgcatccagctgccagaggcaatattgctggccaagcttttattttgttccataccaatgctgaggtggtgtgctacctgccccaggtccctcatgtcccttggtgggacgctgatggccaagggacttagattcaagtgacttatagccaattaaacattgtaggccagatggaagtggaggtaggcaggcactcattattatctcttaaaaccccttttaagcaatataagagccaaaaccagaagccaaaaaataaggttataaaactgacttatctataaattctgtgcattgagctattgtaatcttggcttgcagcaattaggtttacaaaacacaaacattttgttcagctatttaggtatctgtgtgcctgtccttgatttggaaggtctgaattaattatatccctcaaaacccagcccctataatctctcatgcccacctcttcagtagtccttgggcctggaggaattgaatagttttaaattctgtagataaaacaacacataaagaattagcaatgtttcaaacaaaaaagtcataagccctgccctagttttgagaatgacaggaaaggaatcttacaggtacctaaacatttaaattatttagtatcaaggcatagaataagttatattaattcatatagaggcaaaattattaaatgaatacaagcttgtccctgtgtctcattaaagcagtttactttttttttgagactgagtttcactcttgttgcccaggccggagtgccatggcatgatcttggctcaccgcaacctccgcctcccgggttcaagcgattcccctgcctcagcctcccgagtagctgggattacaggcatgtactaccacgcccagctaatttttgtgtatttttgatagggacggggtttctccatgttggtcaggctgatcttgaactcccgacctcaggtgatccacccacctcagcctcccagagtgctgggattacaggcgtgatcaactgcgcccgtcctaaagcagtttactttgccccttttgcccaggtctaaagacaaggctttggttaacttgagtttggtgttagatcctggcaagagttggtgccttctctagatgagctgtctgtacccaggagtcaaagccctgtaactcaaaagcacattgattagttaatagcacccgataaggaactttttaaagggctggcagtggtaatgctggagtccacaacctgtcaggaggctgtaaaaatatatcacaaccttgcagtgattagtttttatagctttgataaagcccagcaacaagccagacaatcaagctaggattcgattctgggggcatttgtaaaagatgttaaaaagcccaaaatactgtattgacacagaaccacaggttactgtaagtaatagttacttatttacccaaagtggtaatctctctgcagtgtaattgtctctccttatgggaagcccacttaactaatcttgaagttaaatttgatgaagagaaaaataatacttgaatttaatcggacaaagtatgttcaaggttttgaatatagcaggtgaacatgaaaagttttctggttactctgaaaatttagacatgtcaagaaaaaccaagagtatagaatcaagttatactggaggaaaacattgcttttatagacctctaagctaaaatatttcagcatctgactgtaaaaacagaactggaagagaaaaagttacagcaactgatgaaaaggttgaaggagagactaatgtctcaggctttctcaaggggagaaaaagctgaaagcagtgagatagaacaattgaacttatgagatatgaatctgagaaattttcaaaagaaacaagttatagaattgaaaagcaaattttcttgtaatttcattaagagcaaatcaataccttgaaacccttactttaacataggagaccattctttagaaagattccacttttaattatagctaacttaatcacataaacaattctttttataaattctcctttataaatcttatgacctgcacagaccatgtatgatatggttgaatgaactttctgacttgtccaatactacctttttttttttttttttgagacagagtctcattctgttgcccagactggtgtgcagtggtgtaatcttggctcactgcaacctccgcctcccgggttcaagcaattctcctgcctcagcctcaaaagtagctggaattaacaggcgtgtgccaccacacccagctaatttttgtattttttagtagagacaaggtttcaccatcttggccaggctggtctcaaactcctaacctcaagtgatccacccaccttggcctcccaaagtgctgggattacaggcataagccactgtgcctggcctatactacttttcctaaataactagtcattctactactctagaacaataccatataagatccttttttttttcccactgagatctgcaggattctttcttatgtagaattattctcttttatttataacctttcttaccaaaaatacctctgaacatccataactttctttacctatctctcccctacttactggttcctttctacctggttatataaataaccttttcaagtccataatttgaatcaacctttagataacttttgaattagacacaattattctttttctcaataaaaacacatcttctttggtaagttttatataaacctaagaaggaagaaatcctgaactatcagatattagcattttatagatgagaaccattccacagtttttaaaattttttattttattgtaaaatgtttccctatataatattcctttcttaattggaaatgacccaggcatccaataagcatccaaaacgattttaagattttaaattatacaaaaagttcacttataagcatttatctcattatatttacctaatttattattattatttataattttttttctttttttttttttgagacagagtctcactctgtcacccaggttggagtgcaatggcataatcttagcttactgtaacctctgcctcccggattcaagagcttcttgggcctcagcctcccaagtagctgggatgcatgcaccaccacgcctggctaatttttgtatttttagtagccatggggttttgccatgttggccaggctggtctcaaactcctgacctcaagtgatccacctgccttggccacccaaagtgctgggattacaggtgagagcccctgtgcctagctggaactatattagacaaaattggtcattattcaaagttatttcctggttaaccatttttaaactctgaacattaggtgaacccctaagtaagaatcttaaacacatgggcattttgccagtaactgagaagattcagctattttcattgagccaacaatcttaaattcgtcttatttatacaattctgaagacatttctatttccatcaattatttaatttaattaattaattttttgagacaaggtttctgttgcccaggctggagtgcagtggcatgatcacagctcactgcagcttccgcctcttggggtcaagtgatcttccacctcagcctcctgagtagctgggactataagtgtgtgctgtcacacctggctaattttttttgttttgttttagagatggagtctcactatgttgcccaggctggtcctgaactcctgggctcaagcagtcctcccaccttagcctcccaaaaggttgggaggtgtgagcgacagcacccagtctttattaataatttgaaaacaagttttatttaccaaaggattcatgtgaacttgaaaagcctttggactttattaaagatagctggatttaaatatttctgacaattttgaaacctgttcacatggctaaactttttttttctaataggtaatccaaggaaactgtagactagaatttgggtaaggtagttttcataacagttttaattttaaaaccctcttttatccttttttcccccttcagcttcagaggaggaggagatgatttaaaagggcaggaaagaaaaagagggaaaggagggagagtagggggatgaggggtacctttccctttgtttctctggtgggggagagagagagagagagatacagcaagccagaacactcattgatggatgaagggtcaccttaccatgacaacttcaatatcagatatcttggacccaagaccttgggactgtcccagggacccacaatcctagagagacatgaaccagtagaagtataataaaagaagactgaaaaggcagaaagggaaaggaagctaggaaaaacaggctcccgtagcagcaaatgtgaattggggaagagaggggttgttgttcagggcgtgtccttggagtccctgagacagtggagaactcacccatcagtggagacaccaaaaaaagtgttcaggcggctgcttttctgccattgcagggagtcgtcattaggtcaggggttcagggcctccagaaaaatgggcttgaacaaggcagctcatttgggaccctcattttgagcagaaagaaagacaggaagagacctgttgcagaaaagaaaatttatgattttaggagggactagaagaagttgctgaagtggatggaatgacagagtaaggaaaaaaatgaaacggcaccaaatgctgaaaaacctggagtatctagacattggccagtgagggtccccataccaaatgctgaaaacctgggggtggccaacagtgaggcccaaaggcatgagacctaacacagttggggccatagaataatgtgactctgacatcccagagtcagcacaaaggaatacctctcaaaataacaaaagcctgccttacatggaatagaaacaactgcccaaattgccaaaacagggactacaaacatgacaactggataaacataagtgtgcatttaggcactaagagcagaaaagtaaaatgactggtcattagaagctaaagagaaaaggtctgagagagaaggtgacaaagtaaattacaaaggacgtggatgtccaggtgtgcttctgtctggggcacccagatgatgggggacaacgaactgactaacaacccagagacactattccccatttcctgattgatttgaaaaggtaaagggagaggagagtgaaagagaaagtaaatcagttaaagaacaccacatcggccaggcgtggtggctcacgcctataatcccagcagtctgggaggccgaggcggggggatcacgaggtcaggagttcaagaccaacctggccaatgtggtgaaaccctgtctctactaaaaatacaaaaattagctgggtgtggtggcaggcacctgtcatcccagctactcgggaggctgaaagcaggagaatcgcttgaacccgggaggcgaggttgcagtgagccgagattgtgccactgcactccaccctgggtgacagagcaagatgtcgtctcaaaaaaaaaaaaaaaaaacgaaaacaaaacacacattgagggggaacaaaggggacactcatcttttcgtggaggccaaatggtgccagtcagtctttgggttcaagcaattctcatgcctcagcctcccaagtacctgggactacaggcgtgcaccaccatggctggctaattttttgtatttttagtagagccggggttttgctctgttgcccaggctagtatcgaactcctgagctcaggcaatccacctgccttggcctcccaaagtgctaggattacaggcgtgagccacggtgctcaacccaatcagtcttaatttagggtctggctaaaggtctccctcagttccttttggcttattattggtctcttcatggtcaccaaggaatgacgcaggtgaaccccaaattggggctcagcccaggagcattcttggcttcgcactggaaggaatcatgaatgggccaacagtgaattgaaagtaagtttattagagcaacagaggaagggaaatggctgctctgtaagagaagcagccgcagcagcagacctgcggattgctggctagctgtatgtatacaaagacaacatggaaaaaaaatgaaacggtgccaaatgccaaaatacccagagtatccaggcatcagcccatgagggtccccataccaaatgacgaaaatcccagagcacctagggggtggccaacagtgaccctcaaaagcatgagacctgtatagccatatatatatgggtatactttgattatatgctaaaataaggggcagatttttttttttttttaattgatcattcttgggtgtttctcgcagagggggatttggcagggtcataggacaatagtggagggaaggtcagcagataaacaagtgaacaaaggtctctggttttcctaggcagaggaccctgcggccttccgcagtgtttgtgtccctgggtccttgagattagggagtggtgatgacttaacgagcatgctgccttcaagcatctgtttaacaaagcacatcttgcaccgcccttaatccatttaaccctgagtggacacagcacatgtttcagagagcacagggttgggggtaaggtcacagatcaacaggataagaatttttcttagtacagaacaaaatgaaaagtctcccatgtctacctatttctacacagacacggcaaccatccaatttctcaatcttttccccacctttcccccctttgtattacacaaaaccgccattgtcatcatggcccgttctcaatgagctgttgggtacacctcccagacggggtggtggccgggcagaggggctcctcacttcccagtaggggcggctgggcagaggcgcccctcacctcccggacggggcggctggctgggcagaggggctcctcacttcccagtaggggcagctgggcagaggcgaaggggcggatttttaatggattttctggaaaaggggcgaggacttcccggaactgagagtccctccccttttaaaccatataaggtaacatctgggggttgccatggcatttgtaaactgtcatggtgctggtaggaggttcttttagcatgcagataaaaggagggcaacaggaggtggctttcatcaccatcttgcttttagctggttttggccagtttctttgatcagctcctgttttgttcagcggggtctttcgaacagtgcttggaaaacaagtcctgctgatctcctacctcaaatggaatgtgaggtgacaatagggccagcaagcaaaaatagaaatctgagattgaagtttagtaagaggcaaggactagaaatgttcagtgttagtcatggttcttctccatggaaacagacatggagggggaagagcagtggattgaagacaaccttgccttgaggaagaagataacagagaaggaacaactggagaagtaatagtaaaagtgaaaagaggaaggagagctttaagaacaaggtactttaaaatgtaaatttaaaatttagtagcaaaggagggataaggataatacctgagaaaaaggttacatttgaagattgatgatcttggagagtagattcaggagtttgttggggaaaggacattatatgaagcagttaaagaggaaggaatggggctgggaacagtggctcacacctgtaatcccaacactttggaaggccaaggtgtgaggatcttgtggccaggagttcaagaacagcctgggcaagatagctaggttccatctctacagaaaattttaaaaattagccaagtgtggtagtgcatccctgtagtcctagctactcaggagtagctagggggatagcttgagcccaggagttcaaggttgcagtgagctctgatcgcaccactgcattgcaacctgggtgacagagcaagaccttgtctgtaaaaaaaagaaaaaggaggaggaatgaaaccccagagatttttctttctttcctctcccccatccccctcctcccctcctcccttcctcccctcctcctctcctcccctctcctccccactctcctcttccctcttatccccttccctcacctcccctccccttccttccctttttttttttttttttttttttttttggagacagagtctcgctttgttgaccaggctggagtgcagtggtgtgatctcggctcactgcaagctccacctcccgggttcacgccattcttctgcctcagcctcccgagtagctgggactacaggcacctgccatcatgcctggctaattttttgtatttttagtagagatggggtttccccgtagccaggatggtcttgatctcctgaccttgtgatctgcccgcctcggcctcccaaaatgctgggatcacaggtgtgagccaccatgcctggccttccttcctttttttgcagtgggagaatgggtgagaaatagctagagaaggcagcgagattattgcatattttttcaagataagttgtcagaaggaactggaggaaattataagattaaaatgctagagaaggaatggataaataactatgggttcatagtcactcagttattgataagtgtaattaagagattttaaaaatcagttcacagatatccggatttaaataaacatttattgtttagtattatctgtgatatcactccccttcattaatctggagaactgaaaattgattatactactttgcactttaattagttgtatatacaagtaatagcaataaaagtacactatgagtgtctctccagaatttttcttcaagtaactttttttttttttttttttgccaatcagataatgtaacacaaaacagagaggaagaaagaaagattgacaattcacatatatctactttggaaaatattgaaaactttaaaggagaaaataaaaatcacccgtagccctgctgtttagtatgtgtttttgttgttttactttcttttaagtaacattttagttttctgattatgaaagcagcagcatcatatacactgtagaaaaaatgaaaatacatagaaagatagttggattattttcaagtattgacattttgttacaattgatacctttttgttgttgttattgtttgtttgtttgtttgtttttgagacagagtctcgctctgtcacccaggctggagtgcagtggcatgatcttggctcaccacaacctccacttcctaggttcaagcaattctcctgcctcagcctcccgagtagctgggattacaggcgcctgccaccacacctggctaatttttgtattttcagtagaggtggggtttccccatgttggtcaggctggtcttgaactcctgaccttgtgatccacctgcctcggcctcccaaagtgctgggattacggtgtgagccactgcgctaggcgcaccttgccgggcaatacattgttaaatcatgtttcttttttctttttttttctttctttttttttttttttttttttttgagacggagtcttgctttgttgcccaggttggagtggagtgtagtggcgtgatcttagctcactgcaacctccacctcccgggctcaggtgattctcttgcctcagcctcccgagtagctgggattacaggcatgtgccactgcgcctggctaagttttgtatttttagtagagatagggtttcgccatgttggccaggctggtcttgaactcctgatctcaagtgatccacccacctcggccttccaaagtgttgggattacaggctggagtgcagtggtgtgatttcggctcactgcaagctccgcctcctgggtttgcattgtccagcctaaatcatgtttcttgactgcaggtattagtgtttaaaccttttctttatttattttttttaaagagatgaggtctcaccctgtcatccaggctatagtccagtggtacgatcatagctcactgcagcttctaactcctgggctgaactgatcctaccaagtaactggcactataggcaggagccacatcatccagctaaaaaaagctgcgactacagacctgcaccaccacacccagctttttttttttttgactttttgcagacacaaggtctctataagttgcccagcatagaaatgttttttgtttgtttgtttgtttaacaggtgaggtctcataattcactgcaacctacaattcctggccttaaatgatcctgctgcttcagccttctaaagtgctgggcttacaggtatgagccactgggctcaactagaaataactttttatttatttatttatttatttatttatttatttatttatttatttttaacgagacagagtcttactctgtagcccacgctagagtgcagtagcacaataatggctcactacaacctctaactcttggcttcaagtaatctttctgccttggcctcccaaaacgctggaattacaggcatgaagccacacataacttttttttagacagggtcccaccgtgttacctaggctggagtacagcagtgcaattacggctcactgctgccttgacctcctaggctcaagtgattctcccaccttagcctcccaagtagctgggactacaggtgtgcaccaccatgcctggctaatttttgtattttttgtcgagatagcgtttcaccacattaaccaggctggtatcaaactcctgagctcaagtgacctgtccacctcagcctcccaaagtgctgggattacagccatgagccaccatgcccagcccacaaattactttttaaacaagcataccagaacttttaaatctaagcaagtattgcccttcaaaacacagagattcactttggtaggcagagcctcttccactgacatttttactacttaaaaaatatttggggtcaggcatggtggttcacacctatccctgtacattgggaggctgaggtgagaggattgcttaaggccaggagttcaagaccagacttggcaacatagtgagaccccatctctacaaaaataaaataaaattagctgggcatggtggcaggaacctgtagtctcagctacttgggatgctgaggtggaaggatcacttgagcccaggaggttgaggccgcagtgagctgagatcgtaccactgcacttcagcctaggggacagagcgagaccctgtctcagcaacaacaaaaaaattggaactacttggccaagtgcggtggctcgtgcctgtaatcccagcactttgggaggcagaggtgggcggatcacctgaggtcaggagttcgagaccagcctgaccaacatggagaaaccccatctctactaaaaatacaaaattagctgggcgtggtggtgcatgcctataatcccagccactcgggaggctgagccaggagaatctcttgaacccgggaggcggaggttgcggtgagctgagatcgtgccattgcactccagcttaggcaacaagaatggaactccgtctcaagaaaaaaaaaaaattggaactgctttttaaaactgtccctgcagggctgggtgcgtggctcatgcctgtaattccagcactttgggaggcctagagggacagattacctgaggtcaggagttagagaccagcctggccaacatggtaaaaccccatctctactaaaaataaaaaattagctgggcgtggtgacacacgcctgtaatcccagctactcggaaggctgaggcaggagaattgcttgagcctaggatacggaggttgcagtgagctgagatcatgccaccgtactccagcctggcccacagagcgagactctgtctggaaaaaaaaaaaacaaaaaaactgtccctgcaagcacattatcagctgcaccacaaaatcatttttcatactctagaggaaatgttccttttttctacaacctttttttcccctctgactccacaatgcttttcaatttatttccccttcctagagccctttaggaccccaccttcctttatagatatgctggatgctaaaagacctcagaaagagaagctgagcagaataagagaaatagagaaagcaaaccttattcagagcatatctgtaacttatgtactgccagcctgagaactgtatgttgataacatcaaaattattattttttaatttatattgtttattttttggagacagtgcctcgctctgtcgcccaggctggaatgcagtggtgcaaccttggctcactgcaaccttggctcactgcaacctctgcctccccggttcaggtgattctcgtgcctgttgaatagctgggattacaggcacctgccaccacggctggctaattttttgtattttagtagagacgaggttttaccatgttacccagcatggtctcaaactcctgagctcaggcagtccgcccaccttggcctcccaaagtgctaggactacaggtgtgaaccaccatgcctggctgatcataacatcaaaattagctgagaacagtacaaatcaactaattataagctaaaatcatgctactcacttttaggaggcaaagaaaggagaagcataagtggaaattagggtatgtaagtcaaattcagaagaacaagtaaaattctattagaataaacaccattaaagcagaagatttagctggatggtgtgatggaagtaagctataacaatgctactgcactccaggctaggcgacagagtgagacccaagtataaagactggccatgtgttttgaaagaaaatgttcaactaagtaatacacaaactagggaaaaaattcagaaatataaaaagtacacagtgaaaatttaggcatcctttcactttgtactcttgctccccaagtcctcttcccaggtaactgttaaacaattttttgtgtatagtccagggattttctgtatatatgcaagctatttccttgatagcctgatttctgatgtttaccatttttttttttttttttttttgagacagagtctctctctgtcgcccaggctggagttcagtggcgcgatctcggcacactgcaacctccgcctcctgggttcaagcagttctcctacctcagcatcctaagtagctgagattacaggtgcccgccaccatgcctggctaattttttgtatttttagtagagacggggttttgccgtgttggccaagctggtctcaaactcctgacctcaagtgatccacccatctcagcctcccaaagtgctgagattacaggcgtgagccactgtgcccagcattcttttttggtttgtttgtttgttttgtttgagatggagtttcgctctgttgccctggctggagtgaagtggcactactatcttggctcactgcaacctctgcctgccaggttcaagcgattctcctgcctcagcctcccaagtaactgggattacaggtgcctgccaccatgcctggcttatttttgtattctttttttacagccgaggtttcatcatgttggccaggctggtctccaactcctgacctcaagtgatctgcctgcctcagccttccatagtgctgagattacagatgtgagccactgcgcccagcctacttttaatactacatgaatatttctttgcgtgtgtgtgtgtgtgtgtgtgacagtgtcttgctctgacacccaggctggagtgcaatggcatgatcacagctcactgcagccttgaactccagggtccaagtgattctcccaccacaccctcctaagtagctgggaccacaggtgtgtaccaacacacccagctaattttagagctctatatttttgtagagacaaggtatctccaaatgttgctcaggctggtcccgaactcctggatcctggctaaagcgatcttcctgccctggcctcccaaagtaatgggattacaggtgtgagccacctggcctagcctaattttttatttttatttttagtagagacaaagcctcgatatgttgctcagactggtctcaaactcctgggttcaagtgatcctcctgcctcagcctcccaaagtgctgggatgatagtcatgagccacctcatgactataagcacctggcttttttttttgtgtgtgtgtgtgtgtgacggggtcttgctgcgttgtccagtctggagtgcagtggtggaatcgtatctccctgtaacctcaaaatcctggcctcaagccatcctcccagctcagcccccccaagtaactaggactacaagcatgcaccatcaccccttttttctctgtctttttaatgctagcctcacctactcccctcacaaagggagtgtttatgaagtgttgaggtgagaaagttgtctaatgaactgtagaaccatatatttacaattttatggtgacagttactcttctgctctgccaaattgatttacaaagtcagggcattttatgattatatttatagttgatgaaatatggtgttaatggtcatctatataaaatgtcatcaggaatttcctttacaagtctgatttttcataggaaaaaatgcaaaactgaaagcatattagaaataaaaagacctcagcaattacctagtttaactccctgagtttacagatgagtaaattggatctgagctttgatttaagagaggaaaattcctatatagtatatgcttaattcatgaagttgtctacctaaaaacactataataagatgctaaattctacaacagagtatgactgagaatggtcaaagtgtggagcaatatttgtgattcttccagggaaacctcaaatgaattctgaaggggagataccttccctgccatcaggcagccaatctgcaaaaccagtaagccagcccaggaaatcaacccagccagatgtttgtgcctctcctcaagaaaagccactcaggactctgtttcaccaacctgaggaagagatagaagatggtggactcttcattccaatgggtaggctttctttttctttttaattaaatgaaacctctttattgaagtataatatgtagaaaactgcacatgtcctaagatatcctgaattcactatatttttacaaatttaatacacccttgtaagcaggacccagatcaagatagagaatgttatcaatacccagaagtccatcttgtcttccctttcaattaccctctacccataggttaaccactatcctgatgtctagcatcatatattggttcaatttttttttttttttttttgagacggagttttgttcttgtcgcccaggctgaagtacaggggcgtgatctcggctcacggcaaccgctgcctcctgggttcaagtgattcttctgcctcagcctccggagtagctgggattacaggtgcctgccaccacacccggcttaatttttgtatttttagtagagacagggttttgctatgttggccaggctggtctcgaactcctgacttcagatgatccacccaccttggcttcacaaagtgctgggattacaggtgtgagccactgcgcctagccagttgttctgtctttttgtcttttatttgaatggaatcgtgtgtacattttataactgcctttttttttttaaagacagggtctcactctgtcactcagactggagtgtagtggtgccatcacggcttactgtggccttgacctcctgggttaaagtgatctttttgtctcagccctaagtagctgggactataagcgcgtgccgtcacagccagctaattttttttctttttttttgagacacagtcttgctttgttgcccaggctgctggaatgcaatggcttgatctcaggtcactgcaacctccgcctcccaggttcaagcgattctcccgcctcagcatccctagtagctgggattacaggcacctgccatcatgcccagctaatttttgtattttttgtagagacggggtttcaccgtgttggccaggctggtcttgaactcctgacctcaggtgatctgcctgccttggctttccaaagtgctgggattacaggcatgagccaccgcacccggcccagccagctaattaaaaaattttttttgtagagacggagccccactatattgcccaggctggtctcaaactgctgtgctcaattgatcctcttgcctcagcctcccaaagtgttgggatgacaggtgtgagccaccgtgcctggcattgtgactgcgtttattctctcaattttttttttttttgttttgagacagagtcttgctctgtcacccagactggagtgcagtagcgcaatctcggctcactgcagtgtctgccttccgggttccagcgattctcctgcctcagcctcctgggtagctgggattactggcacggccaccatgcagggctagtttttttatttttagtagagacgggctttcaccatgttggccaggctggtctcgatctcctgacctcaggtgatctgcccgcctcggcctcccaaggtgctaggattacaggcgtgagccaccgtgcccggcctcaacattgttttatgaaattcatccatattcttggatgtacttgtagattgttcatttttattgctgtatatcattctgttgtttgaatagtttatgtatgttttcttttctttaattttttttttagagataggtactgctctgtcacccaggctggaagttcagtgccatgatcatagctcactgcaatttgaactcctaggttcaagtgatcttcccacttcagcctccccagcaactcggactctaggtgcacgccacaatgcctggctaattttcatttttattttattattattatttttttagagacggttttcactatgttgcccaggctggttttgtatttctgggctcgagcagtccctccttgatctctcaaagtgctgggattacaggcatgagcctcctcacctggtttgctttacgttttctttatccattcaactctttgttttttctttttgcttccttgtgcccattgttacccattcaattcttcttcttcttttttttttttttttttgcgacagagtctttgttttgaaccagagtctcactctgtcgcccaggctggagtgcaatggtgtgatcttggctcactgcaacctccgcctcccaggttcaggtgattctcctgcctcagcctcctgagtagctgggattacaggtgcgctccaccactcctctgctaatttttgtatttttagtagagatggggtttcatcatgttggtctggctggtctcgaagtcctgacctcatgatccgcctgcctcagcctcccaaagtgctgggattacaggcatgagccaccgtgcctagccttttttttttttttttttttttttttttgatgtggagttttgctctcgtcacccaggctggagtgcaatggtgcaatctcggctcactgcaaccgcttcctcctgggttcaagcaattctcctgcctcagcttcccaagtagctgggactacaggcacgtgccaccatggccggctaatttttgtattatttttttttttttagtagagacagggtttcaccatgttggtcaggctggtcttgaactcctgacctcaaatgatctgcccgccttggcttcccaaagtgctgggtcacaggtgcaaaccactgcacctggccccattcaattcttgatgagcatttggatacttttcagttgtgggctactgtgagtggtgctgctgtgaacattctatagattttttgctgaacatgtgtacttctttttcgttgggtggaaatgctagcttataagtttgggcatccttaaaattcttttgaaatactaaattttttattgtgaaacataacacagacacatgactaaagacttctttatttgatttagcaaatggtttttttgtgtgtgtgtgtgaatcttgctccgtcgcccaggcttgagtgcagtggtgtgatctcggctcactgcaacctccgtctcctgggttcaagtgattctcctgtctcagcctcatgagtaattgggattacagggacacaccaccatgcccggctaatttgtattttcagtagagacgaggtttcaccatgttggccaggctggtcttgaactcgtgacctcaggtgatccacctgccttgggctcccaaggggctggaattataggtgtgagccactgcgtccagcctcactttggcaaatgcttttaaaatggacacgtaatttttcttattgcatattctagaccttcattgctatgtaggttgtaagtagtagtggtagtcgacatctgtgtcttatttctggacaaaacaggaaaatgttcagtattccttcattatatatgaggatagttataggcttttcatagaaatattttttaggttaaggaaataattttcctaagttttctgagttttttcatatattgaatttcatcaaatgctttttcctatctctattaagatcatgtttttttctctttcattttgttaatgtggtaagtttcattaggtttattgagatataaaataaaatgtatctgatgagttttgaaaaatatgtacagttgggccaggtacggtggctcacacctgtaatcccagagctttgggaggctgaggcgagtggatcacctgaggtcaggagttcaagaccatcgtgagcaacatggagaaaccccatctctactaaaaatacaaaattagccgggcgtggtggcacatgcctgtaatcccagcactttgggaggctgaggcaggtggatcacctgaggtcgggagttcaataccagcctgaccaacatggagaaaccctatctctactaaaaatacaaaattagccgggcatggtggcacatgcctgtaatcccagctactcgggaggctgaggcaggagaatcacttgaacccaggaggcggaggttgcgctgagccgagattgcaccattgcactccagcctgggcaacaaagagcgaaaactccgtctcaaaaaaacaaaagaaagaaaaatatatacagttgtgttaactgctaccacaaccaacgtggaacatttctgtcaccccaaaagttgcctaattcccctttgctatccccctttctcaaacattggcaagcactgatttctatttccatagttttgcatcttctatgcaaatgttctatacttgttataccgtcatataatatgtgtccttttacatctggtttctttcacagcataatgcttttgagatttatccactttactgttggctttctgggctaagttcctggagcagctattttggaattctgatgatgttcttggtttatttgcagaagaacaagacaatgaagaaagtgagaaaaggagaaaaaagaaaaagggtaccaagaggaaacgagatggaaggggtcaagaagggaccttggcatatgacctgaaactggatgacatgcttgaccgtaccttggaggatggtgccaagcagcacaatctaacagcagtcaatgtccgaaacatccttcatgtgagtaagactggggcagttatgtaaatggaagggaactttttcatggaaagcatataaaaatgttcagcaaattcttgactcttgatacgtgaattaccgattttgtgggttacccgtgacagaacattttacatttttacatatttaagatagctttctccttgcactcagtacaagtttgaaatatgaacacatgttaaagaagaatttaattggaaagataaactgttcctgtttccttccactgattttcatatttactgtattgtttagtagattcaatgttgataatgttcatagtgggtttactcttgtgggtcgatatgtctaaaaagatgcctggttaatagtttattgcactttgtacatatgtaaatacttttcttgatatgtagcaacacagctatttgcagagcctttgctcttgttactctttctcttaagcatatagttacttacctcaggatctccttttatgtgagccattcctgttcctagtagcagctaatgagattggttcatttgctgctacattgtttgaaactgtgtggttctggccaaaacttacttctgccttctttgctttcagttgccttgctttaccccagtctgatgctattcgagtatatggttctcatttgtcctgtacataggtctgacagttacatggagagatgagtattgtctaggtgacaaacccttgttgcataaagtgaaatttcatctttctccaggaagtaatcacaaatgaacacgtggtagctatgatgaaagcagccatcagtgagacggaagatatgccaatgtttgtgagtagttgattatcactcttttaatgtcttggaacagagttatctctaaactggctaagggtaggaggtcacttaggagtttgtaaacagtttggcagctggggttaaagttagcatttcaaaacataagaattacttggtaatttttacttattttatttgttattttattattattattattttattattattatttttttttgagacggagtcttactctgtcacccaggctggagcgcagtggcgcgatcttggctcattgcaagctccgcctcccgggttcaggccattgtcctgcctcagcctcctgagtagctgggactacaggggcctgcaaccacgcccggctaattttttgtatttttaatagagacggggtttcaccacgttagccaggacggtctcgatctcctgaccttgtgatccgcccgcctcggcctcccaaagtgctgggattacaggcgtgagccaccgcgcccggccttgttattttattattattatttttttagagacagggtcttgctctgtcaccaaggctggactcaaactcctaagctggactcagcgatcctcccagttcagcctcttgagtagctgggactacaggaacatgcgactatgcccagctaatttaaaacaatttttttgtagggagggtgtctcactctgttgctcaggctggtctcaaactccttgcctcaagccatcctcccaccttggcccctaaagtgctaggattataggcatgagccacctcactgagctgtgatttttattgaggatttcctttctgtttttttctccttaggagcctaaaatgacacgctctaaactgaaggaagtagtggaaaaaggagtggtaagtattctgtttttttgttgttggtttttttttagcttggtgaataggatctaattcacccatagggaaaaatataggaaagattgtggtctgaatttgcctctttaaagaaatatttataaaagacagtagaattgtttctacatgatcataagctatgataatcatagtttattttagtagatatgaagcattgctttttggaattgctagatagataaccatttggaatagttgaaatcaataggtgagaccagtttttctatttatgttacaacacatgttgcaaagtgtttagtatttttcatagtgtgttccaggggccagttgcataaaaatcactttggtgtgggatccctcaggcatgcttattaaaaatgcatacttttggctgggtgtagtggctcatgcctgtaatcccagcactttgggaggccgaggcagatggatcacttgaagtcaggagttcgagaccagcctggccaacatagtgaaactctgtctctactaaaaatacaaaaattagctgggtgtggtggtgtgcgcctataatcccagctgcttgggaggctgaggcacaagaatcacttgaacccgggggcggaggttgcagtgagtggagattgcaccactgcactacagcctgggcaacggagtgaaactgtctcaaaaaaacaaaaacaaacaaaaaaatctccatacttttgagcccaccccagacctgagaatcaggacccatgggcagggccttggaatatgcattggcaaaaacacaacagttaattcttttgaatactaaagtgttgagaaccacttgaagacatctgaagtattctgtgcagcaagctctttggtgcttggagctgtgctatatccttcttaataagcacttgactagtttgtgcttacaaggcaggtaatagtcatgagggagttcattatatttctgatagtaaggaagatttgccttacagaccgaaaatatgtatcataggttttatctgtcctggttttattccttggagactgatagaagaaacaggtctaggctgggcttggtggctcatgcctgtaatcccagcactttgggaggtggaggtaggaagattgcttgaagccaggagttcaagaccagcctgggcaacgtaatgagaccgagaccttgtctagaaaaaaaagcaagaaaaggaattggtgtattcttccacattacttttcctacagttgaagaaaactagtatgttatttcataacattcttttcttggctatacatcccccaatttctccccccctttttattttgggagtcttgcttcatcgtccaggctggagtgcagtggcacaattctggctcactgcaacctctgcctcccaagctcaagtgattctcctgcctcagcctcctgagtagctgggattacaggtgcgtgccaccatgcccggctaatttttttgtattttttaaaatttttattagagatggggttgcaccatgtttggccagcctggtttcaaactcctgacctcaaatcatctgcccgccttggcctcccaaagtactgggattacaggcatgagccactgtgcctggcctttttgttttgagatggagtctcactctgtcacctaggctggagtgcagtggtgcgatctcagctcactgcaacctctggctcccaggttcaagcgattctcatgcctcagcctgctgagtagctgggattataggcatgcaccaccacacgcatctaatttttgtagttttagtagagatggggtttcaccatgttggccaggctggtttccaattgacccatgtgatcgcccgccttgtcctcccaatgtgctaggattacaggcgtgagccactgtgcccgtcccatatccttttaaaagtatgccaaaagaagactctactgaaccagatatggtttgactagtagttagattatctccacagtgttccagattacatatttctcctaatgtagcctaaggtcaaattgacctttgtttttggcaatcacatcactttttttggtctggttgactaactcttgttgcataaattgaaatttcatctttctctaggatgtgttcacaaatgaataggtggtagctatgatgaaagcagccatcagtgaggaagttctatgaagtctacttgacatatagaatataattaacatggctgggcacggtggctcatgcctgtaatcccagcactttgggaggccgaggcagctggatcacctgaggtcaggagtttgagaccagcctggccaacatggcgaaaccccgtctctactaaaaatacaacagttagctgggcgtgtggtgggcgcctgtaatcccagctacagagacgagaggatcgcttgaactcaggagggagaggttgcagtgagcggagaccatgccactgcactccagcctgggtgatagagcaagactctgtcttaaaaaaaaaaaagaatataattaacattaattctttatttgatttggggaaaaaaaatccaaggagatcaaattaggctctgaattatgtttattggccatgaatatagatgtggagaagttgggccatccaagacggtatagtttacgtaggagagcaagtattaaaatgtaggtctcttgcttcttaattctttctttttttttttttttttttcagtgacttgctctgttgctcaggctagagtacagtggcctaatcatagctcactgcagccttgaactccttcctgtgctcaagggatcttcctgccttagcctcgcagacagctaggcctataggcatgtgccaccatgtccagctaattggtttttttgaaacattcttttgtagaaatagggtcttaatgtgttgcccaggctgaactcaaactcctgggctcaagtgatccttctgccttgatctcccaacatggggggattacaggcatgagccgctatacttggccttcttaattcttactagactgactccaacacacttctgaatgctggcttgcctttctaatggatttggcagtaggtaggaaagggaaatgggcctgaatcacatcattccctttaccctatattggtcccacctacacagcactagataaatggtcagaacatagcagggctgatttgatttgagaagctaagactccttttagagacagaacctaatggccagttggcttttgttcataaggtgcttttggttgggttacaattaaatggtcaagaaattatacatcctcaatggcattttatcagcagtatataagaactttaaaaaagttctttaggctagatgtggtggctcacacctataatcccagtgctttgagaggctaaggtgggaggattgtttgagcccaggattttgagaccagcctgggaaacctaatgagactccatctctacaaaaaatttaaaaaattagtgaggcctggtgaggaggcatgcctgtagtcctagctaattagtaggctgaggcaggaggatcgcttgagctcaggaatttgaggctgcagtgagctctgattgtgctgctgctctagcctaggcaacagggcaagatcctgtctcaaaacaaaaacaaaaacaagaaaaactttccccctagctcttataaaaattttcaaacattcaaaaagttgaaagattgttacaatgaatctaaattccaagagtaatattttgccatatttgctttatatctctctgtgttgttttttcctgtactattggaaaaataagtgtggacaacatgaaactttgccctaaatgccctggtaaaagcttttttttttttttttttttttaagaaaaaaaaaagcccataggcagagcagggctaccccataggcagaatagtccataaaagcttttcatggctggctttttggagttgtacttatggtggattcatgtaactgattacaaaaatatattgctgttaaaagactactgtaaccaaaatatcttaggtttgtgtagtttaatagtttataaatagttgtcacatctgttgttccatgtaaaccgcagctgtgatatgaacaaggtagacattgttttcttcatttatagaaagaagtgaggcttaccaggtgtaaggcagaaatgctaatgacagtaatagattctttcctggtttcttctttctaactctgacaaataattgagagtataccctcagggataatcaacacctctagatcactgcagttacttgttaagtatatggctgttagtgatggtacagaggaagtaaacatgaaaaacaattatttcagttaagataacttaattatttatattctttgttggtaggtaattccaacatggaatatttcaccaattaagaaggccaatgaaattaaggtaaacttggaagaaataattgttattcttttccagaaagacttcatcggttttgaaacttaagtacttcctctttaacttttcttgatcaatctttgttttaattccagctttgtttttttccattctattactcttaggtttgtatctcatggaattcactttaacctctgcctcgtgttatttgctttagctgtacattatgctcttaggattttttttttttctgccctgcttcttccccttattttccaaatacgtatgatttgtgtttcccattacttcatttctttctaattgtactaatgtagcctcctcagtttgtggatatccaccttgaagaagatgattcctcagatgaagaataccagccggatgatgaagaagaagatgaaactgctgaagaggtcagtgaatgttagttggtaatatttgtcttaatagagcagggtatactttgcttccttagtaatgtcacttgtagagaggattgagacatggttcttttttcagctcatttctgtgctttaagctgtttttctgccctttatactcccttaattttagaatttgttgtattatgaaatacagcatagaaacgtgcatagaataaaaatgtatagctttggttattataatgcaaatcctcatgaaactcatagcaaagtcaagaaatatatcattactaggacaacccctgtataccctccccagtcacaatcacctccctccccctaaaaataaccactaccctgccttttagtaattatttctttgcttttctttatagttgtatcacctcaatatgtatctctacacactgtagttcaattgttactgttttgaactttatataaatggacccatgtttatatgttttgttcctagctttttaaaattcaacattaagcttttgagattcatttatactattggttttagctatacttcgttccctttcattgctgtgttaatatgttctttgacttgtttcttaatgtgttctttgaattgttttgtaaaaggattttagaccaaggccttacactttgtaatgcagattaggatagtgatctgatccctgtccccacctttaggattttttttttgagtctcctctgttgcccatggagtgcagtgtgcgatgttggctcactgccatctccatctcccgggttcaggcaagtctcctgcctcagcctcctgagtagctggaattaacaggcgtgcgctaccatgcctggctaatttttgtatttttagtagagatggggtttcgccatgttggccaggctggtctcggacttctgacctcaagtgatccacccgcctcggccttccaaagtgctgggattacaggcataagacactgactgcacctggcctttaagtttctatttaaattttattttctgttactgtaactagttgagtgatggattttatttatttatttatttatttttgagacagagtctcgctctgccacccaggctggagtgcagtggcgtgatctcggctcactgcaacctccatctcctggattcaagtgatactcctgcctcagcctcccgagtagctgggattacaggtgcacgccaccgcgcctggcttatttttgtatttttagcagagacgggtgttcaccatgttggccaggctgagtgattgatattttatgattccttctcttgagatacttcagactttgtggaatgaggtaggggcataaatattaaggcgaactggatttattttgtagagcttattggaaagtgatgttgaaagcactgcttcatctccacgtggggcaaagaaatccagattgaggcagtcttctgagatgactgaaacagatgaggagagtggcatattatcagaggtaaatcggcatcatacaaaagagatgttagacataactgtctaagtagattttttaactgtataagtagattatttatccatggtgattctgggctgtcaccctttttcaaagtttcttaagttagtaaacagttcagagaaggctagaactcagtgatagccaaagaacttttctgagttctcattaaggggccaaaaatgtgcaactagcagagtttcttttctcctacccttctcttctttcatatctgtgctttttaatattgtcctaaagccattgttattaatttcccacattttggtaaactaagtagcattctgttgacttctctagaaataggatgaaaactaattagatcaatacacttggtgtctttgtttttatgtaactctaactagagaagagaaaggacaatggtgtatggaaagtctgcctctttttccctctctttttttcctttttttgctttctctttctttcttacctccttccttttttgatgcagtcacctcttttaatcaggctgagaaagtcaccacaccagccatcaggcacatcagtgctgaggtagtgcccatggggcccccgccccctccaaagccgaaacagaccagagatagtactttcatggagaagttacatgcggtagatgaggagctggcttccagtccagtctgcatggattctttccaggtaaatattaaaactgtacttaactgagaaagtcaagtggagtaatgtagttgttgctcaggctgggaagggagaggaaaagataactacaattttatataagtaagagttagtctttgatactttgtatttggctagtgctattttctgctcaaagtgacaatggcagtttggggttttttttgtttgtttgtttgtttttgagacagggtatcaccctgtcacccaggcttgagtgcagtggtgtgatcttggcccactgcaacctccgcctcccagactcaagtgatcttcccacctcagcctcccgaataggtgggacaggtatatgccaccacacctggctaatattttagttttttgtagagatgaggtctccctatatttttgctcaggctggtattgaactcctgggctcaagtgatcctcccaccttagcctctcaaagtggtaggactactggtgtgaaccaccgtgcctggctgagaatggcagtttctaaggaagaaatgaactatgtagcagagagcattttaaaatgtagaacataggaaaaagcttcacccaaattcccccaaattaaccttttaccacaattgcttgatggttctcttcctctttctctgtatatacacatagtgttttctaaatcattttagagtgtgatgcaggcatgatgccattttacctctgcatgcttttgtgtatattttctaaaaatgagtttattatcttgtattaacacagtataatagtgttaatcaaaatcaggatacaggctgtgcgctgtggctcatgcctgtaatcctagcactttgagaggccaaggttggtggatcacttgaggtcaggagttcgagaccagcctggccaacatggtgaaacccccatctcgactgaaaatacaaaaatttgccaggtgtcgtggcgcatgcctgtaatcccagctacttgggaagctgaggcaggagaatcgcttgaacccgggaggcagaggttgcagtgagctgagattgcgccactgcactccagcctgggcaatggagagagactctgtcccaaaaaaaaaaaaaaatcaggatacagtaatattacataatatattaaagtgcttattctggttttatctgttgtcccaacaatgccctttatgttggaggaaaaaaatttttttttccctattcagcattcaaccctggattaaatatctatttaattatcttgttctttagtctcctttaatctggaacagtttctcagtctttgtcttttataaccttgacagttttgaggagtatgcaccatttattttgtagaatgttcttcaatttttatttttctaatatttcctcttagattcaggttttgcacttttgttacaaatactggaagagtgatgtgtgtttctcattgcatcatatcagaaggcacgtgatccctgtaatgttaactttcatcacttggttaaggtggtgtgtgcttggttttcccattgtaaagttattattttccatttttaattagtatatatcatgtggggatatacttcaaagccgaattcctttctttctgtttttttttcctagatggagtctcactctcttgcccaggctggagtgcagtggcgcgacctcagctcactgcacctctgcttcctgggttcaagtgattctcctgcgttagcctcctgagtagctgggattacaggtgcccaccaccacgcctggctaatttttgtattttttagtagaaatggagtttcactgtgttagccaggatgatcttgatctcctgacccgcctcagcctcccaaagtgctgagatgacatgcgtcagccaccgcgcccagccttctttttttttttttttttttttttttgagacagagtcttgcctgtctcccaggctggagtgcagtggtgccatcttgggtcactgcaacctccacttcggggttcaagcgattctcctgcctcagcctcctgagtagctgggattacaggtgactgacaccacacccagctaattttttgtatttttagtagagatggggtttcaccacattggccaggctggtctcgaactcctgacctcaagtgatctgcccaccttagcctcccagagtgctgggattacagacgtgagccaatgcacccagcccaatcaatcaaattatttttctcacactaatattagcatccattgattattctttcttttttttttttttttttttttttttgagacggagtcttgctctgtcctctaggctggagtgcagtggtgcgatctcggctcactgcaagctccgcctcccaggttcacatcattctactgcctcagcctcccgagtagctgggactacaggcgcccgcaccatgcgcggctaattttttgtatttttagtagagatgggggtttcaccgtgttagccaggatggtcttgatctcctgacctcatgatccacttgcctcggcctcccaaaatgctgggattacgggcgtgaaccaccacgcttggcctgattttctttcttgaaacagtctttactatggtcgttgtcaaatgatgactttgtaattctaacatttagtgagtaattttttattttttggatatggagtcacagtctgtcacgcaggctggagttcggtggtgtgatctcagctgactgcaacatctgatctgcctcccgggttcaagcagttctcgtgcctcagcctcctgagtagctgggaccagaggcacacaccactacgccagctaattttttgtattttttagtagagacagggttttattgttggccaggctggttttgaactggccttaggtgatccacccttgtcaacctcctaagtgctgggattataggcatgagccactgcgcctggccttagccagtaaattttttttttttttttttgagacggagtctcactctgtcgcccaggctggagtgtgatggcgtgatctcggctcactgcaagctctgcctcccaggttcatgtcattctactgcctcagcctcccgagtagctgggactacaggcgtgcacaccatgcccggctaattttttgtattttttggtagagacggggtttcactgtgttagccaggatggtctcgatctcctgacctcatgatccgcctgccttggcctcccaaagtgctaggattacaggcgtgagccaccatgcctggccttagccagtaaattttaatgttccaagtttcccctatcattcttgcaggtcaatgaaaaatgtctgtcctaaaattttaaagtatgatataataatttaaaaagaaatcctaaaattaaaaaatataattaaggctgggtgtggtggctcacacctgtaatcccagcactttgagaggcccaggcgggtggatcacccgaggtcaggtttgagaccagcctggtcaacatggtgaaaccccgtctccactaaaaatacaaaaattagctgggcattgtggcaagtgcctgtaatcccagctactcgggaggctgcggcacgaaaatcgctttaacccaggaagcggaggttgcagtgagccgagatggcgccagtgcactccagcctgggtgacagagcaagactacatttcaaaaatatatatatatatataattatatatatatataatttataattatatatgtatataatttataattatatatgtatataatttataattatatatgtatataatttataattatatatatgtatataatttataattatatataagtatataatttataattatatataagtatataatttataattatatataagtatataatttataattatatataagtatataatttataattatatataagtatataatttataagtatatataagtatataatttataagtatatataagtatataatttataagtatatataagtatataatttataagtatatataagtatataatttataagtatatataagtatataatttataagtatatataagtatataatttataagtatatataagtatataatttataagtatatataagtatataatttataagtatataatttataattatatataagtatataattaaaaatagaatattgaatggaatagctctgagtcatttaatcaccatgctttggagtatgtagtagtaggagcagtaatagttttttatgtaatcatttatttaccaaacacatactgaatggttgaagttgagaaacaacagtgtagaagacagaaaaaattgttcttcatggaacttagtctgttgaggagagatagactataaacatataaacaagtaaattcggatgtggttaagtgctatgaactaaattaaaatgaggaaatatgaaacttcctgtcagagaactttagataggctgatcaaaaaagacctccttggctgtaattccatcactttgggagtcctaggctagaagattgcttgaggctaggagtttgagaccagcctaggcaatatagtgagactccatctctccaaaaactcagaaaaattatataggtgtggtggcgcatgcctgtattcttagctgcttggtggctgaagcaggaggattgattaagcctgggagcttgagactacagtgagccatgactgcacccctatactccagcatgggtaatagtatgagaacttttttaaaaaaaattttaaaaaacagggtccggtttggtggcttatgtccataatcccaacactttaggaggccaaggagagtggatcacttgagcccaggaggtcaagacaagcctgggtaacctagtgagaccttgtccctaccaaaaaaaacacaaaacttagctgggcatcctgttacacacctgtagcctcagctacttgggaggctgagcctaggagatcgaggctgcagtgagctgtgatcatgctacagcactctagcctgggccacagagcaagactgtcaaaaaaacaaaaaacaaaaagaaaaaaggcctctttgaggagatggcatttaaactgagatccgaatgagaggaagccaggcatgtaaaagatctggggagaaaaagtgctccatatggaagaaacagcacattctaagtcgctaagatagaaacaaccttggcatggttaaggaacagaaactacatgaagggtgggatcgtgaaaaagaggtagaaatgaggtcagagagcaaggcaagagctagatcatgaaggtcttaggaaaccatgataaggggtgtagattttattttaaacattagaacagatgcccagtgtggtggctcatgcctgtaatcccagcactttgggaggccgaggcgggtggatcacctgaggtcaggagttctagaccagcctggccaacatggtaaaaccccatctctaacaaaaaatacaaaaaatgtcctgggtgtggtggcgcacacctgtaatcccagttacttaggaggctgaggcaggagaatcgcttgaatgtggggagtggaggttgcagtgagctgagatcatgcccctgcactccagtctaggaaagagtgagactccatctcaaaaaaaaaaaaaaataaataaataagaaaagatttttgtgatatttttggattaatgttaaaaattccttttggttaacgtgtgggaaatggactagagtaaagcaagagggtaaacagaaacccattagcaggttgatgcagtgtagtctagggagagcttcccaaattgatctacagattcaatgcagtccctatccaaatcccagctaccatttttgtggaaattaacagtctaatcctaaaattcatgtggaattgcacaggcccagaatagccaaaacagtctttaaaaagtacaaagatggaggtctcacactttctgattttcttttttttttttttttttttttgagacggagtctggctctgtcacccagactggagtgcagtagtgcgatctcggctcactgcaagctctgcctcccgggttcatgccattgtcctgcctcagcctcctgagtagctgggactacaggcgcctgccaccatgcccagctaattttttgtattttttatagagacggggtttcactgttagccaggaagttcttgatcttctgacctcgtgatccgcccaccttgtcctcccaaagtctgggattacaggtgtgagccactgcacccagcctcatttttttaaaataaatattttaaataagagtcttgctctgttgcccaggctggagtgcagtggtatgatctcagcttgctgcagcctcaacctcctcctgtgttcaagtgatcctcccacgttggctcttgcatagctggaactacaggcatatgccaccactcccatctaactttttattttttgtagagatgggggtcttgctgtgttgcccagctggtcttgaactcctagactcaagcgatcttgtcaccacagcctatcaaggtgctgggtttacagatgtacaaatgtgagcctctgtgcctggccctgttttttttttttttttgagatgtctctcttgcttaggttggagtacaatggtgcaatcatggctcactacagccttgatctcctagtctcaagagatccttctctttcagcctcctaagtagctgggactacaattggtgccaccacacgcaactaatttgtttgtttgtggcagagatgaggtctcactgtgttacccaggctggtctcaaactcctagcttcaagcagttcttcctgggcctcccacagtgttgggattgcaggtgtgagccaatgcattcagccagcggtattatacttaattgccccacagtggaaacaatctgaattccatcaacagataattggataaacaaaagtggtatatctatacaatgggatattattgggtgaaaaaaggaattcggggccaggcatggtgactggagtgcagtggtacgtgtctcactgtcaccttgaactcctaaacccaagcaattctcctgactcagcctcttgagtagctggtaccacaggcacataccaccatgcctttaatcccagcagttaggaaggccaaggcaggaggattacttgagcccagtccaggagtttgaaacttgcctgggcaacatagggagtccccccacccccatctctacaaaaaatgaaaaaaattagctgagtatggatccagtggctcacacgtgtaatcccaacactttgggaggctgagcaggtaggtcacctgaggtcaggaattcaagacaagcctggccaaccccatttctactaaaaatacaaaaatttgccaggtgtggtggcacacgcctgtagtcccaactatttgggaggctgaggcaggagaatcacccgaacccgggagatggaggttgcagtgatccgagatcgtaccactgcactccagaatgggtgacagagcaagactccatctaaaaaaaaaaaaaaaaattagccgagcatggtagagcatgccgatagtcccagctacttgggaggctgaggcaggagaattgcttgagcccaggagttcgaagctgcagtcagctctgattgtgccagtgctgtagcctgggtgagagattgagactctatctcttaaaaaaaaaaaaaaaaacaccaggcatggtggctcacagctgtaatccgaacactttgggaggctgaggtgggcagatacctgaggtcaggacttcgagaccagcgtgcccaacatggtgaagctccgtttctagtaaaaatacaaaaattagtcagatgtcgtggctggtgcctgtaatcccagctccctgggaggctgaggcaggagaatcacttgaacccaagaggcagaggttgcagtgagccgagatggcaccactgcattctagcctgggcaacaaagcaagactatgtctcaaaaaaaaaaaaaaagtattgatagatattacaacagggtgggatttaaatgcattatgctaactgaaagcggccagagacaggccacacattttatgattccatctaagtgaaatgtccagcagaaacaaatccatagagacagaaaatagattaatgcttaacaggggctgggaggagggggaaagggaagcgactactaatgggtatgggatttctttttgggttaatggaatgttctgaaattagataatggtgatggttgtataactctgtgaatatatgaaaatcctttcaattatacactttaaaagggtaaattttatggtatgtgaattgtatatcaataaagctgttataaattttcctaaaatgttggtttcaaactgatgtcatttattttatttcttttttatgtcgtgtttcttaaagtttctcaaacaataataaatccaaattgtttagaggaaggatcctgttacttaagctaagatgagaagaaaaggagtgatgatgaggtttggaaacatcactcactcagtgacttttctttctccattgtccagcccatggatgacagtctcattgcatttcgaacgcgttctaagatgcccctgaaagatgttcccctgggccaattagaggcagagctccaagctccagacatcactccagatatgtatgaccccaatacggcagatgatgaggactggaagatgtggctggggggacttatgaatgatgatgtggggaatgaaggtaagttttggtttgtgatttattatgtatactgtccattatctgttgtaaaatttttagtatttggaagggtatagaatggaatggtttgggttaattgatttaatttgtatttaactgataatttatcttaaatcagtagttaatttttctttttttttttttcctgagacagggtctcactctgtcacccaggctgagtgcagtgttgcagtcacggttcattgcagccttgacctcctgggctcaagcaatcctaccccttatcccactgagtagctgggactacaggcacatgccactgtgcccgactaattttttattttttgtagaaacgagatgtcactatgttgcccaggctgttcccaaactcctggcctcaaacaatcctcctaccttggcctcctgaatgctagaattataggcatgagccaccgtgcctgggccaattcttaacatttctttttctgggtaaggaatcttttgaatcctaagattgttgaatgctaagatttgaatcccttgaaacatacatgcacatgtagttttgttgttgtcttttgtttttgagacactgtcccaaaacagggtgttgcccagggtggatcacagtggggtgatcatagctcactgtagccttaaactcctgggctcaagagatcgtcctcaggtctcagcctcccaagtagctgagattataggcacgcaccaccttgcctggctaattttttaaaaatttctgtagagaaatgttgctcaggctggtcttaaactcctgcctcaagtgatcctcccaccttggcctcccagagagctaggattacaggcatgagccactgtgcctggcccactcaaaattttatgtatgatttcattagggttcagtgatttaccaaaagaacactgtgttagttaagggtcttcatgatgcaagtgaaagaatcctaactctatcttgctggggtgaaatgaaaccagactttgggaagtgtagtaaatcagcagtggaactgaggcactgttaggatccccctttcctctctattttacttccttttgtcactcagctccattctcacatttatttttctacaaggttagagctctgttcataaacactccgtgattactttttgctttgtctacacttcaggactctcccctgcaagctccagttataaaatccaggggaacaagtcagatcgacttggtttgatctcatgcccagtctcttggtactacatgggattgatagggagactgttcagcatggagtctggtgattgatagcacctcatagaacagtgtggttgaagtatgtggtgaccctaaagaagtaatggtattatcagaaatggggaagaaatattgatcagataaaagtttggatggaaacagactaagtaggctgggcgtggtggctcacacctattatcccagctctttgggaggccgaggcgggcggatcacaaggtcaagagattgagaccatcctggccaacagggtgaaaccctgtctctactaaaaataaaaaaatttgctgggcgtggtggtgcacgcctgtagtcccagctactcaggaggctgaggcaggagaatcacttgaacctggcaggcgaaggttgtagcgagccgagattgcgccactgcgctccagcctggcaacagagcgagactccatctcaaaaaaaaaaaaaaaagaaaaagaaatagactgagtaaatggctgggtaggtaatgctaggagtaagtcaggataagtgaatgaaagaaaataacaggtccttgaatgtaccttatgatactattaatagttatatagtatatcatttggcaaatgtttgagtactttctttatacaaggcattgtgctagaatctgtgagggataaaggagcataatcatttggtcatggaataaaagctttatgaatgacagggtgcctggcccattgttaggttcacaatacattgtacttttttgtgtgtgtgtgagacagggtctcactctgtcacccaggctggagtgcagtggtgagatcttagctcactgcagccttgacctccttggcgcaagcaattctcccacctcagccttctaaatagctgggaatacaggtttgtgccatcatgcccggccaatttttgtattttttgtagagttggggttttgccatgttgcccaggctggtctcgaactcctgcgctcaagcgatcctcctgcctctgctttccaaagtgctgagattacaggagtgagccatcgcgctcagccagtatattgtaaatgaatgaagttgttgaataaactcagatatgccatcaaagtggcataaatgctgttgtaagattttagaagaggacagggtaacttttgtttaggatgatcagagacagctacatgaaagagctggtaattgaaatggaccttggaaagatttttgaaaacagtgacagggaagagagaaggcatctgagtagaagtgacatgatatactctatatgctggattctgtaggatatattctttccagagttttctcttttttcactgtaaaactgtaagagtaatatatgcttggtataaagaaatcaaatattacagaaataaaacaattaaagccttccccccccccaaggaaaatgtacatatctacatacatgaaatttttcatatgatttttttggggtttatgtatctcttagagtttatttattggcacttcattttcctaccagtcatttccaaagcctttgacaccaaggttcaagtttggttccccagagggactactgataatactttggtatgcatctgtgagagttttcaatgtgtagttactttttagttttccacattaatgtggggataaaaataattaaattttagtcctaaatttaaatttaagacttttctcaaacatttagaaaagatagtccaggcgtggtggctcatgcctgtaatcccagtactatgggaagccaaggcatgaggattgcttgaggccaggaagtcaagaccagcctgggaaacacagtgagacctcatttctattttttttttcttcgacagagtctcgctctgtcgcccagactggagtgcagtggtgtgatctcggctcactgcaacctctgcctactgggttcaagcgattctcctgtctcagcctccccagtagttgggattacatgcgcctgccaccttgcctggctaatctttgtatttttagtagagacagggtttcaccatattggtcagactggtctcaaactcctgacctcaggtgatccaccctccttggcctcccaaaatgctgggattacaggcatgagccaccgcacctggcatttctatttttaaaataaaataaaattttaaaaaagagagagaaaataacaagaagcaaattgttttaaatcttatcatatttcttttttttacccaccctctgtagtagaggggctaacaagccacaaaatgaaaaaaattgtgtaaggagaaaaagatggagtttgaagctgagtcattaacatgcaaagtatagaatcagttccttcataattagcaactgatatattatcccattagtcattctgataggagtctaagcttctgagttttccattactcacccctttgacaatctgatgaaaactatgcagccttcccccagaaaaaaatgtacatatccaaatacatgaaatttttatatgatttttgggagatacatatcttttaaagtttattgacacttcctgtttctaccaggttcagaaatctccacaaaaaggaatagacaggacagagagttctttttttttttttttttttttttgagcagcagcaagatttattgtgaagagttaaagaacaaagtttccacaacgtggtaggggacccgagtgggttgcccaaggacagatagttctaaccactttgtaggcagtgaaatctcagagaaattcattgtcttgctcaaagttacagaatcaatttgttatactcctaggagtagaacccagtttaatattctaggaacatgtctcaatcagacaggtttcacggtaagttaaacctttttttttttttttttttttctgagacagagtctggctctgttgcccaagctagagtgcagtggcacaatccctgctcactgcaacctccacccgggttcaagcgactcttctgcctcagcctccagagtagctgggactacaggtacgcgctaccatgcccagctaatttttgtgtttttagtagagatggggtttcaccatattggccaggcttgtctcgaactcctgaccttctgttccactcgcctcagcctcccaaagtgctgggattacaggcttgagccaccgcacctggcctaaaccatttttttttgagagagtttcactcttgtcccccaggctggagtgcagtggcgcgatctcggctcaccgcaacctccgcctctcaggttcaagcgattctcctgtctcagcctcccaagtagctgggtttacaggcatgtgccaccatgcctggctaattttgtatttttagtagagtcagggtttcaccatgttggtcaggctgttcttaaactcctgatctcaagtggtccacccaccttggcctcccaaagtgctgggattacaggtgtgagccaccacgcccggcctaaaccattttttaaaagtatatgacttttcataatgagctgtgttttttgttttgttttgttttgttttgtttttgagatggagttttgctcttgttgcccaggctggagtgcaatggcacgatctcagctcaccgcaacctctgcctcccaggttcaagcgattttcctgcctcagcctcccaagtaactggattacaggcatgtgccaccacgcctggctaattttgtatttttagtagagatggggtttctccatgttggtcacgctggtctcgaacttccaacctcaggtgatccgccctcctcggcctcccaaagttctgggactacaggcatgagccactgctcctagccttcataataagctgtgctttttatctttggcacaggctaatacaaaataattacagtaagaaagtcaggttctcctagcgttattggtagcagcagctttggtgctcattttcatcactttggttcaaaggcctaagatggtagctattgggaaggaaaggccaggcagaactgactttcaggattttgtttctcataatttggttccgagaacttgaatcagaattgaagagtgtatggatatgtagggtgatgtttattaaagatacagatttcagggcttcaccccttacctactgaatcagaatctaatgagtatggtctagggatctaattctgatatatctaaaggattggaaactactggtctgggaaaggtaagagtgcatgataaaggttgattggggaattggactaatggttagggggagggtgaaaatcctcttttcttaaaataaaacttcagtttgttttgttttgttttgagacagggtctcactcttgtcacccaggctggagtacaatggtgtgatcttggctcactgccacctccacctctcaggttcaagcacttcttctgcctccacctccctagtagctaggattacaggcacatgccaccatacccagctaattttgtatttttagtagagacggggtttcaccatattggtcaggctggtcttgaactcctaacctcaggtgatccgcccgccttggcctcctaaagtgctgggattacaggcgtgagccaccacgcccagcaacttcagtatttttgtatgtgcctattcggacagatttttaaaagagcacacaaagccaatgattaggatgggtgtggcctccagatctaccagttgagttaaaagacaatacaggaggggtatatcagctgggtaaatactgacattgttaataagtcaaaaaagtgattaagctcagaggacatattccacaatcagggtactaaaagctaagcagaactcagaagaatccccctaaatgatttttcagcatctttgttaaatgagtgctctgagaataatattcgctgacccatttgtgtggtgtgggcagaactatctattgcagttcttgcatccaaacagatggagtccaaacctgtgcacactactcattattatgggctcttccagaactttcgttattcagcaatgtttgttaagaactttttgatcaggcgcagtgtctctcacacttctaatccctgcgctttgggaggctgaggcaggcagatcatgaggtcgggagatcgagaccatcctggctaacacagtgaaaccccgtctctactaaaaaaaaaaaaaaaaaaaaaaaattagcctgacgtggtggcgggtgcctgtagtcccagctacttgggaggctgaggcaggagaatggcgtgaacccgggaggcagagcttgcagcgagccgagatcgcccctctgtgctccagcctgggcgacagagtgagactccatctcaaaaaaaaaaaaaaaaaaagaacttgctgtgaagagacttatatagaaagtactatagagattatgaattatgaagacagtattctattcctaaagaaataaagaatctgtactgataagttaaacccacaaatagatgaaaaagatttgataattagttatgtgtaaagaatgcaaattaatatattataagctgagtataaatgttgagtaaagaattatcaagttagattagggtttaatcagcacagatttttcagtgattgtgaattttaaatgtgtgtctgtataagtatatatatatttatatatatttatatttatataaaaaatatatatttgtttttgagacagggtctcactctgtcaccctcgctggagtgcagtggcgtgatcatgactcactgcagcctcaaactcctgggctcaagcagtccttccagctcagccttctgagtagctgggactataggcacacaccacgacacttggctaatttttaaaaagtcatttgtagagattggttcccactgtgttgcccaggatatatatatgtgtttttttttttttttcttgttagatggagtctcactctcgcccaggctggagtgcagtggcatgatcccagctcactgcaacctctgtctcctgggttcaagtgattctcctgcctcagcctcccaagtagctggaattacaggcacgcaccattactcttggctaatttttgtatttttggtagagacgggagggggggggtctcaccatgttggccaggctggtctcgaacccctgacctcaagtgatcttcccacctcggcctcccaaagttctgggattacaggcgtgagccaccatgcttggccccaggctgtatatgtctgtttataacaaaagatgtttatttatggccaggcacggtatccagtctgggcaacaagagcgaaactccctctcgaaaaaaaaaaaagatgctcatttattatgaaaagttaaaacattatggaagaggcgccagactctgtggctcacgcctgtaatcccagcactttttaggggccgaggcaggtggatcacctgaggtcaggagtttgagaccagcctgaccaacatggtgaaacgccgtctctactaaaaatataaaaattagctgggcatggtggtgcacatctgtagtcccagctactcgggatgctgaggcaggagaatcgcttgaacccagcaggtggaggttgcagtgagctgagatcgagccactgcactccagcctgggcgacagagcgagactccaccttaaaaaaagaaagaaaaaaaaaatattgtgggagggtacacagagaaatctttgttaatagttttatgtgtttctttctagatactctgtgggtgttcagtcaagcatgtatttatctcaaacaagaatttttttccacaaaaagaatcatactatacatattggtcttcatctgcaacttgcttctttcacttagcagtataacatatatttttccattataatacatagagatcacctcttctatttaatggatacatgatagtaagaaatttaggtattctctttttggtctttttttttttaaatcagttcctcagtcacactagctgcatttctcaagtcacatgtggctaatggctactgtatgatacaatacaatacatgtatagatcatttccatcatcacagaaagttctgttagacaacactgatctaaaattatctggagaaaaatattaccttaatatataataattccataatttaatgactccttcataatttttacttagtaattgaaaagacagtttagcattaacattaaagaaaattaggctgggccctgtggttcactcctgtaatcctagcactttcggaggccaatgcaggcggatcacctgaggtcaggagttcgagaccagcttggccaacatggtgaaaccttgtctctactaaaaatagaaaaattagccgggcgtggtggtgggcatctgtaatctcagttacttggtaggctgaggcaggagaattgcttgaagctgggaggcagagtttgcagtgagccaagatcatgccactgcactccaacctgggtgacaaagtgagactccatgtcaaaaaaaaaaaagaaaaaagaaaattaaaagggagaagaacatccatatttctattattctaacctaacaaatgtttattatttttgtatatttttagttatttatgattcttattgtaaggatataatttttcatgcttatgattattatgtatatattgtacttttgtcatacatgtattgaacttttatagaatggttacatattcacattttatatgtgtacgtgttgagtatccccttcatccaaaatgctcaggaccggaagtattttggatttcagattttttcagatattagaatatatgtattattatacttaacagataagcatactaaatttgaaaatttgaaatctgggcagggtgcaatggctcacactgtaatctcagcactttgggaggccgaggcattcagatcgcttgagcccaggagttcaagaccagtctgggcaacataccaaaaccctgtctctactaaaaatacaaaaattagttgggcatggtggcatgtgcctaatcccagctacttgggaggctgaggtgtgacaatcgcctgatcctgggcagtcaaggctgcagtgagccatgatcgtgccactgcacttcagcctgggtgacagagtgagaccctgtctcaaaaaaaaggaaaaagaaaatttgaaatctgaaatgctccaatggctattccctttgagagtcatgtttgcactcacagagtttcagattttggagttttggatttggaatgctcaacctgtactattttatactaagaaattataattatatagtcattctctaattgttgggaatttgggccactccttttttcactgtcagcttcactgtacaagtagcttttacagaaagtattattttcatggaatatactacacaaaattagctgggtgtggtggcgtatgcctgtggtcccagctactcaggaggctaaggtgggaggatcacttgagcccgggaggtggaggttgcagtgagctgaggctgtaccactgcactccagcctgggcgacagagtgagaccctgtctcaaaaaaataaagaataaatgtgctttattggaacagattcttagaagtttgagaacagagttaatgagcatctgaaacacttttttttcctagatgaagcagatgatgatgatgatccagaatataatttcctggaagacctcgatgaaccagacacagaggatttccggactgaccgggcagtgagaatcaccagtgagtctgtgtttattctaagtcctgctcttgactgctttgcagctgtctttgtttactttgtagatttttaggggtgaagtttgcagctcatccatgttaagacatttaggtttcctttacccatttattgatctgattctttaaatttaggtacatattcagaaagcccatcagttattcatttgtatatcccacagtcgtgtattcagtccttactgtttggcagggattgtgcaagatgaataagacatggcatctgtgctgtaggagttcagcctagtagggtgatagaaacagaaaaagttacaatacaaagtgataaatgctgtaacaggttttacataaggtataataatgacctaaaagagagtgtcatctcctagtgtatgatatggactaggataggagaacttaggaaagaatttgcagaatgaaatggctttttatcttagttttgaaggaggaataagaaatttggtgaatagggacagagaggaatattgcaaatagaagagcatctgcaaaccacagaattgtaaaacatcaaaaaagtatgtttggaaaatactaagtactttggtggtggtgtatgagtgaaaagacagagaagtggtagataagattaggtagtgtttacatcatggaggatttttaagctctcaaaatgaggtttaagggcgggcatggtggctcacgcctgtaatcccagcactttgggaggtggaggcaggcagatcacctgaggttaggagttcaagaccagcctggccaacatggcgaaaccctgtctctactaaaaatacaaaaattagccaggcgtggtagtaggcacctgtaatcccagctactccggaggctgaggcagaaaaattgcttgaactcaggcgggagaggttgcagtgagccgagatcacgccaatgcactccagcctgggcgacagagcaaggctccgcctgaaaaaaaaaagaggtttaagcagtaaatcagtaggaactgatttggattttagaaagatcactttgatttaataccagtttaatgtattaatttgttaggtaaagtgaacaagactggaggtatggaaaacaattatgataacttagcttgagttatttctataaaaaattatatcattgagctaggagtggtggcttacacctgtaatcccagcactttgggaggctggggcaggaagattgcttgagcttaggagttcgagaccggcataggcaacatagagaaactttgtctgtactaaaaatttaagaaattagcctaatgtattggcacgtacctgtagtcctagctactcaggaggctgaggcaggaggattgcttcagcccaggaggtcaaggattcagcaaactatgatagtgccactgcactccagccttggtggcagagggagatcctgactcaaaaaaaaattatatcattggctagtgtgtcaagcatagaaaacatacatttcatcctgaagaaattctacctatggggagaaagaaaaataaaaaatatatttcataagccattgatttttattgcatgtatgcatgaccctgtactggaataatatacacgacatggagaaggtaagatgctggctcttgaccaggttatgcagagagctttataaacatccaagatatacctaattaatgcagttctttgtgtaaagagaattatgtaaatacaatcctttagaacttacattttattttattgctttattgtgcctttcaccttgcttttaagattagaataccatttcctttgtgaagatctttcatttattttgatatactatgacagggatagtggaagcattgaaaggaaagcaccaggaattagagaaaatgtagaatgaaaaggtttgaggatttaggctttgagaaaactgaaaggagaatctaggaaggtacaagaaaaacctagaaaatctagtgtcgtagaaaccaaaggaagagtcttttggctggggcacagtggctcatggctataatcccggcacttgggaggctgaggcagaggcagaaggatcgcatgagcccaggagttcaagaccagcctgggcaagatagtgagacattgtctctacaaaaacattttaaaaataaaatgaaaattagttgtcgtggtgcatgcccgtagtcccagctacttgggaagctgaggtgggaggatcacttgagcccaggaggtggaggctgtagcgagcagagatcccaacactgtactccagcctgggtcagagcaagaccctgtttcaaaaaaagagtctttcaagaaggacagaatggtcaacagtaaagaaacaagtaaagaaacatctgcttaaagcacaaaagcagatcttaagttcagctatcatcctggaatatatttgccttccctttttgattgttactttcttcagtttacgtataatttctcagggagatcctccttcgttaggattgatcttcttgctttgcattcccgtaccactctttttgtccttttatatactgatcacctcataattgcttatttaatatctgtcttctcccctagactgtgaacttctcaagagctttgttttgtttattgctgtaaagctggtggcaatatttgccagtcgaatagagatgggtaaatgaagggcagtctttctagtcatacagttctgtaatgatagtgaaagctggagtagaatttttaatttttttttctgcctcttgtcctcttgtgtctcattgtcatatttgattataatctctttaaaaggacttatccttatatggataactaaaataaaaaaattaaaaagcatagaatcacagagtttgaaaagctccatgtggtcacatgttttttgcccgcttgagaatttgtttacacctcctctgaggtggcctttttagtcctgtttgtataccttcagtgacagggagctcaacaattctgcagatagtgtattgtaaacttgaacacctcctcaattaatactttccttattgaacccaaatctgaatgcaaattcagatactttccttattgaacccaaatttgaatgcaaagcaggaagatcaatccttttatattcctcctatttgtctttatgttatgttatgttatgtgatgttatgttatgttatgttatgttatgttatgttatgttatgttatgttatttttgagatggagtttcgctgttgtcgcccaggctggagtgcaatggtgcaatctcagctcactgcaaactctgcctcctgggttcaagcgattctcctgcctcagcctccagaatagctgggattacaggtgcccgccaccacgcccagctaatttttgtatttttagtagagacggggtttcaccaggttggccaggctggtcttgaactcttgacctcaggtgatccacctgcctcggcttcccaaagtgttgggattacagtcatgagccgcactgtgcccggcctcctatttgtcttttgttgttaagaaaaaaaaaagcaatttattcccaagtgtacatattaaaagatgtttcttaagtttttttttttttttccctatgcaaaacataggaaagtttcaagtttcttctgccaggtttcttcttctccaaagccttggtgtccagacctctcaccatgcacattactcttctctggattctagcatttattttctttaaacttttcccctgttacatcttattatgaaatttaaaaatatatatagaaaaattgaaaaattatacagctaacattcatatactcaccacctacttttttttgagacgaagtctcactcttgttccccaggctagagtgcaatggtgtgatctcggctcactgcagcctccgcctcccaggttcaagcggttctcctgcctcagcctcctgagtagctgggattacaggcgcctgccaccatgcccggctactttttgtatttttagtagagaagaggtttcaccatgttggccaggctcatctcgaactcctgacctcaggtgatctgcccgcctcagcctcccaaagtgctgggattacaagcgcgagccactgcgcccagcctcaccacctactttctatagtttgttggtttttttttgagaaggagtctcgctctgtctccaggctggagtgccgtggcgccatctcagctcactgcaacctccgactccctggttcaagtgaatctcctgcctcagcctcccgagtagctgggattatagtcacgcgccaccatgcccagctaatttttgtatttttagtagagacagggtttcaccatgttggccaggatggtctcgatctcctgaccttgtgatccgcccacctcggcctcccaaagtgctgggattacaggcgtgagccactgtgcccggccaaactttcagtagtgttaatataaactgtgcgcctttcatatgtgcgggtttcacagctgcagattcaaccaaccttgaaaatattctgagaaaaaaaaatgcaacagcaaaaaataatactaactgggcgtagtggctaacatctgtaatcccagcactttgggaggctgaggcaggaggatcgcttgagcacaggagtttgagatcggctgggcgacatactgagattccatctctacaaaaaactttaaaattatctgggtgcagccgggcatggtggctcacgcctgtaatcccagcactttgggaggccagggtgggcagatcacgaggtcaggagttcgagaccagcctggccaatatggtgaaaccccatctctactataaatacaaaaattagccgggtgtggtggctcacgcctgtagtcccagctactaaggaggctgaggcaggagaatcgcttgaacctgggaggcggaggctgcagtgagccgagatcgcgccactgcactctagccagggcaacagagtgagacgctgtctcaaaaaaaaaaaattatctgggtgcattggtgtgtgcttgtagtcccagctactctggagacagagtcaggaggatcccttgagcccagaagttcaaggttgcagtgagctgtgatcataccactaccactgcactccagcctgggtgacagagtgagagcttgtctcaaataaataaataaaaaataataaggtataacaagcatttacattgtattaggtgataagtaatctagagataaggtatacaggaggatgtgtgtagattatatgcaaatactacatcatttttatataagggacttgagcatcctcagattttggtatccatggatacgaaatggttccaggagattggctcctggaaccaacctccacagatactgagggatgactttatttgccttatcatgcagctgtccatctccctgtccgtctgtggatgcatcttagttttcaaatgcatttcagagtaaattatacttcacttttttttctttttttttttaaattcagacaaggtctatgttgcatgggttggtcttgaactcttgcggtcaagcgatcttcccacctcagcctcctgaccagctgagattacaagtgtgcacaatggcacctggctatatgtcactttttttttgtatttttagtagagacggggtttcaccatcttggccaggctggtctcgaattcctgacctcgtgatcctcccacctctgcctcccaaagtggtgggtttacaggcatgagcctatacttcacttttaaccacttcagcacgcatataatgaactagagctccatatttgtttatgatttctttttataggtaattttacacacagtgtatcacacacatctcaagtgtaccatttaatgaattttgacatgtgtgtacctatgtgacacaaatccctgtcaggatatagaatcctcaccccaggaagtttcctcatgccccttccaagtcaatccccacaccatcccttcagaggcaaccactgttctgatttttttttttttttttttccgagacggagtctcgctctgtcacccaggctggagtgcagtggtgcggctcactgcaagctccgcctaccaggttcacgccattctcctgcctcagactcccgagtagctgggactacaggtgcctgctaccatgcccggctaattttttgtatttttagtagagacggggtttcaccgtgttagccagggcgatctcgatctcctgaccttgtgatccacctgccctggactcccaaagtgctgggattacaggcgtgagccactgcgcccggctttttttttcttaatcacaggttatgtttgccagttttagaacctcacataaatggaatcatataggatgtgctttgtgtgtaaggcttctttcactcagcataatatttttgagattcatttgtgttgcatgggtcgttagtttgttcccttatattgttgagtagaatttcgttgtgtatatatactacagattatctatttttgtgttgatcacctgggctatttttaattttgggtaacgaataaagctgcgctgaacttttttgtgcaagtctttgtggaaatgcttcatttctctctctctttcatttgttcccacctatgagttagaaaagccgtatttcatttatcttgggtcagctgtataggagacaaatcactgggtcacagggtatgtttagttttataagaaattgccagaccattttccaaagtggctttccattttacattcttatcagagttctggttgctctacatcctcagtaacatttggattttaattttttttgttggctgggcatggtggcgcacacctgtaatcccagcactttgggatactgaggcaggcagatcacttgaggtcaggagttcaagaccagcctgggcaacatggtgaaacaccgtcgctactaaaactacaaaaaattagccaggcgtggtggcgcatgcctgtagtcccagctacttatgaggctgaggcatgagaattgcttgaagccggaaggtggaggttgcagtgagctgagaccgcgccaccgcgctccagcctgggcaacagagtgagactcagtctcaaaaaaataaaataaaaaataattaaattacttaaatgattttgtttttgtttttgttttgtgtttgagacagagtctcactctgtctctcaggctggagtgcagtggtactatctctggtcagcgtagcctctgcctcccgggtttaagagattcttgtgcctcagcctcccaagtagctgggattacaggcatgtgctaccatgactggctaatttatttatttatttatttttgagatggagtcctcgccctgttgcccaggctggagtgcattggtgctgtattggctcagtgcaacctccacctcctgggttcaagtgattctcctgcttcagcctcccgagtagctgggattccaggtgcatgccaccatgcctggctaatttttgtatttttagtagagacggggtttcaccatgttggtcagactggtctcgaactcctgaccgcagatgatctgcctgcctcggcctcctaaagtgctggaattacaggcgtaagccactgcccgtggcctggatcttaatttttttaatgtcctcttaagaagggcctttatagaattgttcacagtcctccagacatagtgttagactctgctctagttcagtgatatgtttgccttgttggttatgagccccgttttggagcaactgtgtcttattgaacttgatatcaaccaaaacttttttttttcctcagattcttgtaacaaccaaaactttcaggtcttgttcacattatttttaagccacgtcaccttttcatgcagttaataaactgatctttaaaactcttgctgggcgcggtagctcacgcctgtaatcccagcattttgggaggctgaggcgggtggatcacgaggtcaggagatcgagaccatggtgaaaccccgtctctactaaaaaatacaaaaaattagccaggcacggtggcaggcgcctgtagtcccagctactcaggaggctgaggcaggagaatggcgtgaacctgggagatggagcttgcagtgagctgagatcgcgccactgcactccagcctgggcgacagagcaagactccgtctcaaaaaaaaaaacgaaaaaactcttaactgtaggactgggcaccgtggctcacacctgtaatcccaacacttagggaggccaaggtgggaggatcgctggagcccaggagtttgagaccagcctgggcaacatagcaacatgctgcctctattaaaaaaaaaaattcttaaacatagaactttaaatttatccgtatatgttgcatccagttgatttgagaaaatataattttgaattttccgtctgttggattggcagtccctttcagctttacatcatctacagatgtgttaggtatgttctctgggtcttctaagtcaccgatggagttcttgaatagttcagatccaaagacagcgtcctgtgaaaccctgctggaaacttgtctttctctctctcttttttttttaagacaatatcttgctctgtcgcccaggctggaatgcagtggcatgatcttggcacactgcagcctctgcctcctggactcaagagatttctctcacctcagcctcttgagtagctgggactgcaggtgtgcgtcaccaagcccagctaaatttttttgtagagatatggtttcaacattttgcccaggctaggagactcatctcttgattccattcagtactgtgtggatttggataggtcatctaattataaaatcatctagctcacattttctcctgtcttcttccttttagaatttaagcttcatgagaatagaactctctctctctatctctctttcattctctcatatatcccaagcatctaaaacatggattgaagcatagtgctcaataaatgtgttttgttgttgttgttgttgttgttgttttttgagacagagtctcgctctgttgcccaggctggagtgcagtggcgcagtcttggctcactgcaagccctgcctcccgggttcacgccattctcctgcctcagcctcccgagtagctgggactacaggcgcccaccaccacggctggctaattttttatatttttaatagagacggggtttcaccatgttagctaggatggtctcaatctcctgactttgtgatccatctgtcttggcctcccaaagtgctgagattacaggcatgagccaccgctcccggcctcaataaatgtttttgaataaatgaatgaaggatagccagtcatggtggctcacacctgtaatcccaccattttgggaggccgagttgggctgatcacttgagctcaggagttcgagaccagcctggtgaaccctcatctctacaaaatatacaaaaattagccaggcatggtggcatgcgtctgtggtcccagctacttggggagctgaggtgggaggagcgattggaccagggaggggatgcggaggttgcagtgagctgagatcgtgccactgcgctccagcctgagtgacatagtgagacccatctcaaaaaaagaaggatagatatgaagaatttgtcatgccttgttgaaaacattatacattgtcttcatggaattcctccttattgtaaaatctaatttataccaacaatatactgtctggctttcttgcagaaaaggaagtaaatgagctgatggaagagctgtttgaaactgtgagtaatgatcctcgagtgagaacacgggattttaagtcagttctccagcaagatgtgtcatttggtctctgtgatgctccctctaggagagggggtctgactgaaccaattctccttttagtctacctgggaaagaatataatgacaagggaattttgctaactactagactcttgattatatacatgtatgttgttcttattaacattttccttgaaacttctttttgtttgagggggttcttgctccatcacccaagccagagtgcagtggtgaaattacagctcacagcagccttgaccttctaggctcaagcagtccttcgtctaagcctcctgagtagctgggacataccaacacacccagctaattattttatttgtagagacagggtcttaccacattgctcaggttgttctggaacttctgggctcaagcaattttcctgccttgggcctcccagtgctggaattataggtgtgagccagcatgcctggcccctggaaaacttttgatgacttcccctactgtcatttggtgtgtccttaaagattgtcaactagttttaaactactttgtgtacaaataattacctttttcataaatttgtttcaaaagatttttcattttaagagattgatcattttgaggctgggtgcagtggctcacgcttgtaatcccagcactttgggaggccacggcaggtggatcatctgaggtcaggagtttgagaccagcctggccaacatgatgaaaccctgtctctattaaaaatacaaaaattaggcatggtggcgggcacctgtagtcacggttactgcagaggctgaggcaggaaaattgcttgaacctgggaggcggaggttgcagtaagcccagattgtgccactgcactccagcctgggcaatagagcaagactgcaagactctgtctcaaaaaaaaaaaaaaaaaaaaaaaaaaaaaaaaaaaaaggagagagagattgataattttgagttatccacgctctgtccttactgttacaagttgactggttgaatgacttctttcttggcataatagccatcccaagtgtgggtttgtgggaatcctgaagtgagaaagttctgacattggctctttctgggtgccagcattattatagtcttgtaatctatagttttcactcttccttcccaatactggagcaacattcagaggcccattccccaggaaaaccctccctttcctttgcccacagttccaagatgagatgggattctccaacatggaagatgatggcccagaagaggaggagtgtgtagctgagcctcgtcctaactttaacacccctcaagctctacggtaggctagttgaagaccttgagatttggaatagaggaaaagtttatttctgaaaaggttttcagaagttgcaattgataatttttcatcccaaaccagcttctgttactgatgtaaggatgcagagccctgtcaggagttaggtgtcaagtgaagtctccttgttatggggcagtgcagctgtaggccaagctatatccgtttgggaagggagaaaaaacagtagctggcatccatatccacttctccgggtgagtggtgctggagaggtatgtaggactcaatgtggccagccacacaaactaccccatattgtaatatcctgtctgtcccttttgttctttttatgtgccattaatatctgctaaatgtgactgaaaatttgttagtcacctaggcattagtggagcaaaccctgaagcacctgcagtaaggagtctgaaacatacgtgctgacctttttgcctaaagttggcacttgtgttacagcatccagaaagtagaggctttaattttttcctcattttgtggtggatttgcatctgcactttattgtattgttatccattgcgagtagcagcatgtagtcattagatggatggctagatgtcaggatgcagtttgtgccataagtggaacaaagcaaagagaatagtccctgtaattcgtcctgggtttgaacctaacagcattactaagcagagagcttgggatccatctgaaagctagacctttagagatttttcaatttagtgaaaaaagataagatatgccaaccaatgtctaaaaactagaaataccagtaattctccattacaacaaatatcacaatacaactacatcaaaaacctcaagattgctaagtcagtatttgacccattattttaagttacagctcatacaacaaaattctgttatagcagaatggaaccattcatcctgggaacatataatgggatttgatctataaacgtgttttggttctgctgattgactctttgtaacttcttaaaatttgggaagtgtaggctgggcgcagtggctcatgcctgtaatccctgcactttgggaggcggaggcagggggatcacctcaggttaggagtcgagaccagcctggccaacatggtgaaaccccatctctactaaaaatacaaaaattagccaggcatggtggcgggtgtgtgtaatcccagctactcaggaggctgaggcaggatactcacttgaacccggaaagcggaggttgcagtgagctgagatgacagcctgcttgacagagagagactctgtctcaaaaaaataaaataaaataaaataaataaaatttgtaaagtatagaaataatttaaaactcttgttagaattcagttaccttctggtattcagtagaatacagtcatatatcatctcatggtgatacattctgtgaaatgttatcattaaacgatttcatcattgtgtagaaagcacttggataaacctagatggtttagcctactgcatacctaggctatacggtataacatattgctcccaggccacaaacctgtatagcatgttattctgctgaatattgtaggcagttgtaacacaatggtaagtacatatgtatgtaaacatagaaaaggtacagtaatcttatggagccatctctgaatatgtggttcattattgactgaaacattatgtggcacatgactgtacttgggcagctgctgcttctctttcagttgcaaatgcaaacctgttataatctttgactaaataaagcatcctggattctgtaagtccatagatagtaaaaacttcttaaaacacaataaagaagagagaggaaaaaaaagaacaaaacaaaaaccctgggaaagtgagttatctgtgcttcccttgtcagttatccaagtaatacttattaaaactaggtgcaaggccacgtgtggtgactcacacctgtaatctcagcactttgggaggctaaggcaggcagatcactttaggtcaggagttcagaccagcctggtcaacatggtgaaaccccatctctactaaaaatacaaaaattagctgggtgtggtggcacacgcctgtaatcccagctacttgggaggctgaggcaggagaaacacttgaaccctggaggcggaggttgcactgagctgagattgtgccactgtactccagcctgggcaacagagtgaaactgtctctcaaaaaataataataggccgggtgcggtggctcacgccagtaatcccagcattttgggaggccaaggcaggcggatcacaaggtcaggagtttgagaccagcctgaccaacatggtgaaaccccgtctctactaaaaataaaaaaattagccaggcatggtagcactcgcctgtaatcccagctactcaggaggctgaggcaggagaatcgcttgaacccaggacgcagaagttgcaatgagccaagatcatgccactgcactccatcctgagagagagaaaaagactccatctcaaaaaataataataataataataataataattatagatcaggcgtggtggctggcacctgtaatcccagcactttgggatgccgaagcaggcatatcacctgaggtcaggagttcgagaccagcttggccaacatggcgaaaccttgtctctactaaaaatgcaaaaaaaattagtcggacgtgttggcaggtgcctgtaatccccgctacttgggaggctgaggaaggagaattgcttgaacctgggaggcagaggttgcagtgagccgagaccactccattgcactccagcctgggcaataggaacgaaactccatctcaaaaaaaaataatagtaataataataataataataaaaaatacaactacgtgcaggctatgttttcattacctacttttttatgcttctggtcttctgttccttcagtggtagtagtgcaggtgatcaggttttcagttctcagaagattgcataagacagtcccacaggctttaggtttttaccctgtgctgcccaaacccacagtaaatactataaaagaaagaatgatttttatccccaatagataaatgataacttttaaaaattaactattgaaaacacttatttatctattgctgtaatattggagattacttgaaatatgataacctgcttgttgtaactacatcagcaggtcttatcctgattgcatagggtatcagcacgtgcttaatcacttaagtatctttttctccttttacttcagaactgtcatgctgggtttttcagtttttgcttcagccctggaaacagtctctcaggagggtaggggtgggaagttagggttaggaaccttagaagaggaatttattttatttatttatttattttattttatttttttgaaatggagtcttgctctatcgcccaggctggagtgcagtggcgcgatctcggctcactgcaacctctgcctcccgggttcaagtgattctcctgcctcagcctcccaagtagctgggattacaggcacgcatcaccacggccagctaattttcgtattttttcatagagacagggtttcgccatgttagccaggctagtctcgaaccactgacctaaagtgatccacctgccttggcctcccaaattgctggcattactggcttgagccaccacgcccgactgtttcttgaccttttaataattgtcattctgactggcaaggcttgctttcttaacaagtcaaaaatcttctagcatgaagcaggaaaaggatatactaaaataactaaagtaatgatagtttacctgaacagaactgagtggttggttcaaatattaccctactgctctccatgaaggtattttattttagccctttaaattcctcttcctggctgggtgcagtggctcacgcctgtaatcccagcaatttgggaggccaaggcaggtggatcactttaggtcagtggttcgagactagcctggctaacgtggcgaaaccctgtctctacaaaaaaatacaaaaattagctggccgtggtgatgcgtgcctgtaataccagctactctggaggctgaggcaggagaatcacttgaacccaggagacagaggttgcagtgagccgagatcatgccactgcagtccagcctgggcgacagagcaagactccatttcaataaataaataaataaataaataaattcctcttctaaggttcccaaccctaacttcccacccctaccctcctgggagactttttccagggctgaagcaaaaattcaaaaacccagcatgtcagttctgaagtaaaaggagaataagatagctaagtgattaagcatgtgctgataccctatgcagtcagggtaagatctgttggccaggcctggtggcttacgcctgattccagcactttgggaggccgaggcaggtggatcatgaggtcaagagatcgagaccatcctggccaacatgatgaaaccccgtctctactaaaaatacaaaaattagctgggtgtgatggcgtgtgtctgtagtcccagctactcaggaggctgaggcaggagaatcacttgaacctgggaggcggaggttgcagtgagccgagatcatgccactgcattccagcttggcgtcagagcgagactccgtctcaaaagaaaaaaaaatctgtttatgtagctacaacaagcaggttatctttctttcttttttctttttttttttttttttttttgagacagagtcttgctctgtcgcccaggctggagtgcagtggcgggatctcggctcactgcaagctccaccttctgggttcacgccattctcctgcctcagcctcctgagtagctgggactacaggcccccacgactgcgcccagctaattttttgtattttcagtagagacggggtttcaccatggtcttgatctcctgacctcgtgatccgcccacctctgcctcccaaagtgctgggattacaggcgtgagccaccgcgtccggccaacaagcaggttatcatatttcaaggaatccccgatattacagcagtagataaataagaaaatgtagtatcccaccagggaatactatacagccataaaaaggtatgatatcatgtccgtttcagggacatggatggaggtgaagccatcagcaagctaacgtaagaacagaaaaacaacactgcatgttctcacttataagtaggagctgaacaatgagaacacatgggcacagggtggggaacaacacacactggggcctgttgggggagcgggggaagggagaggatcaggataaactgctaatgcagctgcacttaataccaaggtgatgggttgataggtgcagcaaaccaccaaggtgcacgtttacctgtgtaacaaacctccatgtcctgcacatgtattctgaaacttaaaattaaaattttgagggctaggcatggtggcttacgcctgtaatcccagcactttgggaagccgagatgggtggatcatgaggtcaggagatggagaccgtcctggctaacacagtgaaatcccatctctactaaaaatacaaaaaattagctgggcgtggtggcacgtgcctatagtcccagctacttgggagggtgaggcaggagaattgcttgaaccctggaggcggaggttgcagtgagctgagatcgtgccactgcactccagcctgggcgacagagcgagactgtgtctcaaaaaatatttaaattttgaaaaaaaaatgcaaggcagtgcagcctgagtggatagggaaatgggacaagctgaacctgggatgggagtaacaagtaaatgagagaagaaatgagaatgatgagttcccaccagctccttggctgctttcttatccagatatttctctgttcctagcattttaattttttctttatttgtatattatttagaagaggaattttagaggaatgggatagagtgtaatatagaatcatcatatttgatgcatgctaactactttggcaaaagatttgtaaaaggctgagagtttgactgttggctaaagtgagatgggggattagtagggaatgaaaattgttcaggctctttgctcatcattggaacgaattggatgtgttgtggacctacggaaacactcaaattcagtcatctccctgttgggaataggtttgaggaaccactggccaacctgttaaatgaacaacatcggacagtgaaggagctatttgaacagctgaagatgaagaaatcttcagccaaacagctgcaggaagtagagaaggttaaaccccagagtgagaaagttcatcagactctgattctggacccagcacagaggaagagactccagcagcagatgcagcaggtaggacttttcttggtcatgttaacattggatttttttttttgagacagagtctggctctgtctcccagcctggagtgcagtggcccgatatcggctcacttcaacctctgctttctgggctcaagcatttctcctgcctcagcctcccaagtagctgggattacaggcatccaccaccacacccagctaatttttgtatttttagtagagacagggtttcaccatattggccaggctggtctcgaactcctgaccttgtgatccgcccgcctcggcctcctaaagtgctgggattacaggcgtgagccactgcgccctgctgttaatactggattataccaaggcctaactctgaggccagaaattaacagctttgtaaaagtcagagatagttaccttaccacctcctaaaaccatagtatcttcacatcattaggagctcgagaagtcatcatgttcatgccttatggctcaaggaagagagcacacaaggacactaatggtattcagaaatatagatttcaaagagtccttagtaatctattctgaaatttaacaaccttcactgtgagaagtaggtttgtttttcctttttctaacctcagtccctctggattgaggttaagcttcctctggttctgtcattttgttcaagggaacatgtctgagagatttatgccaagatcctatgttattttcatactcctttcagaaagcaaaatatatgtgataaagttgcaaacatcttggttattgtctctctgggggctgggttacggtggctcacacctgtaatcccagcactttgggaggctgaggtgggaggattgcttgagccagggagttcgagagcaacctgagcaacatagtgagaccctgtctctgcaaaaaataaaaataaattagccaggcatggtgccatgcatctgtggtcccagctactcaggaggctgaggtgggaggattgcttgagcacaggaagttgagagggcgtggagccatgattgcatcactgcacatcagcctgagtgacagagagagatcctttctccaagaagaaaaaaaaaaaagatctctctggattcctgaaatgacaatgtggtaacatgtcacttcatcattttctttccatccccagcacgttcagctcttgacccaaatccaccttcttgccacctgcaaccccaacctcaatccggaggccactaccaccaggatatttcttgtaagtttccaaatatccataactctaaagactagagtatgaaattagcttggcaggttatttctcagttattcactgatcataatctatatttattcttctctcgggtatttttgattgttttgcctgctttctgttaaggcttcctgtgtttgctgagagaacgtaagccactgattcccatgaaaggacaaggagtgtattcaattttcttaatactgtctttctgatatttttattgaatcctcctcatctttagatccaacctaacttcttaggtttttggtaccactgttcgttttatagatgttgagactgggcacggtggctatgcctgtaatcccagcactttgagaagccaaagcaggcagattatatgaccccagtagttccagactagctggggcaacatgccgaaagcccgtctctacaaaatacaaaaattaaccagatgtggtggtgcgtacctgtagtctcagctacttgggaggcagaggtggaaggatagcttgagcctaggaggtgagggttacagtgagctgagatcgcgccactgcactcaagcctgggcagcagagtgagacccagtctcaaaataaataaataaataaaataaaagtaatagtcctaattcttggctgggtgcggtgacttgtgcctgtaatctcagcactttggtaggctgaggtggctggatcacttgaggtcaggagttcgagaacagcttgaccaacatggtgaaatccagtctctacttaaaatacaaaaaatagccgggcgtggtagcgggcgcctgtaattaatcccagctactcgggaggtagatggagaagaatcgcttgagcccaggaagtggagacttcagtgagtcaagatcgcaccactacgctccagcctgggcgacagagcgaaactccgtctcgaaaaaaaaaaaaaaaatgagtcctcattcttcataatcttacttctagttcaggagctagaccatatattccttagtgtttctcactaagtctaaaagtaaaacaagaatacaatccctgaatatctgggaactcaggcataatcttaacagagtagtttattgtgaaagactttatgatgatttttacctgtttttatcctgtagtaggaaggtcagcttctcatttagattctgaaggctactggtattaattgtctggaattgtcttaaatctttcttgtgtcctgttttcccagaaagagctgggaacctttgctcaaagctccatcgcccttcaccatcagtacaaccccaagtttcagaccctgttccaaccctgtaacttgatgggagctatgcagctgattgaagacttcagcacacatgtcagcattgactgcagccctcataaaactgtcaagaagactggtaggagacagatgtgtcagctttaagtttttacttgcggtgagaggtggtgggaatcttatcccatagataactaaggatacttgcctaggaatggaggacacaggacatttgtaatttcttccttctctcttttatcctccctttgtactcattatccaagttctagaattacatgataatctctgggcctgggtaaagtgtggaggcagtggacagtataggaatatgggaggtagagatctgaggctcagtgctaagaattggactacagcaatatgaggggtaagtattaggagtcagatcgagataaactggggcctggtaaagatgaaagtcaggtggtaaagtttggtcatgtttagctttttactgtcttcattaagatcaactaaggccaggcgcggtggctcacgcctgtaatcccagtactttgggaggccgaggcacggggaacacaatgtcaggagatggagaccatcctggcgaacacagtgaaaccccgtctctactaaaaatacagaaattagccaggcatgggggcacgcgcctgtagtcccagctactcgggaggctgaggcaggagaatcgcttgaacccaggaggcagagtttgcagtgagccaagatagcatcattgcactccagcctgggcgacagagcgagactcagtctcaaaaaaaaaaaaaaaaaaatcaactaactttatttaccatactgactgcagcataagtgatatctccattctgaatgaaatattgacttgcaagttaggcataagttagagattatacatttgccatgttcagtattttaaagaaatttgcaagtttagattctaccttgcattagtttagtattttttagaaaatacttgctatttacttaagccaaatatttgcttctgatttgtttcttgatttagcaaattagttgtggtttgttctggatttgggtttgtctttggattctattttaaatccctgagtcttatcgttaagttgaaaatagttgtatttaagtgtattatatcatagacacggatcccaaactgctttaacagctatattaaatgatatgaaatggtaatgaaaacttgatttaacaccaaattataataatatcttacacatctgttgacctgttgctttcttctggggatataaaaataacacttatggaaggagaaatatggatatagtagttttgtctctagaaatgcagaggtgcctgaaagtgagaggctgagagagggagagagaaatgaatgagactgaattgtctccttccttttatggttcttttgttcccagcctcaggaggaatctgggagaacttaagtaagaatcaaataaaagtaaaatttggaataccagatttgtgagggagattaaagaagttggaatcttattctggaagaaagaaagcattgttgaaggtctcttatccttcaagtatttaaggggggaaggaggtaaaacatttttgagcatacgctattgttagcaccttattttactaggtgctttttaagtgtttgttttacttagtgaataaagtgttccacataagaaagaatgagtcaacttttattgccattgaatgggactccctttagatataatgttagcttaagaaagactggaaacttttggggggatggtgggcagatgggagggaatcaagttaggtaaggatagctcctacctaaatgcaaaaatgcattcacaggcttttatgaagccctcttttgtcctagaagttgatttatccgagatttattttcttatagcgaatgaatttccctgtttgccaaagcaagtggcttggattctggccacaagcaaggttttcatgtatccagagttacttccagtgtgttccctgaaggcaaagaatccccaggataagatcgtcttcaccaaggctgaggacaagtaagtgtttactctgggggatcaaaacagcagaacatcccaaggagaagatgtagttcctttgaggagtttaggggaagtaagacttgtataataagacacggacacaaaagacaaaaggaaaagcaatatagatgagcagagccctctaggacgtgcttgttctagcagtgccaaatactgctttttgggagatgtcacacacatttttaaagcattttagaccggacatggtggctcacacctgtaatcccagcactttgaaaggccaaggcaggaggttcgcttttattttattttatgttatttatttatttatttagaggcagaatcttactgtgtcacccaggcagtcacagctcactgcagccttgaactcctgacatcaagcgatccttgcacctcagcctccacggagcagctgagaccacaggcgtgtgccaccatacatggctaaatttttttttttttttttgtagagatgagggtctctctgtgttatccaggcatctctcaaactcctggactcaaggcatcctcccaccttggcctcccaaagtgctgggattacaggcatgagccaccacacccaccagattatgaacatttttatggccctttgtgtgtattgccacactgttatcagcacatatgtgtatatgtaaccacgatcatatatgttgttagagggtagtattggtgccggtttaagttgtctgacagggtacctattcattttgtattagttttattagaattattctccttcctttctattctctttgaacttcctttgtattgttagtatacagctcgtcatgatacagctcatcatgatctcacgtttattaatgatttatgcctagtttcttatgttcccacataattgtgaagtatttgattttttttttttaaacagagtttcacttttgtcacccaggctggagtgcaatggtgcgatctcggctcactgcaaccttcgcccccggtttcaagtgattctcctgaccaagtagctggcattacaggcacctaccactacacctggctattttttgtatttttagtagagacgaggtttcaccatgttggccaggctggtctcgaactcctgactcaggtgatctgcctgcttcggcatcccaaaatgctgggattacaggcgtgagccattgcgcctggccttattcttattcataatacttaatcagtactcactaagtatctgaaattttctgttgagtagtcaccaacttgtacaagaattagatttacaaaaagtagattgaccaggcatggtgggcttacaactgtaataccagcactttgagaggctgaggcaggaggatcgcttgaggccaggagtttaagattagcccaggcaacatagtgagaactggtctctacaaataatggaagaaaaaaattagcccggcatggtggtgaacgtctgtggtcacagatacttgggaggatgaagtacgggaatcgcttgagcccaggcattcaaggctgcagtgcgctgtaatcatgccacccgctctccaacccgggcaacagagcaagaccctgtctgaaaaaaaatgaaaaggtagattgggccacacaccatggctcatgcctgtaatcccagcactttgggaggctgagactggagaattgcttcagcctaggaagtagaggttgcagtgagctgcgatggtgccactgcactccagcctgggtgacagcgtgagaccttgtctcaagaaaaaaatgaaagagtagattgtaaaatgtgttagtctggggagaccctttagaaggaaggactgtgaagtgagatttagtgttattctcctttctcagtttgttagctttaggactgaagcattttgaaggaactgagtttcctaatcctctaatcagcaagtaccttctaacctgcaaaactgcccaccaactgacagtgagaatcaagaacctcaacatgaacagagctcctgacaacatcattaaagtgagtgtttcctgcatgcgccatccgggcacctcaccaatatgtacccattcttttatcttgttattctcaaagaaaagaggaaccttcttttatctaaagctaatttctcccactttacactagattaattcccctattgccttttgggcaatattccgctggcagtattccacttatttgctttttgttgttgttgttgttagacagactcttgctctgtcactcaggcttgagtagagtggcgcaatcttggctcactgcagtctttacctcccaggttcaagcgattctcctgcctcggtgtctcctgcctcagcgtcccaagtagcttggattacaggcatgcaccaccacacctggctaatttttgtattttcagtagagatgaggtttcaccatgttggccaggctggtcttgaacctctgacctcaagtgatccacccgccttggcctcccaaggtgctgggattacaggcatgagccaccgcacctggtttcttcttttttatttagatatttatgttgtgtttttagagacgggttcttgctctatcatcctgtttggagtgcattggctcagtcataggtcactgtagcctcaaactcctgggttcaagtgatccttccactttagccttccaagtatcctggactacaggcgtgttccaccaaggctagctcattattttattttgtgtggagatgctgtgtcactttgttgcccagactggtcttgaagttttgacatgtgtcagtccgcctgcctcagcttggcctcccaaagtgttgggattacaggcgtgagccactatgcccagccttttgttttgttttgtttttgtttttttcttgagaaagggtcttactctgctacccaggctggagtacagtggtacagtcatagctcactgtaagctccagctactgggctcaagcattcctcccacctcagcctcccaaggagctggggattatatgcatgagccaccatgcttgcctattaatttttttttttttttttttttttttttttttttttaagaaatggagtgtccctatattgcccaggctggtctcgaatttttggccttaggcattctcctgtctcagcctctaattgctacttcctggtatattggatttaggccttatttattaaccattaaccataagccaaggaagctgaggatttacctgtctcctcactcccttactcccaccacaaacatgcacattttctgctctccaatctcctcgctagtaattatgtcacaattttggttaggttgtattcagggtttacactataagattttaaggactgtataaatactcttcacagctatgttattgtgataccttgcctttcctgctgaacattttgtttttcttggagtaaataatcgcatttttagggggatggggctggacttgattttattatgtaattattcccaggtcaacagtaaaggttacttaaattttcttaatctcctttcagcgtgtctggccttctagatattccgtcactttcatcttgaaggaattgctccttgagccctctgacactattccactctaagcgtgttgctctctgggcttgctgcactgatgttttgggctttttcctccccatcatcctgggaattctttttgcctcttactgtgttggatcttcttatttcctgaattctacatctgtgtttttgttttacttccttcctttagtgaaacacattctagtagcattttttattttaatttttttctaaatttttaaaaattgaggccgtacacggtggctcaggcctgtaatcccaggtctttgggaggctgaggcaggcagatgacctgaggccaggagttcaagaccagcctgggcaatatggtgaaaccccgtctctactaaaaatacaaaaattgaccaggtatggtgccactcacctgtaatcccagccactcgggaggctgaggcacaaaactcacttgaactagggagacagaggttcagtaagcgtggatcactcccctgcactccagcctgggcgacagaggagtctctgtctcaaagatcaagaagcagagaaacaaacaaaaagtacaaagatgtgcacagaaaatgacacacaactcaaacgtgaaggaaaaagatttttctgcagcagaatacggtttatcaagtgccttagcaccacggatgaaactagacaaattctaagccatattatcatgaattttcaaaacattggagccaaaggaaaaatcttacatgctatcagaggttgggagaaacaggtgttacatgaatattcaagagttaaatggggccgtggctcacgcctataatcccagcactttgggaggccaaggtgggagaattacttgagcccaggagttcaagaccagcctgggcaaaaaagtgagacctgtctcaatttttttttttttttttgagatggagtcttgctgtgtcatccaggctggagtgcagtggtgtgatctcggctcactgcaagctccgcctcccaggttcatgccattctcctgcctgagcctcctgagtagctgggactacaggcaccagccaccacgcctggctaattttttgtattttttagtagagacggggtttcaccatgttagccaggatggtctcaatctcctgacctcgtgatctgcccacctcaacctcccaaagtgctgggattacaaggtgagccactgcgcctggcctattctttttttttttttttgagacggagtctcactgtgtcacccaggctggagtgcagtggcactgtctctgatctcagctcacctcaacctccacctcccaggttcaagcaattctcctgcctcagcccgctgagtagctgggattacaggtgcgtgccaccatgcctggctaatttttgtatttttgtaggaataggggttttgccatgttggccagtctggtcttgaactcctgaccttaggtaatctgcccacctccgaaagtgctgggattataggcatgaaccaccacgcccaaccttcatttactcttaaaattgaactttctcaggctctttttttccccccttctcttctaatgcctttcacaccaccatttgcttaaaaggaagctttcatgtgtccaaggtatagattacgatgttgtctttgcagctgttgatcaagaacaaatcttacataagattgctctgagcatctgcttccttttctctctgtgacctaaactctccccttcctggcaaccagaatggagatcatcagttagaaaatattgaataattgtgaaatatttaaatagagattagtttaatttgaaatgtacaagtattcagcatatgctatttatatatgtgcgttcatggatgtttgtgtatgtggtcttgtgtgtgtgtgtgtgtgtgtgtgtgtgtttctcttgatccaccaccaccccattcaccagcctgacaggggacagtgtttccagaaggaatgtaattcatgcgcatttttttcatgttaagttttataagaagaccaaacagctgccagtcctaggaaaatgctgtgaagagatccagccacatcagtggaagccacctatagagagagaagaacaccggctcccattctggttaaaggtacagccctcttcctcgaagtctgtaggaggcagaaggtcactgaaagttctgagagaatatcaagggcttccttaatcgtctaatgctttagttgtagaactaggactttagaaatcttcctgattcacctttcttcccttacttttctgcccttctctgggtgattctacagcattttcaaaataataggtaaaataataatttgctaaaggaaattcacagaagtttctaaagtgtataattagaatgtggtctttgtagatttgatatgcagagagacccttcttggaaagatgccttgagactgtctaaggtctctaaaacctagaaagccctattgtttttcccaaattctttttttgttgttgttttgttttgtttttgagacagagtcttgctctgtccacccaggctaaggtgcgatctcggcttctcgcaacctctgcctcccaggttcaagtgattctcctgcctccgcctcctgagtagctgggattacaggcacatgccaccacacccaactaatttttgtatttttagtagagacggggtttcaccgtgttggtcaggctcatcctgaactcctgacctcaagtgatctgcccacttcagcctcccaaagtgctgggattacaggcgtgagccactgtgccaagcctctttttcccaaattctgacatatgctggatcagagtgttcttgtttccaataggccagtctgccatccatccaggaagaactgcggcacatggctgatggtgctagagaggtaggaaatatgactggaaccactgagatcaactcagatcgaagcctagaaaaagacaatttggagttggggagtgaatctcggtacccactgctattgcctaagggtgtagtcctgaaactgaagccagttgccacccgtttccccaggaaggcttggagacagaagcgttcatcagtcctgaagcccctccttatccaacccagcccctctctccagcccagcttcaaccctgggaaaacaccagcccgatcaactcattcagaagcccctccgagcaaaatggtgctccggattcctcacccaatacagccagccactgttttacagacagttccaggtgtccctccactgggggtcagtggaggtgagagttttgagtctcctgcagcactgcctgctgtgccccctgaggccaggacaagcttccctctgtctgagtcccagactttgctctcttctgcccctgtgcccaaggtaatgctgccctcccttgccccttctaagtttcgaaagccatatgtgagacggagaccctcaaagagaagaggagtcaaggcctctccctgtatgaaacctgcccctgttatccaccaccctgcatctgttatcttcactgttcctgctaccactgtgaagattgtgagccttggcggtggctgtaacatgatccagcctgtcaatgcggctgtggcccagagtccccagactattcccatcactaccctcttggttaaccctacttccttcccctgtccattgaaccagtcccttgtggcctcctctgtctcacccttaattgtttctggcaattctgtgaatcttcctataccatccacccctgaagataaggcccacgtgaatgtggacattgcttgtgctgtggctgatggggaaaatgcctttcagggcctagaacccaaattagagccccaggaactatctcctctctctgctactgttttcccgaaagtggaacatagcccagggcctccactagcagatgcagagtgccaagaaggattgtcagagaatagtgcctgtcgctggaccgttgtgaaaacagaggaggggaggcaagctctggagccgctccctcagggcatccaggagtctctaaacaaccctacccctggggatttagaggaaattgtcaagatggaacctgaagaagctagagaggaaatcagtggatcccctgagcgtgatatttgtgatgacatcaaagtggaacatgctgtggaattggacactggtgccccaagcgaggagttgagcagtgctggagaagtaacgaaacagacagtcttacagaaggaagaggagaggagtcagccaactaaaaccccttcatcttctcaagagccccctgatgaaggaacctcagggacagatgtgaacaaaggatcatcaaagaatgctttgtcctcaatggatcctgaagtgaggcttagtagccccccagggaagccagaagattcatccagtgttgatggtcagtcagtggggactccagttgggccagaaactggaggagagaagaatgggccagaagaagaggaagaagaggactttgatgacctcacccaagatgaggaagatgaaatgtcatcagcttctgaggaatctgtgctttctgtcccagaactccaggtgagagctggagaatattctcaagtatttcgtggactcagtaatatgtatcacttattgatatgccacctgcttgcttgctgcactatggatagtcctaaaatcatttgtatttgatttgtgaatgcattatgggacatgattgtggagttgagg

SEQ ID NO: 15604 - DNA, 129066 bp, Homo sapiens; identical to SEQ ID NO: 1194

SEQ ID NO: 15605 - DNA, 94916 bp, Homo sapiens
cttttctatatactttatataatatgagccttgtcacagagtggtacatgttcgccttagcacactttttattcctgacagcaattatattttacattctgttttatgtaaattacatcctatgttctcttactgtaggagaaaaaagaaagatcttgatgttccggaaatgccatctattccaaacccttttcctgagctatgctgttctccatttacatctgtgttgtcagcagacctatttcccaaagcaaattcaaggaaaaaacaggtatgcatttttaaattttaaatttcaaaaatcttaggagttctgaatccatacagtctttaaggtgttccgtaatttacagtattaacaaaggattagcatgggctctgttaaataactctgttgactgacatggtcctttggcattattttccatttagggccttattcttctaagccgtataatgggaatgttaaaacctacctccgagggtcttgggatggattaaaacagagaatatatataaagtgcagtggttgagaacaataatcattcaccagataggtagaagagatgatcatttttaagccaggaattgggcagaggctgggacggggtgggcagtagtagtggggtgagaaggggattgactgattcctttaatactttctttaatttttcacattttcaacccaagccaacctcatttacctaaggaaagtgatatagtgatgctgtggcaaaaggtatttagaatttagggtcaacatgtcttcatttcagtggattcctcagtttggaggctctggctgcagaagatagatgactcgtagtgataattagaagactaaggaccatatctttatgattttctccttttctagtttgggattgacttaagcaaattagattttaaggaccaagcaactaacagaaaatacatcatggctgtacatttggaggggaaaaaaatagtgtatcatagaataattcatctcttgtcatatactttctcccagttttgacccagcaaaacaaagagaagcctcactagacaaaatgcaccttattcttacaagggtggaaacaatacattgaaatagccaggtacttgaaatgggagaaggataatgaacagcgaggacaagacagttggccatttttccgcgtctattgctctctttcttatttctgcacctttattgcttctaatgggttcaactatgtgtgtttatatttttaggaatggaggaaataccttaggaagcagatgaattattgatcatatacagaaatgatagagacagtaggaaatatgtttgatggaagccctgtgtatatatttttggggggaggggcttgaagtcacttggtacacaggtttttgggtaaggattggagaaaatgggaataaatttttctagaagcagaactatgttctgaattggcatctttgaaagggggaataaacccttaagtgggtgggactgtaactttgtttggggagacaaagaggagactctcttgagacctttattatcaggatgaggtttaaagtcagatcccaaggaaaaaacagccctagtgaaacttccaagctctttgagagttgactttttggtttggatagaaaatggaagtaaggataatagatttgactgtgtgccatggtagtggaaaaaaaaaaaagaggccgggtgcggtggctcacgcctgtaatcccagtaatcccagcactttgggaggctgaggcgggcagatcacgaagtctgaagattgagaccatcctgtccaacatggtaaaaccccgtctccactaaaaatacaaaaattagctgggtgtggtggcctgcacctgtagtcccagctactcgggaggcggaggcaggagaatcgcttgaacccaggaggcggaggctgcagtgagctgagattgtgcccctgcactccactctgaacgacagagcgagaatctgtcccccgctgacactacccccccccccccaaaaaaaagattctggcttgtccttgagccagagtaagaaaaggaaatgtctgatgatgacataatggtcatctggaagaatttaataggtagttcccaaattactaagggcctgctatgtttctcacaaatcctaggcagtaaggaccctagctaagcaacaataccatgcaagatatatttaaaagatggggctttgatttggggttgtggtagcgggtggagcctgaaccagaaggaaagtaaagggaaggatatctgggctgactcactttaatgctatgaatggacacttgcagaatgcctgtgtctgagagatttgttgatgatgcagggtttgttttgaatagaaagtgagaagaggtgttggtatgcttatgttagtataggggacaaaagagaaagaatgggtaaagtgccagggttaaggcaggatgtgccctaagtgtggatagtcatcagactagagtaagacgtcttagagattgatgacatttcctcagatcaggtttaaactggaaaatgggcaaaaaaaaaatagcaaactggaaatggggaaaaggtgatattgttattgaccccaataggtttcctgctctggccttgtatcctgtgtccacaatgaccttctcaaagaacactgtacccacacacacacctgtactgttccctgagcagagagtccccgcctgatttttaaagatccatcccagagggctgtccctacctttgaagggcccttcttgctgatctcttccttggcccaatggttgagatctctatgaagacaagggtaccccaaagttgaggaggagggaggctgctttttactttattttatgcttcctttttcccccacctagactttgcatttagaactgatccttttgctttagtttctttatacacactcagttctttgaaatgaggaaggttttgagaatagatgactctatgtaagtgagtcccccaactcagtagctttgcaacacatattacccttttacaagatgctgtttttggcccagtttatctgtaaccttcagttgagatgatgtaagtgactatgcgatatgttctactgagtattatttatggttgaaatattataggagaagatgtctctttactttatattctctctcatttgtcctgtttaaccattccagtcattttagtgattcttttctctccacagaaaaagtgaagaaaataattgtacttgttatttacaaatcaatgaccagaaaatttgagagaatccagactaaaaatgttaaatttcatctggcctttcaaaatcacagtcaaaaaccatcttacaagtcataaattttgtttactatttgagatgcctacataatgcatgagtggtaaagtgcattgaagccacaaatgggatatgttttatcactttttgcaaataaaatgtcccaaagtgtacaatactgtaggctttcagtaccattatttttaaatgaaagctagagtgagagagaatccatattctttttttttttttttttttttttttgagacggagtctcgctctgtcgcccaggctggagtgcagtggcacaatctcggcttactgcaagctctgcctcctgggttcatgccattctcctgcctcagcctcccgagtagctgggactagaggtgcctgccaccacgcccagctaattttttttgtatttttagtagagacagggttttaccgtgttagccaggatgatctccatctcctgacctcatgatccacccgccttggcctcccaaagtgctgggattacaggcatgagcccctgtgccccgcgagaattcatattctttattccctttccctctttttataatgatggccagatttcctaggcatctttctttgtgtttactaataaagcaaatttaaagtataccttcccttacatacatggtccagaaaagttacttatattaaaagtgacttccattatgaacttaatctcttttttctaatttatgatttaaatttataaggaaatcatctgttagtaatgaaccctaaacacctattgtttgaaggaaagcaaagagttagaaatctttatttagctcttgcagcagaatcagttcttgtcttttttgttgacccctaggtaatttttgtgcttggacatagcctgtgtagtagctctggttaattgcttcccaggactatgttgtacaactaagtaagaataaagcctctgaaggctttagagatttaaaaaatgctatgaaaaccagtgtcatgaaatgtttgagttggatgggatttttcagatcttctattccaatattcttctttagtgatacgtaaattgagtttaaggaatgctatgtggcacagccagcacctgaaatctggatttcttgaggctttgacagtccctttttaggaaggtacaatttctaaagaaagcaaggactgtaaataagagtagtataataatacatgtgtaccagtgttgttagttacaactctcctcataacacaagaagaacaggggagacaaacgccatttgttaatattcatctaaggacctggaattcctctttttatttcttcccgaaatgtaactacgttttttcttctagctttcttctccatcttctccctaaaattggtctgagaaatctatcaaatatttgattttattatcaaataagatttattagtattattaataaccagcttttgtgtgtggtttacggtccacaggatattatttcatgggaacacaagaaaatgagtatgtcacctgcattttaagattacaaaaagagtatgcaaaaactggaagggatttgcccatgcttccacagtttaaataaagggagatcaaaaagagtatcatgtctcaatgtgtcctgtcccttaccacactgtttctagtgtattctttattaaattaagcctttttttgtatgtctcagaaaaataaaaatttatctcaaataattaaaaaattagttttccatatgctcggccttttatttcttttttctctaccatgtcacggactttcaaaggataagcagatctctgtccccaaattaaagggcctcttatatcattcctttgtgatgccagtaattaccccactttggacatgctgaacttgtatgtgtggtcctataggaatcttgtgtggctgctacattaactgaaatttcatatacttatttttctagtatacatagaagtaaaagaagagaaacccatgtacatattgtagtttttccagactcagcaattatcaagattttgcctcatttactccatctatttcttttttaaaaattttattttctttgctaaagtattttgaagtatatcctggacaccccatcattgcatctctacgtagttttgtattcatctctgaaaaatgaattttcttttatatcccaaatgccattattccctaacataaataacagcaattccttgatatcgtctaaaaccattcataattgaattttctcagttggaatggctcatgaaattctcaaattacaaactgcttagctttcaaatgtctgaaaattagctctttggaagtttaaattcatttttagatggaaacaacatcataaattgtatttaggccctctgagctattttacaaaatcccatttaattggaaacaaaacatatatgcagaaagaatgatagaaacaatactctctcctattagggtttcaaacaaatctatctttccaacggcaatttgctacttttgagtgctgtcacttgatgaatataattttttgggagaatttgaaagcgtgcagatctttgtagcagtgttgaagcaggctttacagctgcgcttctcaaagtgtggtcattaaatcaccttcttcagaatcagcagggatgcttattaaaaatatggatacttggacctcttgcaaaacccactgaataggaatgttctgggggaggttataggaatttgattttttatatttttttctctttgatatgtatacaaatcagtgctactcttaatctctaccattttcaaactggggcaattggacctttcaaaactgaggacagttgtgttttgttgacaaaggtgagtatgttacaaatggcctttagttggtattttagccaggtattgattgttcagacaaaacagagcctcaaatgaaccagcctgaaaggctgtgttgtagtacctgaaggccaaaaggtcactggtctcatgagaggctgaaattgggagcaagaaagtcagcaaaaatcaagtcaaccactttctctattctctctcttttgttctcccacaaacataccacatagtctctgcctctccttgcaaattcacatcatttttgagatttctttgcagtgttgcttgccctgatttcatgtcagtgccagcggcctcaagtggctgctcccaagttttccacctattagtggttcagtacttggtaactgactgggaactgtatctggagaggtatgttagtccagtgtgtccagatcctattcaatcagatgtggccaaggggacagtgggccctggaccactgttcagtctgcaagggtgtggtaacatgtgagaaagaggtacaggtttagtaggtatggcatatggaggcactatgtcctaggggcagctagtgtcctaggggaaaaaaaagatctcaaacaggacacaaaaactaattctaatcatatttgtatgatatatgatgatccaccaattggtttatttgacttaacgtacccagttcagagtgttcagctcctttgtctcaattcacttaatgtacgtgaagcatacttattgggcagttgtttcagttgatgtcacccttcagggatgctcagcttccttgtccattttcctgagcttacgtcttactgaggtcccttaacccctgatgacaggaattaccaactcaggttccttcccaccttatgctagttaccttcattgtaggagaagttagctttcttttcctattttaaaacttaaatcccctagcagatcttctatttgtcaaggttttatttctagtttgaaggttgcctttaatttttggttaatttgcagggtacatttgcagtccaagctttatctacaatatgggttttctttttaacgttattgaaatctcagcttctggtttgtttttccctggggcatataatatgttctgtcaagagaaagaaaattggagtcatcatggttcaatataagtgtggattttaattaatataaaaaagatttctgcagtcttatggatattgctttgaaaaaacgtcagcttatgtcaaatagtaataaactctattgtataagtatatgcttatgtgtatttcaatggtggtaagcagacctgagaattgtccttttgacattacagataaaggtcagctcaagggagaccccagagaatggccacaagtctttgccaaggcaagggagtagaaagaaagggttcaggattaatttagaagagaaatggcaggactgacatagggagaccatcctttaattcttgtccttttctttggcccactcatttaacattttttcaaagccacagaaaaaataaacacaaataggaggtttaatattcttaaccagcttacaaatgcttgtattccagaagatctttaataaattggccatttattcacatacatttttccatagacgtattgttacatgcagtggttaggtggtcaggccaaagccttaaaatccataatggctccaaagtatagtgctcttacaacattgcgtgtaccgtttttaaaattgcttctgtggaaagatgtgtcaatatgatgtgactgaaagatattggaacaggaatcagcaaacctagtttttaatacagtcctactacagatgaggggtgttatatcagcccattgctcaccctttctgtacctgagagctctacaattttattgtattcctagagcaagtgattctgatggctccagaagcagtaatggctcctgtgcagcagatacaggagtcgtggaaagcagggtttcttttgttccactagccctagaagctccctcttagcctctgttcaggtattcccatatagtgaccacacttttttgtgataaagagtatgtttggggtgtcataggacaaagagcacaggagtcacattcatggaaataattggggcagaagggtctggttaaactagaaactgcagcaaagtcatagttcaaatattagaagaagaatcagaaaaggaatcacatctagtaggagccagctcaagtggtgaagttaaagtacaggaccaagcatctaaacttagaaataaggatacgagataagatgtgaccacttgaggccggcataggtccaatacacatttggctctacttggtttaataggtacggggtggtcgtaacctctgaattctctaaatttatctttctccaccctcaaatcatttatttgattacttaagccaaaatttaaggagtccactttctgttcttgttaagtactgcttcatctttcatcaaagtaggcttgaatctatatacatctccccatctctgctgccaccatcctaatttagccattgtcttctcacctacaggagccccataaatggcctcctttcttctgtgttagcttatcttggttcattctacatacacttgttatagggaactttcagaaaggtaaatcgcggcatgtaatttcctggtttaaaaaattttaataccttagaatgaaatccacatttcttcctttgacaggactctccatggctttgtccctggctacctcttaaacctcatgtacattctaccctttgttcattagactccagccacagtcctatctatttgtgaacttagcaaacttttttttctatctccaaggctttatcgtagctgttttctgagtctggaacctatttccctggctcctgacatacctgattcctctttattctctagatttcagtataaggtcatctcatccaggagatttttttttttttttgaccagcctaaatgtagcctgttttttttttttttttaatttttttttcccatcacatttctcagtttgtttccttggctgcacttaccataatccgaattgtctcatttatctatttggtctagttgttttattctttttccctctatgtgaattatcttggctttattgttcttgggttatttcatggaaagaatgaatgagtaaatggattattgaagatacatagttaaaactaatttaacaaattatattttgacatgtttattctaatcattttcagtcatcttcattaaattagaataaaattaaatttgattaacagactctatttaccaaaataaattatatttttattttttaaaattttttcttgacaattatttctttgtaatgcaaaaataaaattgaatctagatcctggactaagtggattttaaaagtacgtatcttttgctttcatttaacacgtatgaaaatttgatccgtgtaatcaagatatttctgattttatacattattttttatatagtataattataagtgagtgcccagtgaactgctatactttctttaagtttactgtgtgttcataagatccacagctttagaaaagattaagtggaaatattagttaggtttatagtatgagtctctcagagcaagaggtatatgctagcaaatgttttaattattaagaattaatatcagtggtgaattatttaggtcagtgttcatcagatggaagtggggagacatataccctttgaaaatacatgaagactttccaagggttgtcaaacatagatttaagagaatcagttttcacttcctgagaacccacctgtgctcccagtaagctcctcttggtgcattaccctggggcgtgtaaacatccagggcatcacacacagggaaagcttcctttagtgattaatcaaagcatcacaaataagaaggagttcctttttaatgtcttaagcctctttctgttaagggtgaatcatggtggaaatgaggattttgaccagtgttgaaatattttgaattcagatagatgatggtgtgatgaagtaatcacaattttcatttttcagtttttgacttcagttcttccatgtcctgactgttgtcaaagaatatataataacccttgagggataacttcttaagagcaaagcaaggagtgcatcagtgagaaatattgattgctgaaatggccttttgtcatatatttaaatgtactatctgctattctggatacatatgtataggatgctgaaagaaatactataaaagcactgaatttatgtaatttatataataaatatgtatttataaatgcaaagaaatcctataaaagctgaaagaaaatgcacgtacaaacacctgatatgatataggttagtgctgctggtgaagttacctgggaagtagacttggagcacaggtttgccttcaggaagtttgctggggagagcccgtggaaacaatacttgtaggaatggacacagggagaagttgggctgcagcacagccacagcaaaggtccagttgatcccgtaggagagctctggagctggattggccctacagaattgttcagaattagggcacaggtgctgggctgtctaggaaatgtcagaacttgggcatggcagctttctttagcatagtgcaatggcagtcaaggaggccttagccacaagtcttagtggctgatactctaacagctgggagaatgagtgcttcagtcttgaaggaggtgggtttggatgttgtgccacagtatctgccatagttagtaactgatcttttaaaatgttaatagaaatcattttggggactaccaaagttttcaagataaattggttaaaactcaagaataaaacatatacatgatttctttcaaattttgtgtgtgttattcaatattgtacttactattttggcaaatcatacgataaactctttattccaattccagtcaattcccatcctattttatcataaaatattttaatattttctaatacctaaaaaatgatatgccagctactggactatttattttttaatgtgcatgtaccgtttgcattcctgaaaaacataagaaatatttgtcatggtgactactacatttaatagaactatttctaattttatacttgatttttatttagttatatccaaaagctgaaacccaatggtgaaaatgtacagtaacacaattgccaaaggaattctatgtacttcctagcacttcatcatactccccagaactcttagtcctgtattaatttaactttttttcttttttctttttttccatttgtccaaggcatgaacgaggcattggctactgggatatataaggggttactttgctttgttcctagttgatatgagataggcaccatcaatgtattactttaattttgactgctttcagctatttctcttctaagatacaattcataatttatttttcagtgttttaaatttttttttctcaaaatttaactttgtttgctttttttttagagggagtctcgctcttttgcccaggctggggtgcagtgggtgatctcagctcactacgacctccacctcctgggttcaagcgattctcctgcctcagcctcctgagtagctgggattatgggcactcgccgccacacctggctaatttttgcatttttagtagagatggtgtttcatcatgttggccaggctggtcttgaactcctgacctcagttgatctgcccgcctcggcctcccaaagtactgggattacaggtgtgagccactgtgcctggccaaaatgtaactaatttgaattgaaaagtaaagttgggctttatttgataaaatataagtctgatttggccaattgcttttgagagtgaggattaactttccaattatatggctgacatttttctttagaaactaaatctgaagccttaaacttttgatgaacatatatataagacacattataagacaaaagcatcttaggaaaaaaattggaaagcaatcatgcagaagcctcgtacttttggtttggccaaggtatgataaaattaacacattttccgagtgtattaatttgaacaaagtacatttaagttgaagggtaaaaaatcattaatggctaatggtaaagctttgttgatggtaaagctttgttgaaactatccagaaattgataaaatgaatgaatctgggtgacaaatctttatcaagtcagatggtttctaatttgtcattttcagttgtattatatgaggtccttaactgatttgctggttaacagattattaaagattattttagctctgatggagttcaaagattaacattgccttccaccacctgtgtgcttcctcttctccctcgctcagattaatttttctaactagcatttattattatctgacatgtgttatgttcacatatatatggattcatctactgccttttcccagtagaacataagctctgtgaagacaggaactatttgttaattgagtaagctttatttattcaatctctagcatgtagaattatgcctagcacttcacaggccctcagtaaatttttgctgaatgaaagaataaataaatggagaaatgaatggataaagagctgggaagtcattgttattaagggagagaatatttggaaacgtactgatattttaatataaatgatatcaaatgtgtaaagaaactttgaaaagtgaaatttagtttattttccaggaagagtctgatattgtttgatgttaaaaaagagcctggtcaggataaatgtttgagtattgatttaccactataagcacattctaaatttggattacccttggtcagaatgggttctgttctttgtctctttggttcccttgtaagcattttcagtcttagcagcccatgtatgccagttaaaaagcatgcatactttatagggctgagtccagtaaaagcttttcaatcaacccacattcacagtggaagattactttcattcctgggaagggtgacatatgcgtgtgaaacacagtattcagatgaaagggctactttggtattatttaactgtgtattggcaagactctagccagtatctagtttctctttagagctattttgcattatattacagtagtcttactgtgctgtgccaaggaaattaagatcagctggaacactctgtaggtcattggcttggaatcttagggcactgggaacttgatgttttgttttaatgacctcatttaggcgaaatctgcctttgtcccagaagcctaaggggccctttacaaaaccatgcctgcaccttgggaaagatatagaagaggttcagagaaaaatgactaaatatttaaaggtattgggtcaacctccatgtataaagtactttataaattaattgactctttagtcaagaaagacaaagaggagtcgtaatgaaagtctcttcaatacagatttacccgccaagttccatgatatctgaaacatacttttaaagttgaaggatgtaattttaagaaaaattgaaagaagaaatgattacacatcatgtaggggcttatgggtattgtgtcgtggcaaatgatttctaaaagggatttctaggggcaatcactcttgtggaatgatggacctcctccatatttctcaaagtgggagtataagatgcatatatgcatatgggatgtgtggggattgtgggagggccatatgggaagttgcatgataaacatggaacacctttttggaacgttaactttaattgaaaatatgggaaaaacattcttatattaaaataaacactcctgtatttatgagtagaatacataatgtgcatgaatttttaagaacaaattatacgcctcagatattcttaccctgagatggcaaaggctgtacaattactttcttttgcatgttgggtatctctggtggaaacatttgagaagtgctagtgtagttttcatttctgtgggaagtggctccttgtgactctcatgagggttggatatctctttattctttagccatagtcctttctagagcttctctgattttattggtatctatatcactaccagtaaagatattgggttttaaacatttgaactattttcctactttacttttctgcagcttggcaggaaatagctctcaactaaagtctctgaagaccaccttattcctgaagacctacttttgagtctttgtgttgatgtctgagcagttttagacattttgactactttttccttcttgaaatactttcttgacttctgcctcttaaaggttctgttgtaggatttgagtgttggtattccttagggttttgtcctagaacttcttgttttcattttactgccaggatgatctcatctacctccacggcctcaattgcagtgtgcatgtaagtctaggctagatctgtatactgggctgcctgttggatatcttcatttatacggtccatagacatctcaaactcagcagattccaaaacaagtgaatactcttcctcttaaacttgcttcttctctcatgttttccttccctggaaatagaatatactcttcctgtactagaaaataagatatcttagctcttctttggctcctctttatttctctctcctcatccagttgggtaccaagtcctttgggaagaacaactcttggatttatccacttttcaaaacttctctgctattgcaacagctcaggtcaaatcatctcttacataattactttgagactctcctcactggtactctatttttagtagttttctactcctagaggtgttgtatgcttacatgtttttattaaggagataaaattcattaagcataaaattagccattcccaaatctacaatttactggcatttacaatttactgacataagtgcatccacagtgttgtaccaccatctcctttgtctagtttcaaaacattttcattgcccccaaagaaaattctatacccattgaatagacattctccattctcttctccgtctcggcccctcgcaaccacaaatctgcattctgtttgtatggatttacctattatggatatttcattaaaatggaatcatatagtatgtgaccttttgcatctggtttctttcactcagcctgttttggaagtttatccatgttgttgaatgtaatactaggattctcaccgtgaagtaattccaaacagttagagaactaactttttttttttttaagaaagaagagattgttcatacatgattgcttctgctttgtgtctttgttctcaatcccattttatttcccctttttcctgctgtgagggaaacactgttctgaggttggtgagtatcctttctttccatgtttttatgcctttacacatataatactataatgtgtcctaatgatttatttaaaaatatattgtatgtctatctctgcaacttgttttcgtttgacatttttgattaatccatatgaataaatataaatcacttattttaattttatttcattgtatgcatgtaccacaattttttgtttacccattgaagaaaactgagaatttctcaatttccatcattaaagaccacactataatatacattcttgtgcctgtgtgcaagggtttctctattgtatgtatttagaagtagaattgcttggctgtagacaggtgcatgttcagttctactaggtattgccaaattgctctccaaagtggttgtgcccaccagcactatatgcgtctccatttccacactttctcatcaacagctggtattttcagaatttaaagtttttgccaatgtggtgagtgtaatgagatttaattactgtgttcatttgcattaccttgattatttgtaaggttgagcatctttttatttgcttctgtccattcttacttcttctttgtgaattacctgtattattctgttgcattgtttgcattttttaaaatgacttgtaagaatcctttatatggtattgatagctatctttttgcaactgtaaacattgcaattatcttttctcagtaattgtgacttgctttaactttgtttatagtgtttcttatgatacagaatatttttgttttaatttagttaaatctagttttgtacttttgtgtgtcttatttaagaatttttccctctctgtcctgaatattttttcgtcgagttaatatatatatattttttttttgaggtggtgtctcactctgtcacccaggttagattgcagtggctcgaccttggctcactgcaacctctgcctccaggttcaagtgactctcctgcctcagactccagagtagctgggattacaggtgcccaccaccacacccagctaatttttgtatttttagcagagacggggtttcactatgttggccaggctggtctcgaactcctgacctcaggtgatcctcctgcctcagcctcctaaagtgctaggattactggtgtgagccaccgcacccggcctcatgtagtcatttttatgttttactttacacacttgggtttttgacatagcacaatttatttttttaggataggaatttgattttttatccaatgaccatccattcatactagcaccacttattaatcatcttttcttttcccaaagctttttaacattttttcatcatgtattaagttccccttttcataggtggaagcaataatgctaaatggctaatcaaattatcttactcctaaaaccattccatgaatacccctcactcttcagatactgatttaaatgggaccctgaggtactatacagctggaccacctctctaatcatgcctctaatcctttccatctcatactctgtgctttgaccacacttaatttttttttagttttgtacaatgtctttctttttcttacctgactttggtctttacatgagatagatgttcaatcttcctgcatatctcttttccttaatctttaaatagctagcttcaaataacatatctttgaagactcagctgcaagagtcttctcttcccataatagatatatgttaggtgccctgcttagggataatctaccaggtcaattacattacattattagtgttccacaatccaggaatctctgggggcaatagggatcagttggcttggattctggattctagccttgtgccgggcacatactaagtcttctgtatatacttgctgaatgaactgaagtttcagataacactctcacctagagtaggattcatttttaaaatctttgttagatgatcatctgtataatctcctcttgagcattttcaatgatagtgagctcattagcttataatcaataaaatccttttataatgctttcttatgaagtacgtgtaaaccaagtttgtctgtaattgtaaggaaaaaaataattgcacatttttttcaggatattgtctccatccctatgtaaatctcaattttgacctattattccagcatgtcaagatattattgaattttggtaatttcagtaatcatctctctcatcatttccttatatgttcataggtatagaagatgttagtgtcttcattcaagagttaaaagaaagactgtattacttgattaaaattacagagataggaagtggcagaggcaaggtttgcagactcctaatctcccttcccctcccctcccttcccttcccttcccttctcttcccttctcttcccttccctcctttcctttttttttttttaaatttaaaaatacatttggagacacacaaaaagtgttttgttttataaataggccaggcctatactatggataatattgcagagtagaattccaaaggtgggcgtctctgatacattactcttacatggtataaccagtgtgcctgaagggagcagaaccggttttagatttatataaagtttcctttcactgaatgttaccttggacttgattagtttatttctagatatgtaaaattataataattaaacaaaatttaaatataaaaatattttttacttctttgggaaaaacagttcttcaaaactgttaagattgtatcctgaattgtgaaggtctgcagttgtaaagtagtgtgatttattttctctttcactggcttataagggtgcatatatcgtacctttatattaatgatgacacagtttctaagataatttcaaatatgttatttttattcttttaatatctgaatgtaataaatggaatccttagttttgtcctagttttgcagatggaaaaacacagggtcaaagatcaagggttaaatatacagattatgcctgagagagccaggacttgaacccagattttcagatttcaatcccagccctgcctatctaacacaaaattcacaggtagaattctatttagaaactacgttcaaaataccttctctgtgctttcagtattgtagatgtttatatagtgaaaacaataaaaagagttgtcctttacaccacccatgaaaccaaccttaatatgttctgatctccctctacctccatagtgtttttcttatggtatcggtatactgcctttatgaaatatcaaaaatcctttgtattattgtttcagaaaatgtcagaaatcattgtcgttattattattattattattttcaatttataagattttgaatgactttcagaaactgctagggaaattggatcattctaagatcaggatgtattcttactgaaagagtttagctgtactctggggtgttaaaattaactttcattgacagatccttgtctgggatttaactgagatttaagtcagtaaaaattctgccctgtggcctagagaacaattggacaaagtagatgaagtggagaggaatgtattttctcaaccttttttttttccattggaaagaacccaggtcacttgcagagacggtagagatttggcaatggactggtcctgctgttgtgtggtcactattagcaagccaaatactcatcattataataaatgtggggctataaatatcagtgcagagaatactgggtcttaaaagcatggaatcaaaaatgatttaagtatttagagattgaattaaattccatttaaaaaaagaaattaataaatctttattttacttgtcaatataattatccttccatcttagaaaagttgttttacatgtaatgctttaggatggcaattctcaaaccccagtgggcatatcacatgcttagagtatttgatacaagtgcagatccctgggtctcatccttggacactctatttccataggctgaaacattaaaacctttaacaagtacctgccgggagattcttataattctggggcagcttgactctataccacttttgaagaaaccctgatataatctgattgaatcagggtttgaaataatgacatttctcctacagaaggagtggtcaatcaatacaggaggagctattactcatacatccacatgctttatatatgtgaagttctataattttttaaaggataaccattgtctacatctgtttgcttcatctcaaaggtattagaaattgcttgaattttaaattgcattgcttttaaaattaaagtatatttattgtttaacaaacaacctctatggcaacgggaattgccctttctctatgactcctaaagtggttgctgaagtagatcacacaggggggcgctgtttaaatatgttttgtctgtggatagttccaaatccatacagcagagggtgcatgctttaaatgacacaaggaacctgtgacctgattgttttagtttgaattattctaggttgcattatcaatttaatttagactattaaagaaatatgacttgctgaaacttatttaagtaaggatcatgtgaagtttttataagttaataatttagacatgtattcaaattattctggtttcttcgtgttttcgcattacattataaacagtggctctaagtagcatctcttctatgttgggtcttttcttttttagtcataagaattaagattctgatatgcaaaagtgctagttgattataaatctacaacagacagatatcttctacagatgatttgttgtgtaatattttatagtgttttgcctgagaattgaagatatatgtcattcacatcataatatgctatttttcctccttccttccagacttagtgcatatgcaaatactttctttaaaacttgttctttttaggtagcattttcccatatatgcttctatcaattctctattagttacagtagaataaataaacttgagcttggttaatcagaaaagcactgcctactttgtcattctttttgtcaaactgtgaagttttctgaaggtagcgactgttccttattcttttttatctcttcagtttctgctatgaaacattggatagagtaatgagtgtcactgctggtgtcagttcctagatatagtctgtggtggattaaagatggttgtaaattctttactacatttctcattgagagaggaaatctatgtcctatcctcttggaaggctctgattattttacccatacgatactttggcagtgatagtgtgaccatttctggtccaaggctttgattggctttgattccatttcctgtttcttagaatactctctttgggaaccctgagctaccttatctgagccctctctgactatatcgaggcaccgtgctggagaagccatgtgtagattcagctgctcccatcttttcagccatctctgccaaggttttagacacgatggtaaagcaaggttggatggtctagactagctcctacaccagctgcgtgccttttagggaaagtgaccttcactgacaccatgtagaacagaagaattgcctagataaacccttctctccaattccacaaagtcatgagatgtaacgtaagcgttattgttttaagacactgttttggagcagtttgttagtgtgataataagagatccataacacaggctaagttctggagagaaaagtagatggtggcaactggaaggaaacttggagaacatcttatttaaccacatccatttatagggaaaaactgttttccagagagatgaagtggcatgctcaaggtcatctagatggctatggtcactgttaggactcttatctgactttgttgcccttgcctttagaacatcctgtaagatcgttgaattttttactttaaaactagtaagcgaagaccaataaatatagcctagagacacctgaagacctcctaccatgccagaaagaactttgcagtctcaaaaataccaggttccaggaataccctgcccaacaattttgtcctatgtaaacgattataaaaagttacattccagtgtaattgtacatttaatttaacattcaaatatagtaaaagatactagaaaaataatcatgtgcacagatgtatgctatcatatgtaaacaatcacaacatttaggcaatttgtatgccaaaaattctgtggtaaatttgggagcttggaatgcattttcccatagaaacaatgctattcaaaattcaatttaatacctaacatacctaaagtatagtacttgaagttatcaccataattatcagatttctttgaggaaatgctttctgaatgccaacttgttatctacggacccatcagtccaacccttccctttatttggctttggcagaaggacttcctgtttgttgagcaatggaggatagcaccgtatatcttgctctcaggaccagcttgcagaagatgtcttcttaggcttcaggatgaagggagagaaggttctagggtctcaatgcagtgagagaatgtcctctgcttggtgaagaaacagcatggttcaggacttcttgttggttaaatttcttagttcaagtcagctcttggtgattcccctccgctccctattttaagtatcctagggactggtttacttgctttcctttctatctgcccaacagcttcctctttccaaggtatcaattttgaaactcattagagaacaggatgaagtatttccatttttccctatgttcctgtttctaaaactaagaaagtgtttttattttttgcttctctttccttgtctcctcccacttctcctcctccttcttcctctctctcactcctttcttccttctgtctccctctcctcctcctcctgtccttgcatccctccctccattctttttctccctgcctttcttcttctctacccattgtcttatttttcttaaaatcaacccagcttctttaatggttcgagaattgttagctagtatagttaattaaattcctcagtttatttttagatttagggaaagtgagtggcattgctctgtatctttgttgcttgtataaataagacaaattgtaagtgttcctactagattataggcatttgaaaggaggggctacatctaatttttctttataatccctatcacataattttgaaatgcttagcagtatttattgtgcaaattaaatattatagctacagcttctttttattaatatatatctgcactatgaaagagggtgaaatgcactgaaaattattttgacatcctgtaaatccttgcacattgcctgtgtttctagtttgtatattgtatatggtaagtgtatgtgaggttataaagtcaaattttgctgttgattttctcttttagctttatttttcacttttactgatcgtgtttcactgaattcactttcactgatattcatgatgctgaggaattttcttcttgggatacaaccaaacagtggaactgtgtaatgttatggattgatgtggtcaattaactagtcataaataggatatctgacatttaatccttccgttccttagagttagattaaataaatgaaggttttgtagattatttcaaggattaaagactagatctaggaatcattttttttttaaagctggttttttgatgacaaatgaactatagttctttactcaaacagaatcatttgcacagtgagtgacggttccagctttccccaaggataagacaaaaattgtggtgaaaaagttcaaggtaatgtttgagtttattgtttgcttgagcctgatttgaagtgtaaaaataagatgctaacaagtcccaagttgaagaacatattattccacaaaatgttttctttgtgtatttatcagtattttactgtagccattctaaactatttgctatttttatcttcttagaccaaatgtactttaagtaattcctcaagtcatcaagagggaaaacacagctatgagagaatcctacatagtaattttaaaataagattagaataacatgtaaggaaactttttaaaaaggactttggtttttagtcctttctctctctgtcctttatttttgagaaagctggcatcttaatgacttgagggataattacttgtttctcatgttagggttcaggattgctctgattttccttggtgcacaaatattttaggaacaatatttcaaaagacaaaacaacccttactgctttattgatgcttggttcatttctgttacgtatttaaaaagtagctggttatgttacttctatcactgtatggtcacttgtgtttgggaaagacttatttgtgattgtatgttaagcagaatgcctacagtatattctaagttgggggttcacgtttaagtacaaatatagaattcagtctgtgtttctatctctttgtttttgacggagtctccctctgtcatcaggctggagtgcagcggtgcaatctcggttcgctgcaacctctgcctcctgggttcaagcgattctcctgcctcagccttccgagtggctgggactacaggcgcatgccaccaagcacagctagtttttgtatttttagtagagacagggtttcaccatgttggccaggatggtctcgatctcctgatcttgtcattcgcccgccttggcctcccaaagtgctgggattacaggcttgagcctctgggtctggtcccattgagcaaattctaattagattcatgatcttatttctgcactattgcaatagtctctaagtgccaccaactgttctgccagatcatacccgtctcttcttcttctgttattgctagagtgctgtctataaaaactcaaatctgaacctgatattcatctatgaaagtcatagctgagggacatcttaatgacattaattcttgaatggctccccactgcctgtagaatagaacctaagctctttactgtttcttacaaaaccctctgtgatctgactcctgatagccttcccctggcctctgtttcatcctactccacatcttacttccccgtcaggcttagtttgctgtcccagagtgaattaccccttttcctagatagcatttcctaatgtcctcaagaaaaacaaatcacatactccttaggcctcactgtgtccattgtgtttgtttgttttcatagcatgtataacatctgtgccccaatagttttttatatctgcttttgtctgccactagacactcagattgttgagaatagggattgtgtcttacccattgttagcgctgagcctttggcacagtaaacctttaaaaagttggatgaaagcatgagtaggcttaccaaactgaaaattcttaatgtccatttgactacataaacattggtttattgcaaaatcctttgcatgctctcaagtatttgatcatctggattattttattcttcctttgatttatctaataaacacatgttttcttccctctaaatacagatactgagctgggcactggtgaatgaaacagacatggacctattaatgggtctaatattgtctgatttaaagggcaaaaccagggtctaatattgtctgttaaagggcaaaaccattttcatgaagaacctttagctgagttatggcagaaacagactttgatgtttactgtaaagtctgaccttgaagaactacagggatacacttttctttgcctcttcttgaaatgctgtttttatttttgtcaatttccttttgttataaaagtttaaaggaaaatatttagtgggtaagttaaaatgtgtacacgatacttatggtaaaaaatgtctagccatagaatcacttatgaagaggtttaggaagaaatggattacatctttctgctcttaaatgtggcgacttccattaacaccctggagcttgtcaagttatgggtgagtccaaagttctctgtgcacctgtggtagataatgagcattatttaaaaatttctgagtaaataattacatacaacctctgtactttataagacagaatataggggaaagcatcctggaggaagaggccagaaacgtaactctacgcatggctttgacagtcatcaacagacactttacatgtttcttcatcagtaatatacatatgatagccattccatttatctcacagagtatcatgaagattaaatatgaaaatagccatgtggatgcatcaaattattttgtttcaaaataatgcttgcttaagtagtccagaaataagtcttataaaaatgagggaaagcctcttttgtcttcctgcatccagggcaaatactgccaaaggaggtaacccttttttttgttgagcagagggttttcatcaatattcatctactgtgttgtgagtcagcacaagatagactttttttttttattagacagactgtaacaggatactttagatgctatctactgatggaagctgaagatttttagtttttgaatagactccccttctcccctactgacaatatggtcacatcaaaattttttgttaattctgttaatatgactatgtaaatatcattcagtactgcataatgtgttatgattatgctcttttgttgtgaaaacattctgtttttcctgtagttaataattgctttgttgttccatttgcttcattttctttgattctatttccaaatttattctcctctcccaagaaacgtaaaacagtcttaacataaacttccaagtggccaactgtgcagggactctgttagttctgtccttcacctgaaggcatccctcctggaaatttccattcttctgcctctgttctgcccctgccgagagacgttgctctctagggctgccacggtactgtcctcaccttgggattttgctttgcctttgttctgggaattccttttttctctctcctgtattggattccctgtttccagggtctcatgatttcttccttttcctctttttgtggtggtgtacctaactgggggaaggaggagtaatttttctgagtctttattggtctgaaaatgcctttatattaagtttacaactcagaaatacttttgctgaatatagaattctagtcattttttgctcaaggcattttaaaattgtcttttatttatatactgttaagagttccaattcattctcaattccagcttgccatcttgaatctttaaatcctatgaaaacatattcattcatttatttacttgattttatttttttagtagtcagaatgtatatatagtttaataatatttaaaatacattaaaattattcactgaaaagtcttgctcctgttctcatatttatcagcacgtgtcacctccctcaatacctacagggatttgcctccattaatgtcttttatacatccccatgtacttacttatgtaaatataaataattgtagttataggtttattataagcatattctatttgctttgccttttggcttaatggtttcttggtgcctttacaggaaagcactttaagaagtacagaccgctatgtaacataaagtaatttgtattaactcataatttaggatgggtttttgcacacttgcaactacatgttgattaaacaaaaggcttatcatggggaatgacaaagatgggaataactgatcagaaaggtaagggcatggaggcagagttgaaatgctttgagaaaagcagagcaatattaaaaggaaataagagacatggaggtggttatgtagaacaactttcataaactgaggagtatttccacatttgaaaaaaattgttggtatgatagagtgctttactctatgtggagcacatacaaagtaagcagagagagaagtcttacaatgtcattagtcatgattctcttctttcagttttttagattgtgagtaggtttccatgcacatgaatgtcagacaatgaagaggaaggccatatgaatactatgtgtctagtggctgatgctggccacagacttggatcccagcctggtggtgcccaagaggtagggcctccatgtcagagctggcttgtttagggtggttcccaaaggtttcactgggtgtattagtcagttttcacactgctgataaagacatacccatgactcgctgggcatggtggctcacgcctgtaatcccagcactttgggaggttgaggcaggcggatcacaaggtcaggagatcgagaccatcttggctaacatggtgaaaccctgtctctactaaaaatacaaaaaattaacctggcgtgatgataggcacctgtagtcccagctacttggaaggctgaggcgggagaatggcgtgaacccgggaggcggagcttgcagtgagccgagatggtgccactgcactccagcctgggagacagagtgagactccatctgaaacaaaacaaaacaaaacaaaaaaaaaacccatgactgggtaatttataaagaaaaagaggtttaatagattcacacttccacgtggctagagaggcctcgcaatcatggtggaaggtaaaaggcacatcttacatggtggcaggcaagagagaagtgagaaccaagcaaaaggggtttccccttataaaatcatcaggtctcatgagacttattcactaccacaagaacagtatggggaaaactgcccccatgattcaattatctcccactgggtccctcccacaacacaagggaattatggtagctacaattcaagatgagatttgggtggggacaatgcaaaaccatatcactgggatcagtagtctatgaagcaggctctgggtcaagtttaccaagtgtgtcagctcagcctcccagagcaatagatactgctttggacaaggcagtaggctcaagaaatagttcttgaggattagtgaggaatcatggggaagttaactgccctaaggcctttggaaaccaatggccctcagaccaacaaccctgggaattagagaagatcaggtctccctagacctgtactctgaaaattagcaaattaacagaatgatattgtaggatgcagttggacctgaacagaatagccttttcccttgacctcatttattgaagaacacagtactattaaggcaccctgggcctgagggtctattataggcatactctaattacaggcacctctacatgaggtgttattggttgggggatagaaagagaatagcaatttttctttttgaccttcaagattttgtcactcagtaaacacttttaatgtaatgttttggtcaaaaccccttacttaatggactgaagtggaaggtacttctgtggtatgatgacaatagaaacaaaagctagtctaatcttcctgtgtgctctttctccttccctagtcttagaaagtctttatattctacacaaatgattgatgtggaagagtatttctaactgccaatttatctatttaactgttgttttgagaggaaagctcagttaaatacacagacagaatttctgtgcataatctccaatcagctttatattagaactgaaaacagtttcttagtgctaacagacattcattaggccaaataattttgctgtgttaacaaactgtataatcaatttaggattgcagccaagtattagcatgttattccacatgtgacttagctgttttcaaaataaatcaagtggcagctttgcaaacatgatttagaatagcgggaccagtgcagttgtatattcagagcattttaatatgaaaataatggagttaatattttctattcaaataatgaagaaaatgattgtatcttatttatgaaaatttaaaaaggtgaaaccacttgtacaaagcactatcaaagtgatttcaaccataggtttagatgaaatgatagtgcggaagagacatgattaggcttgtagaattcctccagtgtcagggtgctatgtgctgtatataaagcataaactgaatatcaatttgtgtaggattataatctgaataatggcttcattgtttccttcccccaaactattgaacttgctttatttgagtgtggcataaggtcatgaaatttatttgtttattttatatcagaattgaattgatacatccacgtaagtatgttctcattcacggtactcactgggagataactttaattctactgttatagttactgctcagtaattttgagacaactaacttttttttcattatttataactatcttttaagcattcccattggtgactggtcttaattccttgacagtatctgcttttgagaatgagcaaaaagttgtttagagccaattctaggaaatgaagtaaaacactcaaactagagaatatatgaagaaagtaatgaggctctgagttccttatgtgacctggacacatttattccttaggaaaaatatgaaaattgcttgtggagggttatggtatggactgaatgtatggttcccactgcctgcaaattcatatgtggaaattaccctatgtgatggcattaggatgtggggcctttggaggtaaggaaggtggagccctcatgaacaggcttagtgcccctataaaagggacctgagagctagctagctctcattcaccatgtaaagactcagtgaaaagttggctgtctgtaacccagatgagggttctcaccagaactcgacaatgctggcaccctgatttcggacttccagccttcagaactgtgagaaagaaacttttgttgcttataagccacccagtctgtagtgctttgttatagtggtccaagtgaagtaagacaaggttattcttggaataagagttctgtggttaggatctttgacccctccaaacctcatgttgaaatttgatccccattggtggagatggggcctacttctgtttgggccatgggactgaagtccccatgaatagattaatgcccttcttgagtgggaggcaaattagttgtctctccatgagctctggacagagctggttgtaaaaagagcctgacacctcctttctctctcttgcttcctctcttgccatgtgatctgtgcacatgctggctcccctttgccttccaccattagtggaagcagcctggggctttcaccagatgcctaatcttccagccagcagaattgtgagtcaaataaaccatttttccttataaattactcagtcttgggtattcctttgtaacaacatatatggactaagacaaaggatataggatatcaaaactttttctgtgacattgcctgtgaaactgcaaagtagagcttataggattttgtaaaaggataaataaagtattattgtagttgtaatttaaatgcattcacataggacagtttcttgaaagcaaaaatataataattataaacctttatccataagagttgaatactaatcttatattttaacttttctaaaatgtctgtaaatgtacacattgactacaagagtactctatgtactgtgatatgtacattcaacctacaaaaaatacaatcctacctcatcaaagttacttgcaactaatatgctggatttataaccataactaccattaaatgaatgttatccaaaagcaatttttggaattctttctccgaattgggaattttaataaaggtgtcttggaggtttaaacagaagtcatctttttctcaaaatagccttccctgcagcaagctgagtatttaaaactattgcattgattttagaacgatgttacttaaaattgcttgcaggttcttcctatttatgccagaaaataatggtctctcttttgttaataaactgtcaaatagatacaggtggctaaaaatgaaaatacaggctgattttaaacaattgagaatgaggctcaacataaggaggtctacctgaataacttctgagacaatcacttttgaagatttcactcacttgctgcatatatatgtcctggcatatttgttaaataagcataattattgcatagttacacatcataaatatttgaacttgaggtaaaaaaaattcatattttcctatagttacggttaagagtacttttctctctccacctacgtatgactctataatgatgtccacatttgctttctcgatgtttctgctgtgaccactggcagaaacagcatagcctaccagatggtccgttgatttaagtagagaaattctttggcccttatttaattcagttgttctactcaatctgctcaggagagtctaatgagagaacataaggctgctgctgttaagatgaggtacattggcaacatttctgcatttctttcccacccttggctgggcaatattgttagttttcttatctttatgaaaccatcaaatgaatcatttaaataataaaaaggttttcatgtgacataatattttaaagaggagttctaggtttaaatcctgtttcctatagagagttttagaagattggaaacacatttatctgttaacagttgacaagaagttgattatctcatttagcttgagaaatgttttgatgaccaccatgcttccaatgtggaaagataggaaagggtagttgggaagtcctgaaggaatgcagtcctttagaaccacatgtttatttcagaaattatcatggcaaacactgcctttgaaaagatccttccagtgctcacctccttttaatgtggaccacagtgacgccatttcaccccgtctttcatgtgatgttttacttctgtgagaaaagctttatgtccagtgcacttttctttcccgttggttttgatatcaagaatgacaaaattcttggggagataatcctaaatgtcagttttcgattagtaagcctagcagatcttgcattggaaaaaataaaaatgggtgaagatctttgccttaaattctttattggagtttaaagtaattgatggcctgactccctccttccttcctttccttattggcagtaatattatttgttagtatgtagtatgaaaattggtagatataagcaatatgacattattaaagacaattcctacattaaagaagacaatgactgtagagacatgggggttcagcatgtttaggggctacattgttccaataaactgcattttaaaacaaattattaactgaaagacaacttccttaggcagaggaactatcttgaacaaagtaattcaccttagataatgaacatccagcacagtgcctgagacataaaggatgttgattactgaggggctctgtatttaaggatgtcttcacttgacccctactcttgcttaatcacttgcttgtgtatagaattctaaagtcaactttgaagacattgatccattgtcatctgtcatccagttttgcaaatgaaagtttttttgccagtctgatttcttgttatttaaataagacttttttgttttgattcgttgttggtttttaactttctctctggaaactgtgcagtttttctcttattgttgctattatgatagttcattaaaatatgttaaaaaattgtctttaaaaaataactatttctgctctgtacttaataggctcatttaatctcatgcctacggtcttttattcagcaaagagaaaattatgtgtttcattattttctttcttctgttttctccttctgggtccaaattttgccaagcattatgtcagccttgtggttttcagcaagttaacctctaacatctttgatcatcaattgcattattataaagtggaaattataatccccagtaggccagtacccagtatggtaattattctttctccttcagatgtcttgcttctctaagcttatcattttgatcaagggatttgaatctaaatatagacttctggctcttaaagtgatgtctaggctgtttttagcatgaaggttattgggcatgactctggtcttcctcaaggtagcactggctcatttctgaaagctccaacactgtagcctgtgttttgtggcaaatgcagagatcagcacatagaaacgagtcaaagcatatatggaaaggggacacataatgttaaataacaaggaaactcttggagtttgttttaaggtagaagtctataaaagacaacagggggatctatagtatttttatgtgggttcatctgatgaatggctgccacatttatcttcccagaagaacagctctcatcatgtcatattctttgttaaaaatcttaactggatccccactgcctacaaaattaccatcagattcctcagcttaatttttgagttgtccaggaaagattaactccaatgcaactttctactatcatatcccactattctctatatattccttcactcaaatccaaatatgttactctatgcttcccagatctatcccatgctctttccttggattccttcacttcctcccatttataccgggacattcttctcttttaaggttcaacttcatgacctcttcctttaaaaaacctttgccaatctctataactcgaggttctatttctatgtatgccccaaagcacatgttgtgtgcatctcttatgtgtaacatactgcactgaaatgacttaaggcataatctatgtcatgttcatctgtgatctactaaggtctaacagtacttcacttataatctgtgctcagtaaatatggttgactaagtgactggatgcattgtagtcatgctgcattataatgttttatattgagaaaataaatttggaggttgttttgtttttgtttttaaaaagagctgactggtgaccaaaactgtgctttgttgactacattgactttacaggtttttatattatctatatgatcacttcttaatatttatttattttttcagctttattgaggtataaatgacaagtagaaattgcatatatttaaggcatacaatgtgatgttttgatatatgtatatattgtgacatgattaacatgactaagctaatcccatcatatagttatcatttttttggtatggtaaatatccttaaaatctactttcttagcaaatttcaagtatgggtttccacaaatagtgataaacacttgctaatgacacaggagtattgtcagatatttgggaaatagttattcagctttcagtctatttcctgtcagaagtttatataaagaaaaatgaaaatcaaatataatgctgcttgtaactgaaaacattgtgcatttaaatgaaattttttgtaccatttagcttgttttgctcttgaacattatttgaaaataaaccaacttattacttgggattgatggtagtaagtgtgctgagtgttgagatttatttcaaaatgcatggccaggtgcaatggttcacacctgtaatcccagcactttgggagtccaaggtgggcagatcacctgaggtcaggagttcgagaccagcctggccgacatggcaaaaccccatctctactaaaaaaaaaaaaaaaaaaaaaaaaaaaaaaaaaaaaaaaaaagccaggcatggtggtatgaaggggctgaggcaggagaatcacttgaacccaaaaggaggaagttgcagttgagccaagaccacaccactgcactctagcctaggtaacagagtgagactccatctcaaaaaaaccacaaaaacaaaaacatataaaacaaccccaaatgcattctctcttctagttcttttccactgatgaaatcaaagatactgaacaatccaatctttaaattggagaattccttgtaaggaaatgtgtaacttttataaaggtactagcagtttcttgataaatataagaaagagtagaacaagacattgtatggtggtttgttatgtgtgatttataatatttggggaagaccagccataattttgtgtctttagtcagtagaatgacattgatttgtggcaagtcaacatattcctttgtatttttgcaatggtgatatttaggagaacagtacttaagtctcctgaaaagtattttttttttttacatcgtagggacttattcttagccacacatctcctaaatatttaaatattttagttttgttcaggaaatgaaactgttttcaagtgtatattaatggttttttcttcttataaatggaaaagtacttaaagataattttgtttaaaaacctcattttgcagataggaagataaaactgaattttattgggctgaatacagattttcatttaaaataaatataggatagaaattgaaattgggttaaactatagccaataaattgaattaattgcaatgctggcctggtgcggtggttcacgcctgtaatcctagcactttgggaggctgaggcaggtggattacctgagctcaggagttcaagaccagcctaggtaacatggtgaaaccctgtctctactaaaatacaaaaaaaaaaaaaaaaaaaaaaaaaaaaaatagccaggctggtggtggatgcctatagtcccagcttggaagactgaggcaggagaattgcttgaacctgcgaggtagaagttgcagtgagctgagatcgagccactgcactccagcctgggtgacaaagcaagactctgtctccaaaaaaaaaaagcaatgcattctaaattctgcataataatataggattttattataatgcctaagtgcatatgaggtcacctaattgtgtcaagaagacaaaataagtattttcagcaccaggaaaggagactccctcaagtaagaaaagtccaatttcatcgaacttttccgcaatgtttacagtcagaaaatctatgaagaaatgatttctattttaatgtaagaatgagtatgatattttacaatttcagatgttttatcttatattcttttactatttgtcccaccagttttatgtttcttatttttgctttcttgcctttttttgactaatcaagtattttaaaactattttattattttactctattaccttgtagttatacactattttactggattttttttggtagttactccagatattgtaatgtgcatccttgattcattgaaatgatattgttaacactacttaaatctgttcattcactttctacccttaatgttaatattgtcatgttttttaattctacatagatcttctacgtcacaggacattaatatgtccactcaatattcactttgaattagcagtatatttacttttttcactgttctacctcccccctaacttctttttacaactgttgattctctctaccttttactctcctttttttttctttctttgaggttaattttcttctacctgaatatttctctttaatgtttattttagtgctattctgctagtgacaaattatctccagttttctttgtatggaaatggttttaatgtaagagggccatagggagaacagtgatatttagtgataaacagggttaaattagaatgaagggaaagttgagagaagaggttgaattttgtgggattttgttcctgattaactgtgagattcagaagcatagtaaaagaattttagtagctggggaagtgtggatggtgaagtaaaataagccaatggactgctcttcagtagagagtctggggcctgagaatggatgacctgggagttctggacctgtggtgactgacataaatggggaagggagagggcataaagacatttgtgttcaaggactcaagacaagcaatcacagggaaactgtaaagaggaaactgtttctaccaccatactaacttctgtgttctcctcttagctatttccatgacggtgtggagaccagggaagatattaggttatggagacctgaaggttccacttcattcttagggagtgaactgtaagagctgaaaataggccgggtgcggtggctcacgcctgtaatcccagcactttgggaggccgaggcgagtggatcacgcagtcaggagttcaggaccagcctggccaagatggcgaaaccccgtctctactaaaaatacgaaaattagccaggcatggtggcgggtgactgtaatcccagctactcgggaggctgaggcagagaattgcctgaacctgggaggcagaggctgcagtgagccgagattgcactactgcactccagcctgggcaacagagcgagactccttctcaaaaaaaaaaaaaaataataaataaataaataaataagagctgaaaataaatggattgatttgggagatgcttaggaagtaaaattagcagaacttggtgacagagtggatatggatatgggatgtgaatagagggaaatgtcaaaaatgactcccagatttctggtttatgcaacttgatgtatatggtggccattcactgaactagaaatgctggatggaggaagactaggtttgggtggcaaatggtgacaccatcagtttggcttagactttttgagtttgaattgcatgtgagtcatccaaatggggatatcaaatagccaattaaatatatgagtctattgctgtgcagagatatctgggcagaagataaaaatttgggaacatctttctataaattgttaattgaagtcttgggtctgaataagctggacaaaagagagtcaacagagagaggccagtcaagaatgccaatatgatgctgaaggacaagtagaatgaagacaagggtccttaaaattgaggagtttattggtaaaagataatttagctggagggaaagtttagtgtcttttttctttaaatcaaggggcttgaatatgtataaaagccagtgagaggaatctggttgagaaaagttaactatccaggaaagagaagagatcataatatagaacttctaagaagctgggaaggaaataggcatatattatttccccttgctgctgtaacaaattacaacaaatttggtgacttaaaacaacacatatttatctcagagttttggaggacagaaatttgaagtcagttcactgggctgaaatccagatctcagcggggcttcatttgttctggtgggtttgggtggcagggcaggtgtggagatccgtttccttttcttgtccagcatctagaagctgcctgcatttgttggctgttggtcctgaatcgctttgactcctggtttggtttttgcctttctttttctctctctgttttcacggaaacattagcttctctcactctgatcctcctctttctctctcttttaaggacccttgtgactacgttggaaccccctgtataattcagggtaatcttccctgatcaggaccattaacataatcacatgtgcaaaatcccttttacaatgtaagattacatattcacagcttccaggaattaggacactgacatggggtgaaggcgggggaattattcagcttcctacaaagaccaagcacagttagaagggcaggccctaaaggaaagaagggaaaatttcctaatttaattgaagagaaagaaggtagaaaatagaaatatgggtggtttgtatatgtcatagtggaaatacaatgtatttcctatttcactaaagtagaggttgtttcacttgtttgagggaagaggcactggtagtagatccgtagaagaaagtgtcatcctaacaactagagcatgttttcacttcgctaatagaacagcctgctgtgtgccaggagcccaatgggtagagggatataaagatatccagcacagggtgattattacctttctgtcactgggagttttcaaagcatgttaaatatacatttcactggaaaagtttagtaagtattcctgggtgctgagttacaaaagatgacttcattgacagttctaatatttgctaattgtgtaagtaatgcatactttctaaatagaatgcacttttttttttttttcttcctgagatggagtcttgctctgttgcccaagctggagtgcagtggcacaatcttggctcactgcaacctccacctctcgggttcaagcgattctcctgcctcagcctcctgagtaattgggattgcaggtgcacaccaccacacctggctaattttgtatttttagtagaaatgggatttcaccatgttgcccaggctggtctcgaactcctgacctcaagttatacacccaccttggcctcccaaagtgctgggattacaggcatgagccaccgcgcccagcctagaatacactctaaagaaatgtatcataaggctgggcatggtggctcacgcctgtagtcccagcactttgggaagctgaggcaggcaaatcacctgaggtcaggagttcgagaccagcctggccaacatggcaaaaccccgtctctactaaaaatgcaaaaattagcccggtgtggttgggcacctgtaatcccagctagttgggaggctgaggcaggagaatcacttgaacccgggaggcagaggttgcagtgaggcgagaccacgccactgcactccagcctgggcgacagagcaagactctgtctcaaaaaaaaaaaaaaaatgtatcatagaatgctactagaaataattgatcagaagtaaagatatagtaagaattcttaagaagtttttccagatatttgtgtagtcagagctcatggcactctattaagtacttgccctttaacttgagtaatctgatagctttttaaaatttaatttttccactgatagtaaaggaattataaaaattataagaatgaaaatagatacattaaaaataaccactttatgatctcctctgttctcttgttttccttcctagagatcaagattgttaaaaatttggcatagattcgtggaggtccttttctatgggcttacctatgctcatgtgtatagctggtcctccaataaggtcattttcttcaacatcatttttatctaacatggttgaggaaaaaaaaaatctattccgggattaggccactgtctgtgtgaagtgtgcactttctctgtatgtctatgtgggttctctccagagactcatttccccccacttcccaaagatgtgcaggtcaggttaattttgatgtctaaatggtcccagtgtgagtaagtgtgtgtgtgtgtgtgtgtgtgtgtgtgtgtgtgtgcaagtgtgccctgtaataaaatgaggtcctggccagggtaggttcccaccttgagccctgagctgccaggataggctctggccacctgtgaccctgaactggaataagcagataaatcattaaatcattatctcacttgtttttactcatctttcttaaatgtatatatagctcaaatttatttcagtgtttaatatcagaagtgttttgggtctttatttagaagtttggtgatgtttttatgaccagaaatgtgccataggaccttaacttatgtattttatcatttagcccatggtgaaactggtttaaatctttattatgtcttttggcttaaagtcacggtttctaagaaatgattgacaatgttaagtaaggatttactatttatatagaagtataggatattttattgtttttacacaaatggggtcatactaagtaatattgtataatttgtttttttttaaattggacactgtgttttaacagttcttcgttagtccatactttagttctcttaattcctacccagtattccacagtctgaatatattacattttattcatatgtgaccatttccagtatatatggtgtttccacattttctcttgtaaacagcgatgcagtgaactcttccagatacttttctaatcatttatgctccttagtctatagagaaccagaaaaggagtgcctatgtcaagggcatggcttctcaagatttttacaggtgctgccaaatttccttccgtaacatctgttcccatctatatgctttttatcagtattagagaataccactctctcacttgacacttgtaccagcctttggctttatcagtcatttacatttttgtccaactcatgaagatgccttatgttaatgtatgtttctcgtatcactgatgagattatctttttaagtgtttatgtccagtggtatattgtgtgtgtgtgtgtgtgtgtgtgtgtgtgcgcgcgaattgtcttttcgttccttttttttgttcatttttcttttgggtttttttaaacttttcatttttaaagaatgctttctgtatttggattattagtttattcttaaatatattgcatatatacttactcaatatgtgttttgtatttgaattttatttgtggagtcttctatagcattaaaatatttatgagtcaaaattgtttttgtaattccttttaggccttactttggaagacttttcatattacaagattattaaagcattctttttttcttttttttttagacagagtcttgctctgttgcccaggctggagtgcagtggcacgatcttggctcactacaactgccacctcccaggttcaagcaattcccctgcctcagcctcctgggtagctggaattacaggtgcacaccactaagcccagctcatttttgtatttttagtagatacagggtttcaccatgttggtcaggctagtcttgaactcctgacctcgtgatctgcccgcctccacctccaaaagtgctgtgattataggcgtgagccaccacgcccggccattaaagcattcttgagttatttcttctaacatatttataaactaattaattttttagaatttctttttagttgtctaatgttacagtctattttagagtatggtgttaggtaaaaaaatctatattttgtttactcgggtatagttagtctttttagaaagtcttattctttattgattttcagtggcatctgttgcatgcatgcacacacgaacacacgagtctgtcagcacctttttaaaaattggctaactacagttttattatatattagtgtattagtccattctcacactgctataaagaactaccaaagactgtgtaatttataaagaaaagaggtttgattgactcacagttcaactggctgtacaggaggcatggctgaggaggcttcaggaaacttaaaatcacggcagaagggtgaaggggaagcaagcatgtcttcacatgatggcaggagagagagagttgaaggggaagtgctacacactttcaaacaaccagatctcatgagaactcactatcacaagaacagcaagggggaaattcgccctgttcataccagatccctccccaaccattgggtattacaattcaacatgagaattgggtggggacatagagccaaaccgtatcaattaggtacaccaggtatgtgaagatccccctcattgatcttgtttgtctgcctttcttggctacaattgtacattttcttaactttgaaatagtttggctagcactgaaatgatctgttccttaaaggttatatagaatttttttgtaaatcaaaccgtctaggatttggccacaatttttagcagtatctctttgacaactgtctttcttctatagcaattaatttctttgaattttatggagtcaatttgtataaattatattgtccagagaataatctatttcattatgtttttttgcataaaattgggggaagtagtctcttatgattcttatcatttctctggtattatttcttattttgtatattttggtaccttctccctttttccccctagatttgtttcagtatttatctgttttattgttttccccaaagaccagattcagaacttattagttttatcattttacctttttttttcaagttttaatttctacttttatatttattagtttattctttctgatttccttaggtttaatttaataatttttttaaaattttgggatgttagtaaatttatttttgtttaatatacctgtatttaagcttatgaattagagtctgagaattgttttagcagtatgagatatgatatatagtgtttattatatttattattattacatagacattttacactttcaattttcattgttttctttgccagaagagttatttgaagagtcttaaaattttcagatgctaggagcttcttaaccccagattgattagtgatttttccttttactgtattgtgattagtaactattatctgtattctggaatttactggggttttatctttgatgtccaatgtgatcaagtttttttttaaaccaatttcttaaacagaagggatattctctgatttcaccttaaagttaaatatatggcaattaaatctattttattatgttaccctatttatatattttatatttatacctactttttaattctcttgttattcaggctttgagaaggttggataacagtcaattaatagtatgtttccatctgattatctttatacctattttagagtttgctttacaaatgtgtactatatgacaccgagacgtttataatcattttatttttactgtgaattacaccatttagcattatagtgttttcttccttgctcctttcttcctttttatttttatttgtcctatttgcttttgcctattcttatgaacaggcaacttgatgaaacacttggttatagagggttctctttcccatagaatagagcagaatctgtcttatgattcaactgaatgtttttctttcaataggtgagtttagctctgcaacatctctgagataacataaaagtttagcattagtactgttattttatgttttccaatttatagatttttgaaaaaaattcacaagatgttctgctttcttagctttgtgtttgctctttttattagaaaagtttatatttctgttatgattataaatgtaactgtaggaaagttcttaatcctcttatttccttaaaaatgatctattattcctttctgcagatgtttcctcttcatcctcccttttctaccagctgaccttagcattataaaataaattacttagaattctcctatgatttatcagtttaaaatatctttttgatcttagttagcaaagcagtcagtttatatagtatatactgcataccatgtccttgctccctcagctttcatctttttgaaaaattttatcattcatattttcatattgaaatttcataacgattcttaaattgttatggctcatattacttacgttttattatagcaacataatcacatacatgattggaatttagtaccatgattgatttcagtgtttatttcagttatttcactcaggtttttacaatcacttggatgactaaaatttatcttctagtaaattcctcaagaagatcctatgaaaacaagattttatatatttgtaatatgttcaaaattttgaacattgtccgttgcctttataattaatgagtttgattgaatttaaaaatctcatttgtattttcttttttcaaggatttcatgcacattactgcatccagtggtgtatctagagggcagtggtgtccactgaatctgactgttgaatgttgctgtggagagatttgacaacagactgattcctgccttaaaacaagctactagaaaacttttgccttgctgttcaaaatgtttcagtaattttactaggaagtgtcttagtgttgactgtttctctggggaactatgtgactttcactgagttttttttttttttcttcattttgagatagggtctccctctgttccccaggctggagttcagtggagtgcagcctcaaactcctgggctcaagcaatcctcctggcttagcctcttgaatagatggaactacaggtgctcaccaccacacctggccgtatttttttattttttgtagagagacagggtcttgctctgttgtccaggctgatctcaaattccttgacctcaagccatcctcctgtctcagcctcccaaatggctgggattacaggcataagccaccatgcctaacgatcaataagttttgactacaaaaaagtcttatattttatttattcttttctgctgttttggttttcttctgtgcggatttcattttctgtctaatgtttcttaaatttaagataatttttctggctgggcatggtggctcacatctgtaatcccagcactttgggaggccaaggtgggcggatcaggtcgaaagattgagaccatcctggccaacgtggtgaaccccgtctctactaaaaatacaaaaattagctgggcatggtagtgcatgcctgtagtcccagctactcgggaggctgaggcaggagaatcacttgaacccgggaggcggaggttgcagtgagctgagatcgcaccattgcattccagcctgggtgacagtgtgaggctccgtctcaaaaaaaaaaaaaaaaaagataatttttcctctcaatttggttacttcactgttagagtggaggggaaaaaatggctagtggtggatcagatcagctcatcaactgtaaagactgactctatgtcatttacttaaggaagtgaaaattcatagtagagtatgatgagctggtaaaaccagagtttctgaatttacctctgaagatctaggctacatatttattgctgcaacaatctatgttaagaattttcttctcaatattcatggccaacatctggcttctaaaggaaaggcttttggtcttttcaatcacttgctgatagggtgagactgcattgttacccataaccacatgacctaatttagaatcaatcttggcatccagtcttgcatttctaatcaaatttacaatccacctttcagcttcttctggagtcatgttcaatttatctgccaacatgttaatgctgatacactggtggatgcgacagaaagtctcaaatatgaagagacgggcatgaatattgagaagaaacttaattagaatagcaggtcagaggctcctaactgggcaactcaagattctggcttctactgaagaaccataaagaaaagatgaaaaaaaaactattaaagaaagatgaaataataaaactattatataaagggtgacttacattttggaaacaacatattacgtataaattttgaagaattggaataaaattgattcatttaaaaaaaagaattttctgagactggtgttctcaagacaacatttagatttagtgttcacactagtggtcactaatagagctgtgtcagatagtgaaagaatatctacattttcctgtaaagaagactttgtgcttttgttcagaaaaaaatcataaggctaacaattgttaagatgagaaaggaggcttgtccactatgtaaccggagtgactagtctttccacattgattgtatgtgaacataaggcctactgtgtacaaagaacactctgctaggtattctgggagaagcagagaaactaagagactcagtcctaaccttaaggattatatttgtgttgagtggaaaaagtagagcctgttgaaggatttataagttatcaaaacaatgcattagtaagtctcaggcaagaaaggagaaatggaaaagtttaagtcctaaaaaaaattacaaaacagggagtgatatgatttatatggagggatggctgcttgatggaataaattttgatctatgtctttgagagagatgatgaacctagctaggcaatgagttatcccaagggggcacagcacaatagtgtgagatacagggaaagatgaaaggacagtgcaagttgtattttgtgtgaggcaggagattggctggattaaaaaagtatttgtaggacttgatattcaagaaacatctccttattgcttttttttctctgtataaagccactgggggctttatacagtcagatagacactgagatggtcagagagaagttagacatgccactgccctcaaggaacctccattctaaataatatagaatgcatccacataggagacagtagctgaagtttgaataaactggtgtatgagaaagaataaagtggtagtattgcaaggacaggtagggtttgaatctgtaaaatgagatgaaataatacttactttgcagggctgttagaataaaatgaaataacatatgcaaagtgcttaacacttaatgggcaattgatatgtgtttgtcatctttccttccttccccacctctcaattctgacataacttgtatataaaaaggagagatccttgaaagatgcacagaagtgaaattttcagaagaggtgtgactggccttgggccttcattgtggggcttaatgaactgaggaacattatgaacaaagaggtgggaatacagaacatgcttttgggagcttcgttgaagttgagtgggagaagagatttgaaagggggacttgaaacctagaggttggatggtacttttgtattagactggtgcaaatgtaattgcggttgttgtcattactttcaataataaaaaccccaattacttttgcaccaacctaatagcatttttcttctgcccagattccactttgtatactataataactgatggtttatgtgtcaccctgcatcagctgttttggtaaagaggagtcatgagttgattaactttgaattctccataataaacagcacagcactttacacatagtaaggtcttcaatacatatttataaagcaggttaatcaaacaaatgcttgggtacgtcaggaacaagggctgtatgaatgtgacattttatgctaatgtatcaagctatgtatttaataataaaatgtggaaacacatgttgtagagtggaatagtggggtgccttggagagagccagattacagttttctccctggcttagtggctatggactttgtgaacttggtcaagttcttttgcagtatgtgcttaaacccaagaccatttcttagctgcctgctcttctggccttaatttcctcatctattcaatagctagtaccttatagagttgtgagcattaagtgaaaactagctcagtgcctggcacataatgggtgctcacataaatattattgataatcacaataatagttatttttatttttcctaattgaaatattgatatgaaaatattttaagtgacacatttactcttgttctatccaattatcaaataaaattctaaataatgtacactgctattctgtaatattttattgttgactctgttgtgttaaaaacatcttataatgttagtttcgtttttggagataaaagaccaattctctgcagcgggagtttaaggagtgttttgttagtgtctgccttgggctcttccaggccttctgcaaacttgatttcctttgatcctcacagcagttctgaaagttttggtcatagttttttatcctcatttttgcaactgaagaaaattaagggtcaagtgacaaggttagtgagtggcaaagtcatttataataattaatgagaaaaaagaataggctgaagttaaatttggaatcagtgtctaaaataactaggaagtaagataaagcacagtcaatatgagcacctgcaaaggattacagaaaaatgagattccacctgtcttaagtatgcagggtgctatcttgttcagtctgctgactatgaaaagtatcggtaagcttcatttttcaaagacatttgcctttttgataacatagtcacaaaatgccaaattttgctcttcataattttccctgaaaatttagaaacttagttttccagtgttctgaagggatgacctatcacacacacgtaaacagctagtcatctattaagtgtttttaagcccttttagggcatgtatatattgcactgtaatctatacaggacctggatactgttttgaattgaagcgttcattttatacatagtgtttaacaggctttatggtgtgatacaaaacagcatttctaacttccccatcatctagacttcaaacctcagagtaaactttgagaccttgaccctgtgttcacatcagttttcaagttctgcatattcctcacctctattcacttttcaaagcaagtgccgtttccttcttgcagcctgccctgatcttacccctattgtgcagttgcttctaccttggtgcacccttgatacttagcatttaatcactgttagtctcaacttaccactgaatgggatattttaacttaaaaattaatatctctattccactatgagacagtgaccttaactgtcttaataatagtgtgttcctactgcctgatacagggtttggcaaatagtactttgcttgataatttagtgaaatgaattactttcattatgatggaaccccagtaaaatttttgagaccagagataacactttttttttttttttttttttttttagatggagtcttgctctgtcacccaggctggagtgcagtggcgcgatctcggctcactgcaacctccacctcccgggttcaagcaattctcctgcctctcagccttccgagtagctgggactacaggcacgtgccaccatgcctggctaattttttgtatttttagtagaggcagggtttcacagtgttagccaggatgcagagataacactttgtaatatttgaaggctaaattgagaaaagaagacagataaggccaaatattatgggtgatattcttgaaattatttgttaccatggtctttgttattgttggcttgctgaaaagtagctcaaggttagaacagaatcttttacttcacaaatgctaaccccccatcgctgtattagttggtatttgctttcttggtaattttcttttaaaagatcatgataaacctaactggataaggatcaaattaattaatgcctccaaaatagatctgtgactttttatattaagcgcattactgccactcccaactaccattctgagggatttttggttttgaaattcaaagcagggatccttggagttgtagtgtctcttttttcttttgaggaatatgagctcaccatgcatattaaactcacttatgtataaagcagtaaagtgaacactgcctagtagcagtcaagataacgaaatggaaagtttgtgtctgtgttgctgagtatcttccattttgccttgttactacaacaaccacattgtaatctggaaattaccagttcttctcccgctgaaggcagtgggtcaggattgaagagcattgagcagttcagtgaagcttgtccagatgtcagtccagaagagattttacaattgtaaaagctcagattagttttaacgttgcaatcctttttgtcatttttgagtgtttctttcattttttatttagacttcattgaaatttttcttgttagttatagatgttttccattgtaaacctcctccagcctccctcccctagaaacattagaataaacttttcagtttttatgagaagaaatgcaaaatggtcattaaaattttgagaaagttttggcagtggttattttttaaatgcttttaatggaatgaaatatgctacatcacacacatttgtgctttttaaaaacataagtatttgagattgatatattgtagtttaatcccctctttgtatttaatactattatttaggtttattgttaaaataatatttaacagtgtgtgatatcaaggatagctggaaggcttataatacaaaaattttaatgtttaggaaatgaaagatattaatatatattaaaactcttttattataccatagaaattaacactttgtgccaattctaacctcaggattattttttgtgccttgtgtatgttccagttgatctcttcatcaattttatgaatagcataagtaaatttagttcattaatatatttatatactttaaatagaccaatgtaaacagattcttatctgccatatgttgaaatgctttagtaaagacataactgcctagtcaacaaagatggcattgaattgcactgttttggaaaaaaagttgagcgaactagatgcctgttaatctggttctttaaatatcataaacaaaagtatcagaatgtgtttccaaggacaaaggcggggttttccgggctttgattggttgctgccttgtcctgtcccacagccatccttaattggctttgggtagattggaatcacataagcagggtgacatttattactttcctagttgtttcattgcactgagccctgagattcccaaggagtaaccataaaagatttcttttattttgtccatgacctacgagacaggatcattctaagaagagcaggcatgagtttgagtgcaagaagagtcactctgcctgcaataacgccaataattctacagaaaagggtatgtgacttctttatcctttttttctttaatttttcttgctgctttttttcccctgttactgtgtgtttattaatacataggaagctttacttacatacccttgaaagagcctataattcattaaagttgtaggtaaaattaaaggacatattattggaattgaactaggaaaaataatactgcgctaggacatcgctatagttaaaaactttcacctaaaagaagtttgatctcgatttcaggtcactgtgatttagagactgtattgaaacttttccttttttttctttctactgtaacttcaagcctctttgtttttagctcagtaggaaatctgctgttatgtcttatatttgtttactaaggaatagtttctttgtttcaccataattcataatatatcaatctcttcattgttgaatagactatacaattattttactgtttaaacatgtgttaccagtttattctcaggtttctacccatttctattgagcttctgcgtatttgcttaagaaaaactttccattaaattcccctgtgaaagggctttctgttaattattaatgcagtcaatcctgtgtatgaaaatattttatttattagttttttgtaaagattatttttatgtctcacttacagcattgcattttacaaggtggtatatgcaaccatgtcatgtagtcatagtaaacttttcttgtaactctccaaaataagaacattgcactggacttcttaaagaatcaaatctgtcgcattgagaaggaaggcactaaaactcagttttggcaatatgcttaccaaatggttttggtgacactagaaactgtagtgtttatttttgaactcaacttttaatagttaactgttaactatcagtgcattccattaagtcaaaggtcatgttgcaatttatttgaaacatggcaaatctaacagttaaagtggctatagtttttaaaaacgaagtgcctctttactatttttaatttttagattttcagcttattttcttatccagtcaaccatttatttactgagaatattttatttggcattggaacagctatatgataattttgccaacatgagttctttatctttcttgaggccttttgctaattgtaagcaaatttaattaaaaatattttgctttgggttttaacttttatttggaattggacttagcagtgcattaataatgacaatataggttcctggactcactgaggatgtgaaaaggcatattaacatttatcaagtctatgttctcatgtttgaattcttctttatccggttaatattgcagtttagattgactaagaaacttctatcatatggtttgtttttgatgacatgttggtatgatggaaaatgtactatctggactctccatttactagccctgtgactttgggcaaatccagtaaactcttggagtctttacttcctcatctgtataacaaactgaggagttttcagtaaataatatcttcagtcttatttgtgtctataattctgtgaaccaaatattttatattttcatggttatagtaaaatatgtaaattatttttattattttagaattattataaaacattaggaaagaatgctgtaattttcaaggagtttgaacaattagcctaggggaaattggttatgggaaaacttggctagaaaaataacttctagcactgtttgccaagtaggaaaacaagattactctggaaagcggtggttattattgatgttacatctgagctgccaatggtcacctcattgtgatttatcgtggtattttaataataagcttcttgtcaagtttctgttataatatttataaaagtcaaaattccctagactcaagtctatgctatttttttcagtgagtgcacatattttggtgtttatataatttagcacaccattatgtgcttctcctgatattttaactctgaaaatacccatttgattgttctgaagatcttaatgtcttttattttaggagttgggtattttctgatttaaaaatcatccatctgccctggtcacaccatgattaattttttcttccaatataagaagttatttcatacttgtaattaatttattttccatatatgccataattttaaatgatcttataaatcagtacaagcatttctcagagaatttggggagcaacttattttcccatgaaggcaggtgctttttccacaggtttggtgtaaagttcactcatcctgaatgagtggcccttgacaaataatttatcaaatggaatcctaatcatttaaaaggctgagagcattctgaaaatgctccgtagcaatagggagtaattttcttatcaggtagtgtgtctgatccaagtggctgtaagtgtctctggtagtgcttaggaacttgaattttaaacatggcccttcatgtggtatagatctattttgtagcagagaaagtacgccttgatctttgagaagaaaggtattttggtagattctctatcaagtaaattggaaagaaaatgttcacttccaaattctattaggatctgatttctctgatttaagtgaattaaggttctggtgaagaacgttcctcatgtgcttcagaaacgatcacatcctcagcaaacattgtgaatgaatcttttacctcatcgcatttttctcagatcatcactaggttgtagctttttactttttcaaatgagaagactgagtctcttgggtgttgagtgacttatgcaaggtcacccagaaggtcagtggcagagctagaaatagaatctagatcttgtgacttccagtatgcttctcctagatacgtgttacctcctgaaattaatatggaaatgaaattgccttatggtgggtataattgccattcaagtctggaattagcttaggcaaatcctttcatcttcctctgcacctccaccaactcccttatgctctagcatagaaaacattttattcagaaagcaattgtaagcagccaagtgtgtgtgtgtgtgtgtgtgtgtgagtgtgtgatagaaagacagtttatacctggaactccagattggcacattacataaagaaaacattttaaggtcccggagagttaacataaggctcaagtattgtaaagtataaactaagtataatataaaattcacattcttttatggaaacactaccaggtcagaaggccttacatccatatcctgattcggtgggtcaggcatatttcatgtctctatcagattaacattttttgtttgtttgtttatttgtttgttttttgagattgagtcttgctctgtcacccaggctggagtgcagtggcgccatcttggctcactgcaacctctgcctcctgggttcgaacgattctcctgcctcagcctcctcagtagctgggactacaggcgtgtgccaccacacctagctaaatttttgtatttttactagagaaggggtttcaccatgttagccatgatggtctccatctcctgaccttgtgatctgcccacctcggcctcccaaagtgctgggattacagacatgagccaccgtgcccagccaacattgtttttaagttatgtttgcaaacatttttgcattcttcatccatgctacaattacaggagatgttcataagcacacaagatcctgaagtatcttctgaaatctcagagaaaaaaagggatacttttaatgacatatatttttttaagattcaaatccttttgaaaattgtaaattcatgagtgtaatacggagcaatgccatttatgagaagatctaattccccattcatataagagaatagttcatgttataatcatttctttcctcatacaattagactaattgctatgattttctaaaagtgatttagtggaggaaagaacacatcatcacatcactatttttcccagaatcttttaaacatgcacaaaatcagtccaggcttccttagcatttgccatgctccagggcctgcctggccctcagcctgcccagcttcccttgaagccttcactgcagcatatcgtttgcctccttgggcttcaaacggcttttaaaatctgtatatctgcacttctgctcccagaattgtgctctgcagcctatagacaacaccaggctcatttgctttcccaaatgctgtctattgcctaagtgtcggctcaggctgtgttctcatcctaaagccttctaagactcttttgcttcacctttatcttcaaggtgccttgatttagtatcagtggacccacctttattactcatttgtcaattcaaccactacagccctgtaacatcaattttattattaccttttaaataatatttaagtcatattgccgtccataggtgtgtacaatatgactttcagttgctctatcttgtttatttttgtatatcttggaccaccatttggtttccaaaagttgtcttttgatttttggtcttacaactagatcttagtattttaaaggaagaaatctttaaaatgttttgtcatttatgggcagaatgtaatttcatgtaaccaaaaaacacaaaggactgtggattaaggaggaaaagagatttatttttctttcactttacaaggataagtccaaagctaatgttgcagccccacaatgtcctcaggcaactgaactccttctcgctttctattatttcttctctagtgtgggtcctttttccttttatggaaagataaatgtaaatttccagtcatcctgtttacagtctttgcacagagaatgtgaaggaccaagaacaggctcgtgagttttataccagttaacgtgccattgtggagtaaccaggagtttctgcttacatcttgttggccaactctggatacaagaggagtcaggaaatgcgggcctggagtgtagcacactgccctcctcaccagaatcaggattcatcaggaaggaagagaggaagggtggatattggtgggtaactcgccatctcctctacaagtgccttggacatattagacatttagtaaatatttgtctgggatttttgttattctggtgccagatatgaaatgtagctatgctttttgagcaaataatattctattacttgtatagggattgtaggtatggtaataagtggggagagagcagatttcctgtgcagaagagggtcgtggaaggccatggatggtggtcttagtttagatggtggacttgcttggaaggtgatagtgaagtggtagtgggcattgttactgctttttatccagagttctcattcttgctaaaccttgatatttctcctgccctttttacttttgtacagagtaacttagttgcatactcaaccaggaagggtgtcacacagatgaatggtatttgcattttagtgaaatgtttcttttcctgagaagtgagtttttaggaagtgtgttgtagcagattatatgtatgctttagagccaggaaacccagagtttgagttcagcttcatcactctccagtgccctggctttgggagcattctttcaaaaccctctgagaatcagtttctctatcttggggatgatgatgcttcctcacagaacagttgtgaggattcaacagaataaatatttagaagcatttcacacatagtagaagtctaacaaatatgaatttccctttttccccacctgtgaaatggcatgttttactagtttcataaacagtttaaatttccctgtgactgagaatttaaactttccgtgccctattctcctaaagtggttatccaaagatttcatagtagaaagtgagtcaaacaaaaagtggtttttcttcatagatttcagccagggagagaaagacaatatatctttcaaatgcttgctcccactgctttcctttctgtaactttagaaggtctctaatttgaattaaaaaaaatgaatccaactatatacgctgatgaatatattttttaaaatctttgggaacgtagatttaaatacaagataggtggttaattactcctcctttcagtgtcctaaggagtattagacggggacttctgggttgtatatttgaaagggataaaagtaggtctagtattaagacgttgcttcagtaggcaagtggtgttactattaatagaaccttagctgtatgatggtgagaacttgttacttttgatcatcattgaaccccaatgcccagcacatagaaggcacaaagttggtatctaattaccaattagttggataaaaacaatttttgtaaaggcaagattgagctctttagatactgacctgctatttccttcctaatatttgtctctgttgcttttctttaatttttgccaagtttctcatcttttgggatgaaaagctgtaatgctcaggccttttcattacctttatctagctccaacttgctgcagtgggcaatttggtatacccttcacacagagtattgcccttcacaaagaacaataaaaaatagcagctacaacatgttcagcattgattacacattcactttaaccctcataagaaccctaaaagcttggtggccaaacccatttttggatgaggaaaattggcttagagagttaagtgtcttggccaaagcacctcgctcataaatgacagaggtgggacagaggtccgggcctctgctccacctagcacaggaggctgtccctcagaattgcctgggcacatgtactgcatagctactcatcaccgtgtagctgcagtaatttgtcctctcacctgtagtcttttcatgggacgaatctcaccttttctgccaatctgccttttgctctcctagttacttttccttgctgtgcactcagttttgcctcaaagacatagtgattcaaccatcaggtcagagtttcttagagctcaacaggactgtaggggtctcttgggacttattcagaaatgccttattttgctttcaaaattttataataataattgctaacattagttgagtgctatcagtttgccagcattttgcccattttacagtatgaggagtctaaaactcatggctaataataagtttggggtctgagatctgatcacagcagattccaggatcccctgtccactgtgaacacctgggctgaacccccatgagtacagttgctgggcatcatgattttgcacactgtactgcatgttccacatttggcagtgaaggctgattaaaaatagctgggctaatgaacggtctcagactactgcttggggcggtctgtagggctggctctcatggctgtgccccagaactctaagccaaatattaaaaataataatctcttttttggcaggaaaaaaaagaagcaagacttttggtaatttcagattctaaacccctagaaaggataaggattttctacccctgtaggatattaataatgcttgctattatgataattctcaaagaggaattcaaaatttgttttggcaagaacagcattgtcagaaagcctcctaatcagacatgcatatttgaacgtatacattcaggctttgtttgggaaaataccaggaattattattttgcagtttgaaaactgaaattatcttgggtagttttatcaatatttgaagaaaaaatttgatataactgttcgaaatcccagcgaaaactccaagtttgagttccaggaaaggttcctggtgaggtgacacatatgtatatatacatatgcccccccaatccttcttattaatgtttaatatgtagaaatcatttatcttaaaaattcaaatatttactaattctgaaaaaatagatattaactttgtcacaagcttgtgattgtatcaaacagaaaccccatagttttaacaaggttgcagttttcgaaacatgatattttctctatttgcacaaactgagaaataaagactccctctgctggctacttcagtatttgcaattattctggcgagaagctatgaaaagtgaaaaaacaaaacaaaatgaagaaaaatagtctttttttgacactcaaaaagctaggtgctttgggatatatgtatgtatacatctaattatgttctagtgtttatttatctaatacttttatccaagatgtcatgtagaagcagcagcttaaagcagcctaaatactggacgaacagaatggtaagaatacagcatcaggtgggagccagaaatggggttctgtggctggctcagctggtgaccatttggaggtccttgagcaggtcaagactccagcttcagctttttcatttgtgaaatgggaggatttcagtggatgttctccaggaacccttctaacctttagtattttatgattctaaacagtatagattccatttcttttacaacactgtgctctatgcatgtctttcactgatgtaaaataaatatttagaaaaatgtaaactagtacaaccactatggaaaacagtatggagattcctttaataactaaaagtagaactaccatttgacccagcaatcccacttctgggtatctacccagaggaaaataagtcattatacgaaaagatacttgcacattcatgtttacagcagcacaatccacaatggcaaaatcgtgtaaccaacccaaatgcccatcagtcaacgagtgggtaaacaaactggtatatttatatgatggaatactactcagccataaagaggaatgcagtaatggcatttgtagcaacctggatgaaattggagactattattctaagtgaagtgactcgggaataaaaaatcaaacatcatatgttctcactaatatgtgagagctaagctatgaagatgcaaaggcataagaatgatacaatggacttcggggacttggggggaaagagggagcaggcaagggataaaagactacaaatggtgcagtatatgctgctcaggtgacgggtgcaccaaaatctcacaaatcaccactaaggaacttattcatgtaaccaaataccacctgtaccccaataactcatggaaaaataaaataaaataagaaaagtaaataaataaatatttagaaaaatgaaggaaaagtaaaattacaaaatgggtatacatcagttgttcccagtgtttgttactgcatgggaatgttaggatctagaaagtgatgttttgtacactattataagtttatgaaataatacccccaaatgtcctgggaaggttgaacatagcatattttattgattgtatggcactttaagttgtaagaagcatcattattttatatacttccaataaaactataacataccattaagggtaagttacatccaggtttcagagaagttaaatgtgaaaaaaatgtgcttttaaaaaatcaaggaaataaggtagttcctaaaagggcttcaattgatgccagacaactcaataattgcaataaagtctgatgtgtcttgggctctagcaaacagtatctttctccacctcacgttttccctctcttctaaacacttattccacctctgccctactacttgttcttctttctcactgtgtgaatcaatttttaactttttcacttagacatgtcttatggctgttctgggaataaactattgcttaaaaactgaaatgagatcctgaaataacattgtgtccaacataagcatggccagtggtattctgctttaaatatgaattagcattagcacttgcagaggttttcttgtttcaaagatgaattagccctggcatcttagcaggaattgcatgagtattaaaaacactgaaacttcagagaacacagctttgatgaaatcatcggaaactttagtgtgggatttgtgatttgaacctctttattattcatattggatttaggtcttaacatgtgtgtctgtgtgtgtgtgtctgtatgtgataacttaggatattttctaacttagttgttaatgtttgctttcttttataatgaaattggagcagtttcttttatctttttttctgccacataacagagccaactgaaagggcttgaatttctctttgtcaaattgaacccccacttgagttggagtccttctttctacctaataggaagaaaggaggcccaaagaatgagtactcttcatggctcttggcctgagacaaggagagcagaaaaggtaaataatagagtaggaggataaaggtgaatggaggggctttaaggagatgtcctgagcctcttcttgcctgcaggctttttttctcttggttggaaccctagatgcggcatgctgctgcagtgtcagtgccccaggctatctggtgtgacagtgctaacttcccttctgtgccaagtttagggcatttccagtagtgagaccactactctttagcctgttgctggatgggaaattaatgcatcataaaacatcatctgtggattttgaattcatatccaggactcctggaagctctctgtggatccccaggaacacaaattctctatttctgaatctctttagccaggcatgaccctataatttactgcagaaatgtaatatcatacaaatctataccagggctgggtttttacagagctggtgtggagatgatccatcttgcgaccttaatgataagagctatacctcaaagattgtgaaaggacagaaagagccttggtcaggggtgacttgatggaactgcctcaccaaatcctgagctgcctgccctggtttcaaatgtgagaaggaagtcaacctcaatctggctaacccattgtaggtaggaatgactttctgttattgtagctgaaccctttcctaagtgattaagtcatcatgtggatatttatcctgattctcttaccactttgtaatcatattcatgtaaaactgtcatttttattattaaataacatttaatttttaagaattatttctacgttgccaactttttaaaaagctacccatcacttgtgtatcttgaaaagcatttcctattgtggtggcccctggctagtttgcactgatggaaaccagtgtaccacagtaccgggtgaaggcaccccctcctcaggctgcctggcacccatgcttactccctgtcctcataacttagcccttctgctctccatttagtgtggtctggttattctttcctgagtattgttcactcctttcttcctcagtatgtttgctcatgtttgtcccacacaggtgttttcttaccttctttccttattctttcagaatcccagatatgaaatggctctcagcagtcacctaagccacctttgttcagtccataagtttcatgaaaatttgcctaaattttctctttggttcacatgtgtcttttctcccatagaggttttcaaactccgtgaggtgtcaacactaccattttggaattcactaatactgtctcatacaggggtgtacatgatggtttctttcatcactgaaggaatcgttttgactgtcgctgtgtgccccacattttgctcactgctggggatataaagaggagaaaacagtggtccctgatgtcatacatcgttcttatggtgaagggcaacacgtagtaattatagttgcacacttgcatgcttgcaacaaagggcctggacctaagctggagggtctttggaagcttcctcccagaaataatggtttatcctaagatatgagggagcagaaaaagtagagggtagggaaaccgtgttctaagcacaagcagtagcatgtgcaagggccctgtgttgagaaggagcatgactttttcaagaaacagaaaaaaatgtaggattggagtcagaggacaggattgtagggaataaagtgaaagggggtacaaggatgtggaataaacctgtttgtgtcaatccttgtaattctgatattggtgacagtatctgttttaagtaatgtcttataactaatttaacatgtactgttcatgctcaaggaaaatgtgtttttgactatccctcgcaagtggagaggattggaggcttttcttgcaacctgatttctcaaaactatatactgtttttctcttagtaaatatttgacagctagcaaaataatacaggatagcaataagaaagcagtggatattcttgagctgttagggtcttttggagcagtctttatttttaaaatgcaaaattttaaaaacacaattagagatttggaataagtaataatgactacattgcttcccattccttttctttcaagggaactactgagttgcttaattcaagatatctaaaaatgtctcttgttatcttaggacactgtgtttcttatttataagaatgtaaaaattcaggactactctgaccctgatataaaaatatttctcatgaaatattagtacattgcctatctattagtacattgcctatctattaaaaataataaagaaaaatattgaaacattataagctcttttataattttactgtggttagatgataaactttcaaagagctgtagaaataagcttagctttaggacacagttcagagcaaattcctgtgagccttgtttcttttatcttgtattaactatatgttaactatacatatataattaatagatacaatacataaattaatgaatttatatttctgtttaaaaattatatatgtctcatcatgctaaggtcatatttaaatatgatatttaaaataaatttaaaataaatataatatttaaattattttaaattgaagactaattaattaatagtaatttagttaggtttaactattgaatttaaaatttcctaaaatagaaactttgacacagaagataaccatagataactatgcccaaatatctttttctttcacttttgctcttttttttctttctcttgcttcatcttatggattcttactcattgttttatgtttaatccatgctcattattttacctgctgaatgatgatttctcttctctctattcttgaagaaacaaagaataagtggggcaaacctatggcataattaatgactttccagtcatggcagatccaaagccctcttctgctccgtgacattctcaaacgaccattgacaatgctgaattcatttcaaatattctagaatgaattcacattgaaaaggatctggctatcccatgccatcccattccttggagtcagcaaggaggaggagaaaggctgactgcttagcctttgctcacttttttccttagttatagctttccaaatatgttcttagaatttcaggtgatgcagagaaatactaagtatgctttgggagcaaggtgatacatactgacttgactttattttgtttatttatttttagaaatggcctttgactttcattttaaatattttgtcgcttttagtctagaggctttaaaaggcctcaagtttttttttctgaaaagttaccatttcttcttgtgctttaacattgttgcatctagtattctaaaaatgggttgtgttagtttttttaatctctttcctccacttactttttatgaagagcagtctaggggaggagttgatgtgtaaagtgtataaacatgccttgatagaatgtcagccaaaacagagatttgcttcacccacattccagcatatccctgcaagggctgcagtgactacgtattaaatttgcattgctaggtgccatgtgctcctagggcagtttttgaagctgtaaactactccaaaggccaaggttgttgtgattgtcaggattagagtgacacagaagggctttccaacacaggcagtgtgtacaatcttggccttctttggacgctctgtttatgctggtgggttgttatagataaacattatcagtgctatgtttcttttgctagtcaactttcaatcctttgatggaacaaaatttcttcctattcttctttagggtccaggaagaatttcttcctgttggcatccaatttcaaaagatcttgtaaataaattgatatgaataatatactcctcactctaaagcaagctatgaatttgggccactgcactggaaatgtataatatccttttattaaagaaatgtataatatccctttattaaatagcatgattatataatgtttaaatttttttttaccttttagtatgtataggaaatagaatactaatattttgcttcagtggttcttaagaacagctctgctatttgttttttacatgatcacaaaagtctttaacttagttttaacccatatagtcatgcagtttttgtgatgagttgaattcttcttaaataggaaggtttagtgtagtaattctttgggcaagaggcatattcaactctactagagagttaaggcttcagttgtcttttccttttatatatatatatattctttattgagtcagagtgttgctcttgttgcccaggctggagtgcagtggcgcgatcttggctcaccgcaacctccgcctcctgggttcaagcgattctcctgcctcagcctcctgagtagctgggattacagccactcctggctaatattgtatttttagtagagatggggtttctccatgttggtcaagctggtctcgaactcctgacctcaggtgatctgcccgccttggcctcccaaagtgctgggattacaggtgtgagccaccgcactggccctttcatttattttaaggaggaataaatagaaattaaatgagactttttaacaaaggcatcccattcatcgtataaggaattttgataattacagactatatctaagagatgacagagatttactgcgtggaatatcaacctaaatataattccgttattcatagatgaacgtgtattttggataagtgtgagcattaaataggatttttaaaaaataagggcttgaaatggatttcaaacaaaaatattaaatttttctctcagcaggttttattcattctaacaatgaaatatatgcacttattccagaaattcaagttggcctaagcccctctaaatttgtgcatctcaattcttgtcaacttatgtctaaatttgcagtgacatagtctgaagaaaatagtggcatatcctgattatttagtcactttctcattttatccaactttacctcttgctcttttctagcccttttttaaaaaaaattggtttagccttcagaatgtctctagtttttcattttcttagcttctctgaaataagagatagaacatgcaaaataagaggcatacttctgttaccccaggtgatgagagcttactgtaggaaaacatatgggggtagtcaggaggtgcagagaacattttcagcaacccctagatcattcttcaggccccccatttcttggcatggaatgtgcagcagggaacagaaacagtgatgttattgctgcatatgaaagagcagtcccagagttggttcctcttgttctctcaggagtggtcatcttcacatcatctttggcagaagcacccacgagtgtttagtccaggcagttgtaagcacagcagcatgcctcagaattccatcagttttctagtatagatgcacatactgaagatatatccttaagagcagtggcctaccaagatgcaaacatgagaaacactgagactccaaatagaccttgacatcatagggcatgacatgtattcaccaaaatttgaatgaagtgaaaattcagagagaatagcatctgattttgacagtgtgtttttatgacctttttcatatgacttagtatcagcctcaatgacttcaaaaactcagaactgccatattgagtcagttcctacctaggaatttgtatgatgagaaagtatttgtctcttactcattgagaatatttttaattttctgagcataaaaatgggaattaattatatactcaaaggcagaaaatacttttctattaaaatttgccattatatagagtacctaccatttacaatgcactgtgataggctttgtaagtggtacaaagttccctcgctccacatatctgtattaagtcatgtatcaccctggggtaggttcctgtgatacaatgataaattatgaataaagagagacttttcttaaaagagtttttgctaggagggtgatacagtttggatatttgtcctctccaaatctcatgttgaaatttgatcgccaatgttggaggtggagcttagcaggaggtgtttgggtcatggggacagattcctcatgaatgtcctggtgctatattcatgggattgagtgagttttcactcttagctcccaagagatctgtttgttaaaaagcatcttacaccgccctcccctccctcttgctttctctcttgccatgtgacacccctgctcccgctttgtcttctgacatgactgtaagcatcctgagctccttaccagaagcagatgccagcaccatccttcttttccagcctgcagaaccatgagccgaataaacctcttttctttataaattacccagcctcagatattccttaatatcagcacaaaacagtctaagacacatagctggggagaaagacatgcaaacaaaaagttacaaaatgagagcacataaaagaggcgcattatgaacccttggacagtcagggaaggctttctggagcaagtgtgattggaaccagggccaaatttaggtggaagtttgccagagaaagcatgttgtttgtgagcggagcactgaaatttcttccaggtagaaggaatcacacgtgcaactaagaaagaatggtttgcaagtgtttgtcttatttggtttgggtcacatagtgatctattccataggacactaatcctatttataggggccccacctgcataatgtaattacctcccaaaggccccacttccagatatcatcatctgggactagggattcaacatgtgaattttggagggtacaaacattcagtctattgcattatgacttactctgtgtgggccccatttgcccacagttgttcttttagtaacagtagcagctccagcctacattttcccaggcttaggtccagtagaaaaggaagtgtgtgccaaggttatgtgaacatatatctaaattggctctaactgcttctgattaagtcacatgctcatctgttaaataatcactgttgtctgggtactgattagtcaatatagaaaacatcttccaccctggagctgaggcgatggtgcactgataaactggctctaaaaataaaaattttaaaaagaccttatatgtaaaatttactggtttctatcatataaatacttccatcatggctgattttaagatgcctggcttttagagctcctgaatatttaataatcagctcttgcaagccagttccagcagctccagcaaactgtcactgagctgaaggtggagctaccagagcaccaagtctgctggtgagggagggagtggtactctaaaaggaaatgtatctatctatcagaagaggagtaggcgactggtagacaaagccaagtaattttgcacgtaccactgaagaatttttaagtgctcttatatcattttcttgaataacatttttagggaccatataatattccattctgtgaaaatactgtagtttgcatttttttttttattgttggatgtttaggtcaatagaatgacacataatgctttgctggacatgtaatgcctaaagccattttccatatttagttcagatgtttaaagtagtttgcttaagaaaaattgctgggtcaaaggaatagaccatttaatacttctggtaaatattctccaatagatgtacaaaatagttttaccactttatatcattgtaagagagagcaactatttcattgcactgtcattaagtataatttttaaaagataggacagaattgatatatcattttaatttataacattagctgctgtaatagataaatcctaattcacagtgagttaacagaatagaagtttatttcttgctcatgtcagagtcttatatgggttttcatagttaggcgtcttctatgtggttatttaggaacaaaggctcattctgtcttatggctttcctttcctctaggcctttgtagtcattctgttcagtgggagaatggcaaaaagcaatggaggacaatatgtaggagattttcatgggccaggaagtgtaacattctatatgcttacattccattgactaaaattcaattctttggccacaactaattgcaggggagaaaagagaaaggattgggtgaacatctggccaatttttactgaaatattcatacctgagatggagaaatcttttcataaagtctgattctattccctccttgtactacttgagtatatctgcaataaatcacccatgttactagggttatttacggaatttaaatatagaatatgaaattttattttattttattttattttattttattttattttattttattttattttattttattttattttatttttagatggagtctcactctgtcacctaggctggagtgcagtggcacgatcctggctcactgcaacctccgcctcccaggttcaagtgattcttgtgcctcagcctcccaagtagctggaattacaggcatgtaccaccatgcccagctaattttttatatttttagtggagatggggttttgccatgttggccaggctggtcttgaactcctgacctcatgtgatccgcctgcctaaacctcccaaagtgctgagattacagatgtgagccactgtgcccagctataatattgataagagatacatagctttttcatagaccaaagtggtggggaagtaatactaaatagttattgaatgacctttagtttagacactgaagagaatgaaagttgtcggacaaagtagctttggcacataaacaagtcttggatagataacattcattcagtgtataagaaaattaaatgtagaagacactgtataaggaattataactgattaatctttgctgacttaccagaatgatattttaataaaatattttaataaaaaggctacctgtggattgggaaaaagtatttgcaaaccacatgtaattataagggttaatatccaaaatttataaataactcatacaactcaatatcagaaaaacaattaacccaattaaaaatgagcgaaggactgggtgtggtggttcatacctgtaaccctagcactttgggagggtgaggaaggcagatcacctgaggtcagagttcgagaccagcctgactaacgtggcgaaagcccgtctctactaaaaaaaaatacaaaattagctgggtgtggtggcgcatgcctgtaatcccagctactcaggaggctgagagaggagaatcatttgaacctgggaggtggaggctacagtgagccgaaatcgcaccattgcactccagcctgtgcaacatgagtgaaagaatgaaactccttcaaaaaaaataaaaaaagcaaagggcctgaatagacataaaaatggctaacaggtatatgaaaaggtggtcaacatcaccaatcatcaggtaaatgcaaatcaaaaccactatgagatattacctcatacccattaggatggctgttatcaaaaagacaagagataacaagtattggtgaaagtgtagaaaaaagggaatgctagtacactgttggtgagaatgtggattgatacggtcattctgaaaaacagtatggatatttgtaaagaaattaaaaatagaactgccatatatgacccagcaatccctctcttggatatatacccaaaggagtttaagtcagcatgtcacagagatgcctgcactcccatgttcattgcagcattatttacaatagctaagatatggaaacaacttaagtaccatgtcccactgatgggtgtatattggagcatatatacataatttattttatatttgcattacacacacacacacacatacagatacacacaatgaaatactattcagccttaaaaaataatatgctgccatttgctacaacatggatgaacccagaggacattaagcttagtgaaataagtccttctttcttttctaacagaaggaaaaatattgcatgatctcagatgtgctgtctaaaaataagtcaaatatgcagagatagagaacaaaacagtggttaccaaggacagtggtggggtggagggaaatgaggagatgtagatcaaggatacaaagtagcagatgtgtgggatgaacacatctagagctctaatgcacaacatgagaactatggttcataatagtgtattgaatttggaattttgagaaatgagtagattttagctgcctttgccacacttgcaagaaaatgggtagctatgtgaggtgatagacatgttaatttgttttactatataaccattttgctatttatttatatatatctcataatatcgtgttgtatactttaaatatatacaataaaatttattaaaaacacaaacaggaatattttaggtctttttcttgtttctacctacacaggtgattaaagtatacagtgaagatgaaaccagcagggctttagatgtacccagtgacataacggctcgagatgtttgtcagctgttgatcctgaagaatcattacattgatgaccacagctggaccctttttgagcacctgcctcacataggtgtaggtaaggatacggagttattgtctcacatcattgcttttctatttcttgttcagctccctcttgaacaccaataattcttagatttggtgttttgagataattttctatatcttgtaggtgatcccagttccttttcattcttttttctttttttccttctgatcatgtattttcagatagccaactcattgatgttttcctctgcttgatccattctgctgttgagagcctctaatgaatttttcagttcagaaaatgtagttctcaggttcacaatttgttgtattttttaaaaaattcaatctcattgttaaatttatcttataaatatctgaattgattttatcagtttcatcctggcagtcactgaatttccttaaaggtgctattttaaattcttggtcagagctcacatatcgctgtcttgctggggtcactaactggttccttgtgtctgtttagagagatcaaggttccctgttcgctgttgtttttgtggatgtgtgtctgtatcttggcactgaaggattagttatttattcgagccttctttacctggcttcttttgttctttattggatatattccttagaggtttttgcccataggtcattgccttctttttggctctaggtggtgccttaaacctaggttcgccttggctctagtgaaggtcagagcactgcactttccaaatgggagaggttcccaaaggggatatcccaacagtttgggacagctggctagggacccatggccaggggacctgtgggatgaacctcctatcgtgtggtgctgctgaacagccactctgatttggtgtctcctttggctgggttgcagagcagagtttctggggctgggaatggttgtcctgcccccttttatgtctctgcctgtcctcagggatatttctcccatcaggcaatcacgatgcttcctatgattaagacagaggcagatcttctgccagggaacccaagatggggtaagaggttgtctaccttaatctcactttttctggtgtaaacacagtgagttgggggaaagtttttcacaagcttgtgggaggggcatcgtggtggatatggaagtttgattctcttaccatctggagcttttctttactttcctgtcgcccgtggaactgcctcatcttcatatttgagttctgggatacttctggggaaaatctcagtgctatttatttggttttggttttctgttggggagagtgaagccagtggcttctttgccattatttttcaggaagtcctgcttttctgtttattttagtatagatcctatggtgaagattttcttccgaggtacaaaaatagaaaagaattatgaataatcatttctttattcttttattttttgttatttgtagtcacaagagaaagaaagtagcgcaaagtagaaacaagcctagaaatttttataatttacccacccctcttcatttaaagatctatgggaattttagacctaaaacagctcaaattgatggaagaatacatttcataataattttattagcacaatgcaaagtgtttgatttatttaaaaaagtaagctgtcatttggaccacattttgagtcaattgtagcacagacaggtacaaatatccatagcagtggttctctttatggtagtgtagaccctaaatttttcttgaagaaataagtaagtccttcacatttttaagacataaacacaaggagtagcctcttaaaatgttttatttggaaatgcatctctattgtgaagtgtgaagggcttaaaaatattcttttagtatgttctaaagaattcgttctactagagtgagacaggatttggcaacaattttgtcccctgatttcttatttttatagatttgttttcaaaacatgtttacatataagtagataagacaggaaggagttcgttatggcagtgtcattcgattctttgaactccttattagtttcctgtggttgctgttccaaattaccacaaactcgtcttaaagcaacagaaatttattctcacattttggaggccagaagactgaaatccatatcactggagtgaaatcaaggtgtcgtcagggatgtgtgtcctctggaagctctaatttcttgcctcttccagctctggtggctgccagcatttgttggcttgtggctgcatcacctaatctctgccactgtggtcatattgctttctgctcttctgtctgtgtcaagtctccctctttcttataaaagcggtaacatttcgggcccacccagataattcaggataatctccatttcaagatccttaatttaatactgtctgcaaaattttttttccacgtgacattcacaggttctaggaattaagatgtggttatctttcgggggctatagttcagcctgccacaaacttcattgcattatatgtttaacaacttttagtaagaaatcatcaaaatcattttaaataatttatcagtgacagctccattagttgcttcaatttgttcagacttgtgaaagaattttatacatagtcattagagtcatttactttctagcatagctgccaatatacaaaatcgtccctttgtttgatgcattcaagagtttatgcctcagagcaatgtgccaatgaaaggttctgttcaaatgaacatcctttctcttatgaaatggaattaaaaatgattttggcagaaaaggtgtgttcttagaaggattcattttttaaagatttgggaagtggtttttttgaacactacatgcattccctgaaccatttagaaaatgtttgtacttctgatttgacaactggtgtcctaggacatgtcagaacctcgtgaaggggatagagtaaggcctgtggagaggaagctagaattgttccacggtatcctcagctgatagctgatgagctacaatagtgcaactgactttgacagctcagcctagatagttatcaacctgccaaggacgcttgcttctaaaggtatgtcatactggccaatatgacttgttgcctcatcttctaggacagaagaggctcaacatatattttcttcattgccacttgtgactagtttaacttctatacatgataattaatctcctagaagtatggtgttaattctcaatagatatctgccctattccaagctatttcatttagctcctaattagcataatatattattacagtattttatattcttaaatttttctttcggggggacttaaatttttttttgttatagtcactaccatttatctctaacaaatagctttgcagttcagtaataaaaatctgctctgtaaatcaagaagtgtttttccctgagaacactgcaaattatttgtattaaggaataaaacacacaggtcttttaatgcaaaagctgaaagtggaacactgggaattaatttgatccacatactaaatttaaacttttaggcatcaagtagcaatagaagtttatttctttattactgtattttctggaaactgctgaaataaaatcaaagatatgagcatattctcatgacttcatcaaccatgcattagaccaaagctcataagaaagaattttatttccagagccttcttgtgtttttgttttcctttggtttttcactcagattatatgtttaaacagaacaattgaaaacattaatgctaccccaaaactaacatgtattagatttaatagcttccagttctttaccgatgtaagaggagagtaatcactattgaggtactgtcatcttcctcagcacaaaatataaacagttttgtctttaaaatgttttttgttttagttttgcctttttgcttagtttattataatcttgcaatatctattcagtctaattgtggtaggaagtaaaatgttcaatttaatttgcatatttaaatgaatggaaagaactacagtggtttttttctccttaaatgtgatatgcagctacagatactctttgttaacagaataaaccgctgacatctttactgcaagtcttctgtgagtgctactgatgtaaagaaccaaaggatgaactattttccagaactttagtgatcagctagtcggctctgcatattgtttaagaaccattcttgcactctttttgtccaaaatgatgaattttcaataaataaaattatatttggttttctgttcctgtgttaacttgcttaggataatgcccttattgaatagggagtccagcatccatgatggctgtaggagtgtggctttatttctttttatgcaggacatgatttcattcttttttttatggcttcatagtattccatgatttatatgtaccacttttttttttttcttttctgagacagagtcttggtctgtctcccatgctggagtgcagtggcgcgatcttagctcactgcaacctccgtctcccgggctcaagctattcttgtgcatcagccttcagagtagctgggattacaggcacatggcaccacagccagctattttttttttaattttatttttagtagagatggggtttcaccatgttggccaggcttgaattcaactcctgaggtcaggtgatccacccaccttgacctcccaaagtgctaggattacaggtgtgagccaccatgcctggcctatatgtactgcattttctttatccagtccactgttagtgattctgtgtctttgctattgtgaatagtgctgcaatgaatgtaagagtgcaggtgtctttttatttattttggatgtatgcccagtaatgggattgccgggttggatgatagttcttttttaaattttttgagaaatctccaaactactttccacagtggctgaactaatttacattccaccagcagtgtataagcattcccttttctctgcagccttgccaatatctgctgttttttttacttttgatgatagccattctgactgatgggagatggtatctcattgtggttttgatttgcattcctctgatgattagtgatgtggaggaatttttcatgtttgttggctacttgtatgtcttctttcaagaagtgttgattcgtgtccttcaccactttataatggggttgttttttgtttgttgaattaggttcattatagattctagatattagacctttgttggatgcatagtttgcaaatattttctcccattctgtaggttgtctgtttaatctgttgatagtttcctttgctgttcagaagctctttagtttaattaggttccacttgtctatttttgtttttgttgcaattgcttttgaggacatagtcataaattcttcctcaaggctgttgtccagaatggtgtttcctaggttttaatcttttaaatctttaatccgtcctgagctaatttttgtatgtggtgcaaggtaggggtccactttcattcttctgtatttggctagccagttttcccaataccatttattgaatagggagtcccctcctcattgattatttttgtcaactttgtcaaagctcagatggctgtaggagtatggctttatttctgggttctctgttgtgttccattggtcaatatgtctgtttttgtacaagtatcatgctgttttgattactgtaggattataatatggtttgaagtggggtaatgtgacccctccagctttgtttctttgctcaggattactttgactacttggtctctttttgggttccgtattaagtgggagctaaacattggatactcatggacatagagatggcaacaatagacactgggggctactaggggaggaagaggtgggaggaagggttgaaaaactaactgtcgagtactgtgctcactttctgggtgacgggtgcgattgtatccagacctcagcatcacacagtatacccatgttaaaaacttgcatatatatatatgtgtgtgtgtttcttgaattgaaataaaagttgaaattataaaaaataaataaatagaattgtaaagggaagggcatagtatctatttatttaaatttaaattatttatttaattttttttagagatagggtctcttttgcctgaggtggagtgcagtggtggagtcatggctcactgcagcctcagattcctggactcaaacaatcctccagcctcagcctctgttattattattattatttattattattattttttggagacggagtttcactcttgacacccaggctggagtgcaatggcgcaatcttggctcactgcacccttcgcctcccaagttcaagtgattctcctgcctcagcctcccaagtagctgagattacaggcacccaccaccacgcccagctaatttttgtattttttaaactagagtcagggtttcaccatgctggccaggctggtctcgaactcctgacctaaggtgaaccaccccacctcggcctcccaaagtgctgggattacaggcgagagccaccacgactggcctattattttaaaaaatattttaaatacaaaaataatctatctcattgtaaatacctcaaaaatcatgaagtaaacaaaattattcataatttcaagaccgagataactaatgttaacattttttaaaactctttaatcagtttctctactttaacatagttgctatatgtattaactcttatagactaccttctttttcttttttcttttgtgcacttaaaatatatcttgagtatttgtagttttttacttgtcattttacagattccacaaaaatcagtaactcctcttgccttctctggctgcgttacccaaacagtttagcaaatatttattgacaattttgtaccaagcctatattttgctgtagattctggggatgcagtatgagcaaaacagacaaaaagtattgcccttgtgagtttgcattttcactgggagagagacaggaaacaaggcctaatatttgttatcccgtagaggatgataagctctggggagggaaagcaggaggaaagagggagagtgagtgctagagcagaagggagatgtgctttattttttatttatttatttagagaccgagtctcactctgctccccaggctggagtgcagaggtgtaatctcagctcactgcaacctccaccccccaggttcaagtgattctcctgcttcagcctcccaagtagctgggattacaggagcctgacaccacacccagctaatttttgtatttttagtagagacagggtttcactatcttggccaggctggtcttgaactcctgacctcatgatccacccgcctcggactcccaaagtgctgggattacaggtgtgagccaccacaaccagctgggagatgcactttaaagaggcatcagagaaagcctccctgacggagtgatgtttgagtagagaaatgaagcacgtagcaggcaggctgtgcaattaagtggaagattgttctagacagagggaacagcaagtggaaaggcctggacgtggcagtgtgcttgtgttcaggaagcagcctaggggccattgcacctggagtggagtcaataaggtggaaggtaatgggagaggacatcacagagttgccccaggaccagatcgtgtagggtctcataggccaagaagtgggcctggcatttacactgagtgagagaaaaagcaaggggaggtctttgagtcagagaagaatatgatgtgatttagttttaaaagtatactactaaggagaccagaatgcaagatttgaccttttattttgcttttccatcagactacctgtggctccctggaatgatccccacctatctgtcatttctactagctgtacatgcagccattgtaccatcttcacacgtggtctgtttatgagatttagtgtttgtgagatcctgaggcctcataggtaaggatattttgacttataggatagatgagagttgagggttttctgcactttagctcacttttagtgaccaagataagcttaggccagtttcagagacattccgagttgtgaatacatatgctactatcgttgcttctcatctgtctaaaccatatcacaagctactaaaagcagaagggggaatacttgaaattcaaaatgtggtaagttcctgaacctgaagtctaatttcagagttaaattttctgtggcaaaggaaacttcaatcttattagtattttttttttccgagatggagtcgccgtctgtcgcccagggtggagtacagtatgtgatactggctcactgcctcctccgcctcccagctgcaagtgattcttgcgcctcagactcctgagtagctgggatttcaggcgtgcaccatcacgcctggctaatttttgtatttttagtagagatggggtttcactatgttggctaggctggtcttgaactcctgacctcaagtgatccatctgccttggcctcccaaagtgctgggattacaggcgtgagccaccacgcccgaccgttattagtatttttaatataaatgcatatgtgtgatagctactactagtgtgcatagagtatgtattttaatatccatttacatgcaggaatacaaagatctagattccattagattctgtaatctgcattttccactgaagcaagttggtttcttcccaccacaatatttcaagcaaatgttcctgagattctgcggtcggtttgcctctgtctcactctacatctctctcaggaatgctataatttaaattgcaaaccaccaggaaaactttcgtataaacgttcctaacccaggtggtaatgaaattactgagattgaactgagccaacccagttcaccttatagcagagccagatatttattttggctgagcgagagagaatcatgctaaaagttacctgtttttgaatttgtacaaaacatgaattgtataataatactatgtttggaactttgaatgcaatgtccatgtttcatatcctctacctgtaattattaatatatggctgctgagaattttaataggcagagtcagtcatggaagacaactaaatatcttgattttgttatgaatctctgaatggcctgattttggatcatattattatatggttctacttgtacacacactttgacagacattgaatttaaaatgtcagcacatcaacaaatatttctcctttcatgatgtagtaaaccaggttttgcaactggtgtggtttgcttcacagccactggatgtcactatagttccccagatagaatcctctgtgctgttataatcaatgtaagagtagggtgggggaaaaactttagcttcaagtcctctgaaacttaatgggatccatgtttgtcttgctcccattctgattcctaattgaagccatggtatgaagcagtggcaattaacacaatacctcaagcgcatacctacagactcctcgggaagaggaattaattgtattttagtatcattgctagggacagctgagatttccattgtgaatatcattgtggagtggctttaataagcaaaatgaatgactggaggcttttaatgaaaccattttaatgtgtgcagctatgcccacgtgatcgccttaagacagaagcgatgcacagtgacagtgagggaatggttcacagcctcctgcttggaagctgctccttcgctcttttttttttttaacaaaggaagtacaagtgtttttcctcttctggagctgacatgtagttggacttcctgtgcagtttataacataccagccatcagagttgtgaccaccctcatcacagcagaaatcattgtgaagcctttgggacatgtggcactgtgcttccttccataaagagaaccatgtgccctgaccctctgggctttcaggagacatggtgtcctggtggcacgcacagaccggaaatgggcaatatgtaactagcaaagatagtaagtgcccacaactaaatctgcttctgattcagctgattttttcttctacatattcttatagcctcggctacatgaattcaggtccgagcatctctcccctcaggtattatgttagcctcacaactggtcctcctgcctctggtagtaccaacattatccatctgaatgcagacctgattctttttgcatttggatccaaggtcctctgtggggcttgtagcatcttgtgacctgtctgcccttcatagctgcagtcttaatgtctcacccctccctccttttagtttatacattagagaactgcctgcagatgcctgcatatactacagtttctactcagttttcttgtttgtgatgttaagagtcacaggaaaccccttcctgtccatctttacttggctaactgctatgtatcttccagggcttagttattttagttaaaaatgtcaggaaagtaaaaccccagccttttcttaaaaatacttatggcaataaagatgaaaactctgagctgtccaagctgactgataggtaacgtagtgccactgtccagggagagtggagagagaaaagcagttggaggcatcccatgctcagccttgtgaagtagaatcaccctttccatctatctgacagcaggccgggagacacacctgcctcttacacttgcctgactgcatggcgcaaactgctgctgctgctccagggctgttccttgagatgatcaggatgcttgctgccaccgtccgtactcatacaccccttgggcaattgcaaatcctgaaaacagcagagagctgcaggaggcactaagagtgttagtgatgaattgtgtcctgggaggtgatgcttccacaggacatactatataggtgggtgtgagaaacaagccgtgtggacaagatttagatacaaggttgttcaaagtagattgtttataatatcaattaactagacaagtaaaacctcagtataaaaggagaatgttataaattatagtacatccataggttgtaatgttatgcagcttttgatcatgcttttattcttcctttgaagactgatgtgggtaaatgtaaggttgtggtgacgattgaataaaatcagtgcataaacatatgatgttttctaatattataaaaagtatatacacatacactcatatagagcaagagaaaacgacaagaaaggaatatactgaaaggttaggtgcttattcctgattgacaggtttaaagatgtattgtgattgtaagttatctgtatttgtaaaatttcctttaatggaatgtattattttaataatcagaaaaaagaaataaacacaattttaaaaacttttaaagagatttttaaagccttagctcagacatctttctgaagccccaagttggacaaaatacacatcttctttgctgctgtaacagtttctacaactatcttaacagtgatcaaattattaaaattagacagtaattccatggagctgggactctctgtacactgcatctttgtaacccagggtctaagacaaataaatgtgtttggaactaagtcatactaaactgtaaggcatttatatcaaaaaattaaaaggatggattacaaagtacatagaaggaataggcttggaaaagaagccaaagaaatcacatgctgtgctcagatagaatttactcttgagtcctcaaagaatgctgtgagaaccttcgaattaatggaagctgtctgtaagctcttcagatatttacccagtcaactcgagatcatatatatgcaggcatttttgtggaaaaataaggctgcctctgaatataagttccaatggttgggtcggagttaattggagactatttcccctcgcagaagaatgaactgcagggctttatagccatcaagctgaagtgtcacaattttcctattattgcacttggggagttgaatgtgtctgatggcaattttctgagggatcctgctggtattaagtagtattcttaggttaaggaaccttttagaaattgagctgtgttttattctttgcttctccagtttttgttttgcttggccagaggctgttcatttttatctgaaaataagattgacaaaatgtatgtagtttctacccagcatagagaagtacaaggaccatttgtctcctggagtttcctgtaaaaaaggtattcaaaaaattgttttctgagcgaattagaggtaaaagccacttttgtttcttctcttatcaagtgagagaagagtagggactcaggtttctatttgagctccacgctgtacttggcagtagattcagcaaagaaatccaggcagaaggtcacaggtgagcactctccattcttggaggattgaggtttttaaaaagactttgatgttaaatcaacagtttcagaagaaacttcttgctttcttcttcttttttcttttctttttctttttttaaagaaagagtttctgaaaattcaaaaacagaattacatgtagttatcattatttggtaatatttctttttattaccataagacctcactgacctattagaaacaaaaaacacaacttaaggcaataggaaatttttgtttttgttttgaaaaagcctttaaaatgcttttgaagcttttctttttccatcttcttgattgctatgttgaagtaatttaagagggcttccctcctatttttctacctacatatgagtggtagttgacaattgtaatttactttccaatgcccgaaaaataacgtcagaaagttttattttaaatagacttgtatctgtgaagttttaataacatgttttattatagtattttagatggattttataaagttttaaaaataaagtctaaaataataattttgaattcatgtgattcctacctgtggtcacttctcaaatggtaattcaaaaagtacctgagttcattctgggttttgaacatagcagcaaagagcccctagttgtagaattcatattgttcctttttgatatttgaaataaatgataaataacttagtaggattacttacttggttaaaatttgcttggtaggagaaaggtccaagaaagtttattaaaggccttttgttttagtgttttgttttgttttcccttttcttaggtcttggtgatggtgttttttggctagaccaaggcaagagaaagttggtcttcagcaacatttcacctccttttgcagcgtttttattttcttctcaaagtagtccatctagtcatcttgtatattcctgttgaattttctgtctactagggcctgtatttagtcagatatctgcattgaaaaaagaaatgctaattttatgtgagatgtgattaactgatattcaattatgcctcccagggttatttggattattgtaacattaatcctttaacataatgagattggttgggggaaggtacaattcatgcaaattgggatggtgatatataaatttaaaaagaatatgtaatataatttctaaaaatcagtttctacaataagaaaattatatcttcattaccaggctagtatataaggtaaaaaactatagctgcattcaatccacttgacttttattagcttccttaatatgttatctgaatttttgatagaatagtactagaaatcttttttcgaaggaatggaatgtatgtctttggctttctcacatactctatttcttgatggctttttaaaagatgtatttttcttaagattaccagattattttcctagtgctagtaattgcagtatgtaaatactcagttttatagttctgtgacattttctgcaaatcttttatcctttattttattttttcaagattggtattctggtttttatttgcatgtagtcaacaaaacccctgactagattccacttcttggtaaccatacacattacgctagttcttttttatattcagactcctgagtagctgggattatgggcatgagccaccgaacctgcttagttctttagttacacatttgtcatagctgttcaaatgtagtttgatttttcaaccttttttgttttattttcttttttgatgcagtccaaattcaaatgatttgtactttgaagattgacataatttgaaatcttgcccattactgttttgtcccttacacttaaaatgtgatttactttcagttaattagcaaatatttattgaatacctttcaaaataaaagaattggggccgggcgcggtggctcacgcctgtaatcccagcactttgggaggccgaggcgggcggatcacgaggtcaagagatcaagaccatggtgaaaccccgtctctactaaaaataggaaaaattagccgggcgcagtggcgggtgcctgtagtcccagctactcgggaggctgaggcaggagaatggcgtgaacccgggaggcggagcttgcagtgagccgagattgcgccactgcactccaccatgggcgacagagcaagactccatctcaaaaaaaaaaaaaaaaaaaaaaaaaagaattggaaacaactaaggtagagaacggcaggagcatgaaagagcaattttagttgatatagacagaatgtgcaggatgtaaatagatccagcagaggcgctagggaatgtcccttgggtgagaacttccatgaagttgaagcaatgtgtgcagggaaaagaacatcaacttgggctcagacatgtggttgtcattcaacctgggcacttgggacctacaagagggggcacttgggacctacaccatccaattaccatccagctccctcacagtctccactccaccagtttccttcaataactctttaactctgcctcgtttcccagagggcagagggtgggtccatatacatggctattctgaacctctgtttctatctgtaaaatggaactataacttgcttattacattattatattgatttcctaaggcttatgtaacaaattacaaatttggtggcttaaaaaatagaaatgtattctttcacagttctggagagtcacattctttccaagaaccttagggagattccaccccttgcccgttaacagcttctcttggctactagcattccttggcttgtgatgatttcacttgaacctctgcttccctgatcacattgcttttcctcttctgtctgtgttaaatcacctgcctctgtcttaaaaggatatatgtgattggatttaggtcctaccttaatccaggatattccccccatttcaacatccttaatttaatgacatctgcagaggctttaccacataaggcaacatttacaggttctagagattaggacctgatatctttagggccattatttagcttactataggtattataagaattaaatacaataatgaaacagctgtcagactcagacatgcagaaattactgtattttgaattagtttctgatactgagtaacctggcttaagaacagacaggttattcttctattatttgtttgttctctggattgttcttagtctttttggggaaaataatcaatgcagtttttatcaatgagttccatacacgtttgaaatgtgttcagttgaaggtttagacctaccttcactcctccagcactctgttgggacatgtaaatccccagagggatatctgtctaacttttatccaactgttgtcttcatgttgtagaaactcctgctttttaagcttattgcttatatcatgatgacccttaggttcatggtcttcctttagtccttccacatttcttctcaggaatgtggcactacaatactcttgccccgtactgggatgctgtggacttgacattgtacttagctattgcttctctgtcatgcttggtgaagggcttctatttaagggcagggtatagactttcctaagtctatgctctgatttgagccacataccactgttaaacctatccggagtcttacaactcatagagggttctgttcaggaaggaggcaggatatggggtcacttgggacctacaccatccagttaccatctagttccctcacagtctccatccactccaccagtttccttcaataaccctttaactctgcctcctttctcagagggcagagggtgggtccccacaagtgacaatggaggattgactaggcatgcttcttcctaaataattatatttgtcaaaaattgataaagtctactgtgacactcaaaaaaacaacaaaatgcctctttgctattttttcctttctttatagtgtagtatgagggcagaattcatactattttcttagaggtagaggaaggtaatgggtccaaggaaacacaggttggcaaagcaaacaaacaaacaagcatctttgttgatatcttgaaattgtctcccactgcagttgcaaagaatacagataccgtgcttagcacatagtgcatttaataatgtgtacctgtgtttcataatcttgaaaataccagctgagtttgtgtgaaaagtaaacagaagtaaggacagatttttaaggatgcaacttcccccttggtagctcagtgatcactggatgtccctccagtttgtcttgcagtttttctagcttattactggtaacacatccttccaagtgctaaggctgagaaccttgatgtcttcctcaagtactttctttttcactccatatccaatttgtcagtgaattctgttgtccctaccttcaaaatacatcaagattctgtgtattttttttaaccacatcaactgctaccatgctaatgtaagctgcatcatctctcctggggttagttccaatagcctaccaaatggtctttgtgctttcagccttttaaaatcagttttctgctccacagtgtgatcctattgaaacttgttagttcatgttattcctgtgttcaaaatgacttcccatctaacacagaggaaaagcctagcccttactatagactgcagggctttctacaacccactatctcatccccattatttccttaacttcttctcctgggataaccccttttccttgttcagcattagccacactaacctcctggctgtatttcaaacataccagcctttctctcacctcaagggtttttttttcttgcttctcctctctatctgcttggctcctgtcctcttctcctttaggtctctgtttaaacattaccttctcaatgaggccttcttgataagctgatggaaatggattcctatcccctgtcctcagcactttctctctcttcgctgctctatttttccctgtaaggtttatcaccactattatggtttaaatatatgcccctccaaatttcatgttgaaatgtgatccccagtgttggaggtgggcctagtgggaggtgtttgggtcatgagggcaggtctcttgtgaatgacttggtgccatccttgtggtaatgagtgaattctcactctatttgttcacacaaaagctggttgttcaaaaaagcctggcatgtctattgctgtctcttgccgtgtgacacgcctgctccccctttaccttcctgcatgattgtaagcttcctgagacctcaccagaagcaggtgctgctaccatgcttcctgtatagccatgagccaaataaacccctttcctatataaattacccaacctcaggtatttcttgacagcaacaaaaaatggattaagaccactactttttatgattcacattttatttattgtccatgtattcccattagaatgaaagcttcatgagggcagttattttgttactgtcttctccactacaaaatttttagccctaagatgagtttttgacatactgtgaaccttcaacaaatatttgttgaatggatgaacaaatgactaagttataactaactgccagactatatgcatttatctataacaggcagaagcagacaagctttttgggcagggttcacattcatacacatgttttaggaggtttgctatgctatcggtgtccacgttggattagaagaatgagaaagtagaggcttgaagattagttaggctgaacaacaaaaggcaaaggtctaaattgaaatggtgacagtgggacctggtgtgggggttgtttgttgtgtaagagacactcagagaaagaatccctgctatctgagaatttcaggagtagaagatattggagcagacgtagagaaagttgcaaaggtgagttgtagtctactttttttgacggaatgtggtaaaaatgacagtaatggagacgggataatttaggaagaaaaagtcatttgaaagggaaaaatgtagatgactttgtttcgtttttaagtttaaaaagttttttggtaccatttgaaattttgtatgtgtacagttcagtggcgttatatgaattcacattgttgtgcaaccatcacgactggccatcaatctctgaaatattttaattttctcatactgaaactctgcatcaattaaacaacaaccctttattccctactccctcctacccctggcagccaccattctactttctatctctatgaatttgactattctaggtaccttgtataagtggaatcatacagcatttgttcttttgtatttgtcttatttcacttagcaaaatagcttcaaggttcatctatgttgtagcatgtgtcagaattacattcctttttaaagctgaatattccattgtaggtactgcgtataccacatttgttatctattcattgttcatggacatggacattaggtttccaccttttggctattgtgaatgatgttgctatgaacattggtatacaaatttctgtttgagtccctgctttcgcttcttttgagtaaacagccagaagtgaaattgctgatcctatggtaattttatgtgtaatattttgactttggttttagacatactgtatttgaggtggtgcacagtatagtagttaggacaggagcatgggtgagaacaattatagccagagatttcacttcagaaaacctgacaaattagatggttgaagaggtgagaatggattaatttatagggggagaaagaaaagagttgaaccaagattgtaggaggagaaggagctagtggagccagtcgatgggatagaaaaggagcaatcagagttaggaatagaaccccaagtgttgatatatacttagctcaaactcatccatattcattgaacactcttaactgaacttcttttttggatgaataaatgtctatttaagaatgatattactttcaagagtttgggtgttgtaggtcacaaatcactactgaatgttgaatttctgagacataaatgctttttaaaaacatcctagaaacagtaaaacagcagagagtttccatattccttatttggttgttctccatttcctattttgcattggtaatttccagtttcttttcttttctccaccttttattgaagtatggcatacattaagaaaagtgtacaaaccaagtgtgcacaactcaatggactctcagatattacatatactggagtaaccaaccccaagatcaagaaacagtattgtactcaccccagtgattccgttcatgcccccacttacttaatgtctccaaaaccctttctagcactgtagattaattttgctgttttgaaccttatgtaagtagaatcatgcagtatatactatctgtgtctggattctttaattaaatattgtgttcatgaaatgcagtatttatccatactgttgtgggttgttgtagtatattttcactgtgtgcttttacacaatttacttgttcattctcatgtcagtgggcatttgggtagtttcaagtttggggctattatgaataatactactgtcaacatcctcacagtttcttataaaaataggaatttcgcatgttatagtcacctctttaaaactgcctttgcttacttcatttaagtgccttttctgccaagtgccttcccacccacttaattatcttcattgttaatacaaaatatattttccttggtattagctttgaaagtataaagtgccccaaggaattgggcttcttaaaaaaaacctgtatcttcttgtattaaaattttcctttaaagcatttattttaattcttctcagctatccagattagtctggacagtcttaaatgcacatgaacctgtcaaaattcttcatctcttaatgaggtgaattgtccaaccttgaaataaatactttagttttggcaccatgatgagtcagagaaaaaaatagttcccatatacttaatgcagatgtgttatcaaacttatattatttacacagtaataaaaggaaattgagataacaaaaagtacattatgatattttatacatttttttctttctagacaacagtctgctttggtataaaaatgaacattagtaattgaaaattgatgacaaattttatcaatctggctatctcataattaagttgaaatctgctatgtttaacaaagatgcgtaatacattttatatgtttgtatgtgtctgtgtgtgtatatatatatatatatatatatatatatatatatatatatatatttgtctatctgtcaacatactcattgaaacattctttacagaaagaacaatagaagaccacgaactggtgattgaagtgctatccaactgggggatagaagaagaaaacaaactatactttagaaaaaattatgccaaatatgagttctttaaaaacccaatggtaagtgaaatccctcctaatagttacggaaaataaatgaacccgttaaattttatgtgaagaagatagtcactgtaaataaaatacagtcctattcggtaaattgtagatgaagactctggtcctttgaaattatacccatatttcttatgctaacaatgattagtgaacattatacacagaagttcagatacacaggtgcaaaactttttaaagccgtattggtaaagtctgaattgagatgaatttggtttatttaatttaaaagtattaggaaacctagttttgccttttgtgaaaaggtaacaattatacatttgatgtgggaaatgaatttctataggttctcacccagattaggaacaagtgttaagcaaaatattatatcttaacactttctatagaatttaggaaatttaaatagctttctaaagtaaaagcagactaatgattgttgagagtattataacttagccagaaattaagattgacatgaatcttgctattccaaattattttgttttcggtgcagtaatttttgaactaagtagaaatgagataaagaccagtgcattatctagtaaatactactttcattgtagttctctttaaaagaaaataaatgtgtgtcacattctaatgaagactagggatctagaaaagtcagaatagcctctgggctcattattttaaattgtttttgtctctgcagctgaagcatatttttacactaagttttggatgataattggattgaaatgattctttatgaaaaatatatgatacacaccataatagaatattttcaaaccctgaaagacctctcacgttgtcttttatcttaacctattaatagaaacataatgggatgatctttggcaaagaaaattagtcataataaaaattaaataaattcaactgtgaagagaaagtgtttctttttgttgtgagtccttattaaagacaagaatttaaaaagatatatttaaagaaatattgttcaatgcttgttttttatttattttttatttaaacaaggctggacatttgttttgtagacctattgcagtggttcttaactgggaggtgattggacaatgtctggacacatttttggttgtcacaactggcagtagaggggagggctgctagtgagcagaggataggaatactctaaacatctataatatgcaggagtgccccccctcaacacagaattattagaccaaaatgttagtagaactactgttgaaaaaccctgtcctagaggaaatatagtagaatatattttcccaaacttgtctaatcataaaatttactgaggggagagtgcttattaaaaacatagaatccaggacttgcccggatctactgaatcagaaactccaggaatgaggcctgggaattcctattttaaacaactgccctgggtgaattttatgattaaaaagtttggaaaaatggtaggtagaaagaactggacttttagctcccagcccagtttaagtcctgacctccactgtgctgtgggctatgaccttgggcataccctaaactctgtacttctgtgagcctgttccttgtaaaatgtcatggatagtccttttgacctgataggctggttgcgggactcaggaataagatgtgggagcaagcacattgtcaacttcagggcagtgttttataactccagatacttgaatccatccacatcagcattatctgggggcatttgctaatctttgtgcccaactccagacattctcattaaggtacctatgagtagagtctaaggacgggcattttcaaaagcacttttgggtgaattttagtcacaccagtttaaagaacttttgcttttgattactatattggtcataattgaatcttttctagcatgaattttgtgataatttaactgtgtctttttgacagtatttttttccagagcatatggtatcttttgcaactg

SEQ ID NO: 15606 - DNA, 124471 bp, Homo sapiens
atagctcggccgcgcgtctcagccgccggggccccgagcgcaggcggcgaggccaccacacctgcagagcgctcgggctgcctagccggcacctcgcctcccgccgcgcaaaccccttctccccacgcgccgagtctcccatgacgcccgagccccccggccggcgacaatgaccacttccctgcaagatgggcagagcgccgcgagcagggcggctgcccgggattcgccgctggccgcccaggtgtgtggcgctgcccaggggaggggcgacgcccacgacctggcgccggccccctggctgcacgcgcgagcgctcctgccccttccggacgggacccgcggctgtgctgcagacaggtaggcaaccctggagggcgcgggggagtgtcctggctgggcagccggcgagggggtgaggaggcggtcctagggggtgagccatgtgcccagagctgggccaagtttgtaaaagtctctgaagacaatcccctttgagctggctcctaccggatcagcaggacattgcgatctcacagcgccttataaatagcatcaccgtttcattgagagctctcatctctctcgcctctgcccatcggtggtgaaactaggagctcaggctgcaggctgatcaccttctgttccttcgtggccatgcattttcacaaagtaaactctattttattttatatattttaaaaaaatcgtagcataaatgtattcacctcccacatagagtcttacagcgaccctgtagaagcaaagcatggattgacattcgagcagtcttgctgttcggcaggaaagaatagaggctttaaagggtttcccaatctccatagcattcagcactaagtgcctttagagttgcacatactttcggaaagaaaaagggttacagcaatacaaaaatctatagtcctttatattcatacatttaaatgttactttttttttcctgattttcaaagcgctccaacttcagtgaagttaaaattactctccagtggactatagtacatttatactagcaagttctattaacttaccgcctcaaaacactgccttgctgtttaatatctataagcgcttgaaaaatcaacagactgtgtgtgggcaacattgtgaatgaaatttgaagtgagatgaaccacagctataattaataaatcataacttccaaaagtgattagtaaaatatcataaggatgaatgcactaaatgcaacttagagactgtcaatatcatggatgcataacaatgtatgacttctcaggtgatgtttggattagtaattgtatagtctatttttctgtttcaggaaaattatcaaaagtgatggagtttctatgcctggtgatttaaaggcaagagagagagaaggcggtgggggggggaggggtggtgggaggggagagagagagagagagagagagacagaaagagaggaactataggagatttgtttgtatctaattaacatactgtattttgacccatagaaagtacatcacagaccttttctatatactttatataatatgagccttgtcacagagtggtacatgttcgccttagcacactttttattcctgacagcaattatattttacattctgttttatgtaaattacatcctatgttctcttactgtaggagaaaaaagaaagatcttgatgttccggaaatgccatctattccaaacccttttcctgagctatgctgttctccatttacatctgtgttgtcagcagacctatttcccaaagcaaattcaaggaaaaaacaggtatgcatttttaaattttaaatttcaaaaatcttaggagttctgaatccatacagtctttaaggtgttccgtaatttacagtattaacaaaggattagcatgggctctgttaaataactctgttgactgacatggtcctttggcattattttccatttagggccttattcttctaagccgtataatgggaatgttaaaacctacctccgagggtcttgggatggattaaaacagagaatatatataaagtgcagtggttgagaacaataatcattcaccagataggtagaagagatgatcatttttaagccaggaattgggcagaggctgggacggggtgggcagtagtagtggggtgagaaggggattgactgattcctttaatactttctttaatttttcacattttcaacccaagccaacctcatttacctaaggaaagtgatatagtgatgctgtggcaaaaggtatttagaatttagggtcaacatgtcttcatttcagtggattcctcagtttggaggctctggctgcagaagatagatgactcgtagtgataattagaagactaaggaccatatctttatgattttctccttttctagtttgggattgacttaagcaaattagattttaaggaccaagcaactaacagaaaatacatcatggctgtacatttggaggggaaaaaaatagtgtatcatagaataattcatctcttgtcatatactttctcccagttttgacccagcaaaacaaagagaagcctcactagacaaaatgcaccttattcttacaagggtggaaacaatacattgaaatagccaggtacttgaaatgggagaaggataatgaacagcgaggacaagacagttggccatttttccgcgtctattgctctctttcttatttctgcacctttattgcttctaatgggttcaactatgtgtgtttatatttttaggaatggaggaaataccttaggaagcagatgaattattgatcatatacagaaatgatagagacagtaggaaatatgtttgatggaagccctgtgtatatatttttggggggaggggcttgaagtcacttggtacacaggtttttgggtaaggattggagaaaatgggaataaatttttctagaagcagaactatgttctgaattggcatctttgaaagggggaataaacccttaagtgggtgggactgtaactttgtttggggagacaaagaggagactctcttgagacctttattatcaggatgaggtttaaagtcagatcccaaggaaaaaacagccctagtgaaacttccaagctctttgagagttgactttttggtttggatagaaaatggaagtaaggataatagatttgactgtgtgccatggtagtggaaaaaaaaaaaagaggccgggtgcggtggctcacgcctgtaatcccagtaatcccagcactttgggaggctgaggcgggcagatcacgaagtctgaagattgagaccatcctgtccaacatggtaaaaccccgtctccactaaaaatacaaaaattagctgggtgtggtggcctgcacctgtagtcccagctactcgggaggcggaggcaggagaatcgcttgaacccaggaggcggaggctgcagtgagctgagattgtgcccctgcactccactctgaacgacagagcgagaatctgtcccccgctgacactacccccccccccccaaaaaaaagattctggcttgtccttgagccagagtaagaaaaggaaatgtctgatgatgacataatggtcatctggaagaatttaataggtagttcccaaattactaagggcctgctatgtttctcacaaatcctaggcagtaaggaccctagctaagcaacaataccatgcaagatatatttaaaagatggggctttgatttggggttgtggtagcgggtggagcctgaaccagaaggaaagtaaagggaaggatatctgggctgactcactttaatgctatgaatggacacttgcagaatgcctgtgtctgagagatttgttgatgatgcagggtttgttttgaatagaaagtgagaagaggtgttggtatgcttatgttagtataggggacaaaagagaaagaatgggtaaagtgccagggttaaggcaggatgtgccctaagtgtggatagtcatcagactagagtaagacgtcttagagattgatgacatttcctcagatcaggtttaaactggaaaatgggcaaaaaaaaaatagcaaactggaaatggggaaaaggtgatattgttattgaccccaataggtttcctgctctggccttgtatcctgtgtccacaatgaccttctcaaagaacactgtacccacacacacacctgtactgttccctgagcagagagtccccgcctgatttttaaagatccatcccagagggctgtccctacctttgaagggcccttcttgctgatctcttccttggcccaatggttgagatctctatgaagacaagggtaccccaaagttgaggaggagggaggctgctttttactttattttatgcttcctttttcccccacctagactttgcatttagaactgatccttttgctttagtttctttatacacactcagttctttgaaatgaggaaggttttgagaatagatgactctatgtaagtgagtcccccaactcagtagctttgcaacacatattacccttttacaagatgctgtttttggcccagtttatctgtaaccttcagttgagatgatgtaagtgactatgcgatatgttctactgagtattatttatggttgaaatattataggagaagatgtctctttactttatattctctctcatttgtcctgtttaaccattccagtcattttagtgattcttttctctccacagaaaaagtgaagaaaataattgtacttgttatttacaaatcaatgaccagaaaatttgagagaatccagactaaaaatgttaaatttcatctggcctttcaaaatcacagtcaaaaaccatcttacaagtcataaattttgtttactatttgagatgcctacataatgcatgagtggtaaagtgcattgaagccacaaatgggatatgttttatcactttttgcaaataaaatgtcccaaagtgtacaatactgtaggctttcagtaccattatttttaaatgaaagctagagtgagagagaatccatattctttttttttttttttttttttttttgagacggagtctcgctctgtcgcccaggctggagtgcagtggcacaatctcggcttactgcaagctctgcctcctgggttcatgccattctcctgcctcagcctcccgagtagctgggactagaggtgcctgccaccacgcccagctaattttttttgtatttttagtagagacagggttttaccgtgttagccaggatgatctccatctcctgacctcatgatccacccgccttggcctcccaaagtgctgggattacaggcatgagcccctgtgccccgcgagaattcatattctttattccctttccctctttttataatgatggccagatttcctaggcatctttctttgtgtttactaataaagcaaatttaaagtataccttcccttacatacatggtccagaaaagttacttatattaaaagtgacttccattatgaacttaatctcttttttctaatttatgatttaaatttataaggaaatcatctgttagtaatgaaccctaaacacctattgtttgaaggaaagcaaagagttagaaatctttatttagctcttgcagcagaatcagttcttgtcttttttgttgacccctaggtaatttttgtgcttggacatagcctgtgtagtagctctggttaattgcttcccaggactatgttgtacaactaagtaagaataaagcctctgaaggctttagagatttaaaaaatgctatgaaaaccagtgtcatgaaatgtttgagttggatgggatttttcagatcttctattccaatattcttctttagtgatacgtaaattgagtttaaggaatgctatgtggcacagccagcacctgaaatctggatttcttgaggctttgacagtccctttttaggaaggtacaatttctaaagaaagcaaggactgtaaataagagtagtataataatacatgtgtaccagtgttgttagttacaactctcctcataacacaagaagaacaggggagacaaacgccatttgttaatattcatctaaggacctggaattcctctttttatttcttcccgaaatgtaactacgttttttcttctagctttcttctccatcttctccctaaaattggtctgagaaatctatcaaatatttgattttattatcaaataagatttattagtattattaataaccagcttttgtgtgtggtttacggtccacaggatattatttcatgggaacacaagaaaatgagtatgtcacctgcattttaagattacaaaaagagtatgcaaaaactggaagggatttgcccatgcttccacagtttaaataaagggagatcaaaaagagtatcatgtctcaatgtgtcctgtcccttaccacactgtttctagtgtattctttattaaattaagcctttttttgtatgtctcagaaaaataaaaatttatctcaaataattaaaaaattagttttccatatgctcggccttttatttcttttttctctaccatgtcacggactttcaaaggataagcagatctctgtccccaaattaaagggcctcttatatcattcctttgtgatgccagtaattaccccactttggacatgctgaacttgtatgtgtggtcctataggaatcttgtgtggctgctacattaactgaaatttcatatacttatttttctagtatacatagaagtaaaagaagagaaacccatgtacatattgtagtttttccagactcagcaattatcaagattttgcctcatttactccatctatttcttttttaaaaattttattttctttgctaaagtattttgaagtatatcctggacaccccatcattgcatctctacgtagttttgtattcatctctgaaaaatgaattttcttttatatcccaaatgccattattccctaacataaataacagcaattccttgatatcgtctaaaaccattcataattgaattttctcagttggaatggctcatgaaattctcaaattacaaactgcttagctttcaaatgtctgaaaattagctctttggaagtttaaattcatttttagatggaaacaacatcataaattgtatttaggccctctgagctattttacaaaatcccatttaattggaaacaaaacatatatgcagaaagaatgatagaaacaatactctctcctattagggtttcaaacaaatctatctttccaacggcaatttgctacttttgagtgctgtcacttgatgaatataattttttgggagaatttgaaagcgtgcagatctttgtagcagtgttgaagcaggctttacagctgcgcttctcaaagtgtggtcattaaatcaccttcttcagaatcagcagggatgcttattaaaaatatggatacttggacctcttgcaaaacccactgaataggaatgttctgggggaggttataggaatttgattttttatatttttttctctttgatatgtatacaaatcagtgctactcttaatctctaccattttcaaactggggcaattggacctttcaaaactgaggacagttgtgttttgttgacaaaggtgagtatgttacaaatggcctttagttggtattttagccaggtattgattgttcagacaaaacagagcctcaaatgaaccagcctgaaaggctgtgttgtagtacctgaaggccaaaaggtcactggtctcatgagaggctgaaattgggagcaagaaagtcagcaaaaatcaagtcaaccactttctctattctctctcttttgttctcccacaaacataccacatagtctctgcctctccttgcaaattcacatcatttttgagatttctttgcagtgttgcttgccctgatttcatgtcagtgccagcggcctcaagtggctgctcccaagttttccacctattagtggttcagtacttggtaactgactgggaactgtatctggagaggtatgttagtccagtgtgtccagatcctattcaatcagatgtggccaaggggacagtgggccctggaccactgttcagtctgcaagggtgtggtaacatgtgagaaagaggtacaggtttagtaggtatggcatatggaggcactatgtcctaggggcagctagtgtcctaggggaaaaaaaagatctcaaacaggacacaaaaactaattctaatcatatttgtatgatatatgatgatccaccaattggtttatttgacttaacgtacccagttcagagtgttcagctcctttgtctcaattcacttaatgtacgtgaagcatacttattgggcagttgtttcagttgatgtcacccttcagggatgctcagcttccttgtccattttcctgagcttacgtcttactgaggtcccttaacccctgatgacaggaattaccaactcaggttccttcccaccttatgctagttaccttcattgtaggagaagttagctttcttttcctattttaaaacttaaatcccctagcagatcttctatttgtcaaggttttatttctagtttgaaggttgcctttaatttttggttaatttgcagggtacatttgcagtccaagctttatctacaatatgggttttctttttaacgttattgaaatctcagcttctggtttgtttttccctggggcatataatatgttctgtcaagagaaagaaaattggagtcatcatggttcaatataagtgtggattttaattaatataaaaaagatttctgcagtcttatggatattgctttgaaaaaacgtcagcttatgtcaaatagtaataaactctattgtataagtatatgcttatgtgtatttcaatggtggtaagcagacctgagaattgtccttttgacattacagataaaggtcagctcaagggagaccccagagaatggccacaagtctttgccaaggcaagggagtagaaagaaagggttcaggattaatttagaagagaaatggcaggactgacatagggagaccatcctttaattcttgtccttttctttggcccactcatttaacattttttcaaagccacagaaaaaataaacacaaataggaggtttaatattcttaaccagcttacaaatgcttgtattccagaagatctttaataaattggccatttattcacatacatttttccatagacgtattgttacatgcagtggttaggtggtcaggccaaagccttaaaatccataatggctccaaagtatagtgctcttacaacattgcgtgtaccgtttttaaaattgcttctgtggaaagatgtgtcaatatgatgtgactgaaagatattggaacaggaatcagcaaacctagtttttaatacagtcctactacagatgaggggtgttatatcagcccattgctcaccctttctgtacctgagagctctacaattttattgtattcctagagcaagtgattctgatggctccagaagcagtaatggctcctgtgcagcagatacaggagtcgtggaaagcagggtttcttttgttccactagccctagaagctccctcttagcctctgttcaggtattcccatatagtgaccacacttttttgtgataaagagtatgtttggggtgtcataggacaaagagcacaggagtcacattcatggaaataattggggcagaagggtctggttaaactagaaactgcagcaaagtcatagttcaaatattagaagaagaatcagaaaaggaatcacatctagtaggagccagctcaagtggtgaagttaaagtacaggaccaagcatctaaacttagaaataaggatacgagataagatgtgaccacttgaggccggcataggtccaatacacatttggctctacttggtttaataggtacggggtggtcgtaacctctgaattctctaaatttatctttctccaccctcaaatcatttatttgattacttaagccaaaatttaaggagtccactttctgttcttgttaagtactgcttcatctttcatcaaagtaggcttgaatctatatacatctccccatctctgctgccaccatcctaatttagccattgtcttctcacctacaggagccccataaatggcctcctttcttctgtgttagcttatcttggttcattctacatacacttgttatagggaactttcagaaaggtaaatcgcggcatgtaatttcctggtttaaaaaattttaataccttagaatgaaatccacatttcttcctttgacaggactctccatggctttgtccctggctacctcttaaacctcatgtacattctaccctttgttcattagactccagccacagtcctatctatttgtgaacttagcaaacttttttttctatctccaaggctttatcgtagctgttttctgagtctggaacctatttccctggctcctgacatacctgattcctctttattctctagatttcagtataaggtcatctcatccaggagatttttttttttttttgaccagcctaaatgtagcctgttttttttttttttttaatttttttttcccatcacatttctcagtttgtttccttggctgcacttaccataatccgaattgtctcatttatctatttggtctagttgttttattctttttccctctatgtgaattatcttggctttattgttcttgggttatttcatggaaagaatgaatgagtaaatggattattgaagatacatagttaaaactaatttaacaaattatattttgacatgtttattctaatcattttcagtcatcttcattaaattagaataaaattaaatttgattaacagactctatttaccaaaataaattatatttttattttttaaaattttttcttgacaattatttctttgtaatgcaaaaataaaattgaatctagatcctggactaagtggattttaaaagtacgtatcttttgctttcatttaacacgtatgaaaatttgatccgtgtaatcaagatatttctgattttatacattattttttatatagtataattataagtgagtgcccagtgaactgctatactttctttaagtttactgtgtgttcataagatccacagctttagaaaagattaagtggaaatattagttaggtttatagtatgagtctctcagagcaagaggtatatgctagcaaatgttttaattattaagaattaatatcagtggtgaattatttaggtcagtgttcatcagatggaagtggggagacatataccctttgaaaatacatgaagactttccaagggttgtcaaacatagatttaagagaatcagttttcacttcctgagaacccacctgtgctcccagtaagctcctcttggtgcattaccctggggcgtgtaaacatccagggcatcacacacagggaaagcttcctttagtgattaatcaaagcatcacaaataagaaggagttcctttttaatgtcttaagcctctttctgttaagggtgaatcatggtggaaatgaggattttgaccagtgttgaaatattttgaattcagatagatgatggtgtgatgaagtaatcacaattttcatttttcagtttttgacttcagttcttccatgtcctgactgttgtcaaagaatatataataacccttgagggataacttcttaagagcaaagcaaggagtgcatcagtgagaaatattgattgctgaaatggccttttgtcatatatttaaatgtactatctgctattctggatacatatgtataggatgctgaaagaaatactataaaagcactgaatttatgtaatttatataataaatatgtatttataaatgcaaagaaatcctataaaagctgaaagaaaatgcacgtacaaacacctgatatgatataggttagtgctgctggtgaagttacctgggaagtagacttggagcacaggtttgccttcaggaagtttgctggggagagcccgtggaaacaatacttgtaggaatggacacagggagaagttgggctgcagcacagccacagcaaaggtccagttgatcccgtaggagagctctggagctggattggccctacagaattgttcagaattagggcacaggtgctgggctgtctaggaaatgtcagaacttgggcatggcagctttctttagcatagtgcaatggcagtcaaggaggccttagccacaagtcttagtggctgatactctaacagctgggagaatgagtgcttcagtcttgaaggaggtgggtttggatgttgtgccacagtatctgccatagttagtaactgatcttttaaaatgttaatagaaatcattttggggactaccaaagttttcaagataaattggttaaaactcaagaataaaacatatacatgatttctttcaaattttgtgtgtgttattcaatattgtacttactattttggcaaatcatacgataaactctttattccaattccagtcaattcccatcctattttatcataaaatattttaatattttctaatacctaaaaaatgatatgccagctactggactatttattttttaatgtgcatgtaccgtttgcattcctgaaaaacataagaaatatttgtcatggtgactactacatttaatagaactatttctaattttatacttgatttttatttagttatatccaaaagctgaaacccaatggtgaaaatgtacagtaacacaattgccaaaggaattctatgtacttcctagcacttcatcatactccccagaactcttagtcctgtattaatttaactttttttcttttttctttttttccatttgtccaaggcatgaacgaggcattggctactgggatatataaggggttactttgctttgttcctagttgatatgagataggcaccatcaatgtattactttaattttgactgctttcagctatttctcttctaagatacaattcataatttatttttcagtgttttaaatttttttttctcaaaatttaactttgtttgctttttttttagagggagtctcgctcttttgcccaggctggggtgcagtgggtgatctcagctcactacgacctccacctcctgggttcaagcgattctcctgcctcagcctcctgagtagctgggattatgggcactcgccgccacacctggctaatttttgcatttttagtagagatggtgtttcatcatgttggccaggctggtcttgaactcctgacctcagttgatctgcccgcctcggcctcccaaagtactgggattacaggtgtgagccactgtgcctggccaaaatgtaactaatttgaattgaaaagtaaagttgggctttatttgataaaatataagtctgatttggccaattgcttttgagagtgaggattaactttccaattatatggctgacatttttctttagaaactaaatctgaagccttaaacttttgatgaacatatatataagacacattataagacaaaagcatcttaggaaaaaaattggaaagcaatcatgcagaagcctcgtacttttggtttggccaaggtatgataaaattaacacattttccgagtgtattaatttgaacaaagtacatttaagttgaagggtaaaaaatcattaatggctaatggtaaagctttgttgatggtaaagctttgttgaaactatccagaaattgataaaatgaatgaatctgggtgacaaatctttatcaagtcagatggtttctaatttgtcattttcagttgtattatatgaggtccttaactgatttgctggttaacagattattaaagattattttagctctgatggagttcaaagattaacattgccttccaccacctgtgtgcttcctcttctccctcgctcagattaatttttctaactagcatttattattatctgacatgtgttatgttcacatatatatggattcatctactgccttttcccagtagaacataagctctgtgaagacaggaactatttgttaattgagtaagctttatttattcaatctctagcatgtagaattatgcctagcacttcacaggccctcagtaaatttttgctgaatgaaagaataaataaatggagaaatgaatggataaagagctgggaagtcattgttattaagggagagaatatttggaaacgtactgatattttaatataaatgatatcaaatgtgtaaagaaactttgaaaagtgaaatttagtttattttccaggaagagtctgatattgtttgatgttaaaaaagagcctggtcaggataaatgtttgagtattgatttaccactataagcacattctaaatttggattacccttggtcagaatgggttctgttctttgtctctttggttcccttgtaagcattttcagtcttagcagcccatgtatgccagttaaaaagcatgcatactttatagggctgagtccagtaaaagcttttcaatcaacccacattcacagtggaagattactttcattcctgggaagggtgacatatgcgtgtgaaacacagtattcagatgaaagggctactttggtattatttaactgtgtattggcaagactctagccagtatctagtttctctttagagctattttgcattatattacagtagtcttactgtgctgtgccaaggaaattaagatcagctggaacactctgtaggtcattggcttggaatcttagggcactgggaacttgatgttttgttttaatgacctcatttaggcgaaatctgcctttgtcccagaagcctaaggggccctttacaaaaccatgcctgcaccttgggaaagatatagaagaggttcagagaaaaatgactaaatatttaaaggtattgggtcaacctccatgtataaagtactttataaattaattgactctttagtcaagaaagacaaagaggagtcgtaatgaaagtctcttcaatacagatttacccgccaagttccatgatatctgaaacatacttttaaagttgaaggatgtaattttaagaaaaattgaaagaagaaatgattacacatcatgtaggggcttatgggtattgtgtcgtggcaaatgatttctaaaagggatttctaggggcaatcactcttgtggaatgatggacctcctccatatttctcaaagtgggagtataagatgcatatatgcatatgggatgtgtggggattgtgggagggccatatgggaagttgcatgataaacatggaacacctttttggaacgttaactttaattgaaaatatgggaaaaacattcttatattaaaataaacactcctgtatttatgagtagaatacataatgtgcatgaatttttaagaacaaattatacgcctcagatattcttaccctgagatggcaaaggctgtacaattactttcttttgcatgttgggtatctctggtggaaacatttgagaagtgctagtgtagttttcatttctgtgggaagtggctccttgtgactctcatgagggttggatatctctttattctttagccatagtcctttctagagcttctctgattttattggtatctatatcactaccagtaaagatattgggttttaaacatttgaactattttcctactttacttttctgcagcttggcaggaaatagctctcaactaaagtctctgaagaccaccttattcctgaagacctacttttgagtctttgtgttgatgtctgagcagttttagacattttgactactttttccttcttgaaatactttcttgacttctgcctcttaaaggttctgttgtaggatttgagtgttggtattccttagggttttgtcctagaacttcttgttttcattttactgccaggatgatctcatctacctccacggcctcaattgcagtgtgcatgtaagtctaggctagatctgtatactgggctgcctgttggatatcttcatttatacggtccatagacatctcaaactcagcagattccaaaacaagtgaatactcttcctcttaaacttgcttcttctctcatgttttccttccctggaaatagaatatactcttcctgtactagaaaataagatatcttagctcttctttggctcctctttatttctctctcctcatccagttgggtaccaagtcctttgggaagaacaactcttggatttatccacttttcaaaacttctctgctattgcaacagctcaggtcaaatcatctcttacataattactttgagactctcctcactggtactctatttttagtagttttctactcctagaggtgttgtatgcttacatgtttttattaaggagataaaattcattaagcataaaattagccattcccaaatctacaatttactggcatttacaatttactgacataagtgcatccacagtgttgtaccaccatctcctttgtctagtttcaaaacattttcattgcccccaaagaaaattctatacccattgaatagacattctccattctcttctccgtctcggcccctcgcaaccacaaatctgcattctgtttgtatggatttacctattatggatatttcattaaaatggaatcatatagtatgtgaccttttgcatctggtttctttcactcagcctgttttggaagtttatccatgttgttgaatgtaatactaggattctcaccgtgaagtaattccaaacagttagagaactaactttttttttttttaagaaagaagagattgttcatacatgattgcttctgctttgtgtctttgttctcaatcccattttatttcccctttttcctgctgtgagggaaacactgttctgaggttggtgagtatcctttctttccatgtttttatgcctttacacatataatactataatgtgtcctaatgatttatttaaaaatatattgtatgtctatctctgcaacttgttttcgtttgacatttttgattaatccatatgaataaatataaatcacttattttaattttatttcattgtatgcatgtaccacaattttttgtttacccattgaagaaaactgagaatttctcaatttccatcattaaagaccacactataatatacattcttgtgcctgtgtgcaagggtttctctattgtatgtatttagaagtagaattgcttggctgtagacaggtgcatgttcagttctactaggtattgccaaattgctctccaaagtggttgtgcccaccagcactatatgcgtctccatttccacactttctcatcaacagctggtattttcagaatttaaagtttttgccaatgtggtgagtgtaatgagatttaattactgtgttcatttgcattaccttgattatttgtaaggttgagcatctttttatttgcttctgtccattcttacttcttctttgtgaattacctgtattattctgttgcattgtttgcattttttaaaatgacttgtaagaatcctttatatggtattgatagctatctttttgcaactgtaaacattgcaattatcttttctcagtaattgtgacttgctttaactttgtttatagtgtttcttatgatacagaatatttttgttttaatttagttaaatctagttttgtacttttgtgtgtcttatttaagaatttttccctctctgtcctgaatattttttcgtcgagttaatatatatatattttttttttgaggtggtgtctcactctgtcacccaggttagattgcagtggctcgaccttggctcactgcaacctctgcctccaggttcaagtgactctcctgcctcagactccagagtagctgggattacaggtgcccaccaccacacccagctaatttttgtatttttagcagagacggggtttcactatgttggccaggctggtctcgaactcctgacctcaggtgatcctcctgcctcagcctcctaaagtgctaggattactggtgtgagccaccgcacccggcctcatgtagtcatttttatgttttactttacacacttgggtttttgacatagcacaatttatttttttaggataggaatttgattttttatccaatgaccatccattcatactagcaccacttattaatcatcttttcttttcccaaagctttttaacattttttcatcatgtattaagttccccttttcataggtggaagcaataatgctaaatggctaatcaaattatcttactcctaaaaccattccatgaatacccctcactcttcagatactgatttaaatgggaccctgaggtactatacagctggaccacctctctaatcatgcctctaatcctttccatctcatactctgtgctttgaccacacttaatttttttttagttttgtacaatgtctttctttttcttacctgactttggtctttacatgagatagatgttcaatcttcctgcatatctcttttccttaatctttaaatagctagcttcaaataacatatctttgaagactcagctgcaagagtcttctcttcccataatagatatatgttaggtgccctgcttagggataatctaccaggtcaattacattacattattagtgttccacaatccaggaatctctgggggcaatagggatcagttggcttggattctggattctagccttgtgccgggcacatactaagtcttctgtatatacttgctgaatgaactgaagtttcagataacactctcacctagagtaggattcatttttaaaatctttgttagatgatcatctgtataatctcctcttgagcattttcaatgatagtgagctcattagcttataatcaataaaatccttttataatgctttcttatgaagtacgtgtaaaccaagtttgtctgtaattgtaaggaaaaaaataattgcacatttttttcaggatattgtctccatccctatgtaaatctcaattttgacctattattccagcatgtcaagatattattgaattttggtaatttcagtaatcatctctctcatcatttccttatatgttcataggtatagaagatgttagtgtcttcattcaagagttaaaagaaagactgtattacttgattaaaattacagagataggaagtggcagaggcaaggtttgcagactcctaatctcccttcccctcccctcccttcccttcccttcccttctcttcccttctcttcccttccctcctttcctttttttttttttaaatttaaaaatacatttggagacacacaaaaagtgttttgttttataaataggccaggcctatactatggataatattgcagagtagaattccaaaggtgggcgtctctgatacattactcttacatggtataaccagtgtgcctgaagggagcagaaccggttttagatttatataaagtttcctttcactgaatgttaccttggacttgattagtttatttctagatatgtaaaattataataattaaacaaaatttaaatataaaaatattttttacttctttgggaaaaacagttcttcaaaactgttaagattgtatcctgaattgtgaaggtctgcagttgtaaagtagtgtgatttattttctctttcactggcttataagggtgcatatatcgtacctttatattaatgatgacacagtttctaagataatttcaaatatgttatttttattcttttaatatctgaatgtaataaatggaatccttagttttgtcctagttttgcagatggaaaaacacagggtcaaagatcaagggttaaatatacagattatgcctgagagagccaggacttgaacccagattttcagatttcaatcccagccctgcctatctaacacaaaattcacaggtagaattctatttagaaactacgttcaaaataccttctctgtgctttcagtattgtagatgtttatatagtgaaaacaataaaaagagttgtcctttacaccacccatgaaaccaaccttaatatgttctgatctccctctacctccatagtgtttttcttatggtatcggtatactgcctttatgaaatatcaaaaatcctttgtattattgtttcagaaaatgtcagaaatcattgtcgttattattattattattattttcaatttataagattttgaatgactttcagaaactgctagggaaattggatcattctaagatcaggatgtattcttactgaaagagtttagctgtactctggggtgttaaaattaactttcattgacagatccttgtctgggatttaactgagatttaagtcagtaaaaattctgccctgtggcctagagaacaattggacaaagtagatgaagtggagaggaatgtattttctcaaccttttttttttccattggaaagaacccaggtcacttgcagagacggtagagatttggcaatggactggtcctgctgttgtgtggtcactattagcaagccaaatactcatcattataataaatgtggggctataaatatcagtgcagagaatactgggtcttaaaagcatggaatcaaaaatgatttaagtatttagagattgaattaaattccatttaaaaaaagaaattaataaatctttattttacttgtcaatataattatccttccatcttagaaaagttgttttacatgtaatgctttaggatggcaattctcaaaccccagtgggcatatcacatgcttagagtatttgatacaagtgcagatccctgggtctcatccttggacactctatttccataggctgaaacattaaaacctttaacaagtacctgccgggagattcttataattctggggcagcttgactctataccacttttgaagaaaccctgatataatctgattgaatcagggtttgaaataatgacatttctcctacagaaggagtggtcaatcaatacaggaggagctattactcatacatccacatgctttatatatgtgaagttctataattttttaaaggataaccattgtctacatctgtttgcttcatctcaaaggtattagaaattgcttgaattttaaattgcattgcttttaaaattaaagtatatttattgtttaacaaacaacctctatggcaacgggaattgccctttctctatgactcctaaagtggttgctgaagtagatcacacaggggggcgctgtttaaatatgttttgtctgtggatagttccaaatccatacagcagagggtgcatgctttaaatgacacaaggaacctgtgacctgattgttttagtttgaattattctaggttgcattatcaatttaatttagactattaaagaaatatgacttgctgaaacttatttaagtaaggatcatgtgaagtttttataagttaataatttagacatgtattcaaattattctggtttcttcgtgttttcgcattacattataaacagtggctctaagtagcatctcttctatgttgggtcttttcttttttagtcataagaattaagattctgatatgcaaaagtgctagttgattataaatctacaacagacagatatcttctacagatgatttgttgtgtaatattttatagtgttttgcctgagaattgaagatatatgtcattcacatcataatatgctatttttcctccttccttccagacttagtgcatatgcaaatactttctttaaaacttgttctttttaggtagcattttcccatatatgcttctatcaattctctattagttacagtagaataaataaacttgagcttggttaatcagaaaagcactgcctactttgtcattctttttgtcaaactgtgaagttttctgaaggtagcgactgttccttattcttttttatctcttcagtttctgctatgaaacattggatagagtaatgagtgtcactgctggtgtcagttcctagatatagtctgtggtggattaaagatggttgtaaattctttactacatttctcattgagagaggaaatctatgtcctatcctcttggaaggctctgattattttacccatacgatactttggcagtgatagtgtgaccatttctggtccaaggctttgattggctttgattccatttcctgtttcttagaatactctctttgggaaccctgagctaccttatctgagccctctctgactatatcgaggcaccgtgctggagaagccatgtgtagattcagctgctcccatcttttcagccatctctgccaaggttttagacacgatggtaaagcaaggttggatggtctagactagctcctacaccagctgcgtgccttttagggaaagtgaccttcactgacaccatgtagaacagaagaattgcctagataaacccttctctccaattccacaaagtcatgagatgtaacgtaagcgttattgttttaagacactgttttggagcagtttgttagtgtgataataagagatccataacacaggctaagttctggagagaaaagtagatggtggcaactggaaggaaacttggagaacatcttatttaaccacatccatttatagggaaaaactgttttccagagagatgaagtggcatgctcaaggtcatctagatggctatggtcactgttaggactcttatctgactttgttgcccttgcctttagaacatcctgtaagatcgttgaattttttactttaaaactagtaagcgaagaccaataaatatagcctagagacacctgaagacctcctaccatgccagaaagaactttgcagtctcaaaaataccaggttccaggaataccctgcccaacaattttgtcctatgtaaacgattataaaaagttacattccagtgtaattgtacatttaatttaacattcaaatatagtaaaagatactagaaaaataatcatgtgcacagatgtatgctatcatatgtaaacaatcacaacatttaggcaatttgtatgccaaaaattctgtggtaaatttgggagcttggaatgcattttcccatagaaacaatgctattcaaaattcaatttaatacctaacatacctaaagtatagtacttgaagttatcaccataattatcagatttctttgaggaaatgctttctgaatgccaacttgttatctacggacccatcagtccaacccttccctttatttggctttggcagaaggacttcctgtttgttgagcaatggaggatagcaccgtatatcttgctctcaggaccagcttgcagaagatgtcttcttaggcttcaggatgaagggagagaaggttctagggtctcaatgcagtgagagaatgtcctctgcttggtgaagaaacagcatggttcaggacttcttgttggttaaatttcttagttcaagtcagctcttggtgattcccctccgctccctattttaagtatcctagggactggtttacttgctttcctttctatctgcccaacagcttcctctttccaaggtatcaattttgaaactcattagagaacaggatgaagtatttccatttttccctatgttcctgtttctaaaactaagaaagtgtttttattttttgcttctctttccttgtctcctcccacttctcctcctccttcttcctctctctcactcctttcttccttctgtctccctctcctcctcctcctgtccttgcatccctccctccattctttttctccctgcctttcttcttctctacccattgtcttatttttcttaaaatcaacccagcttctttaatggttcgagaattgttagctagtatagttaattaaattcctcagtttatttttagatttagggaaagtgagtggcattgctctgtatctttgttgcttgtataaataagacaaattgtaagtgttcctactagattataggcatttgaaaggaggggctacatctaatttttctttataatccctatcacataattttgaaatgcttagcagtatttattgtgcaaattaaatattatagctacagcttctttttattaatatatatctgcactatgaaagagggtgaaatgcactgaaaattattttgacatcctgtaaatccttgcacattgcctgtgtttctagtttgtatattgtatatggtaagtgtatgtgaggttataaagtcaaattttgctgttgattttctcttttagctttatttttcacttttactgatcgtgtttcactgaattcactttcactgatattcatgatgctgaggaattttcttcttgggatacaaccaaacagtggaactgtgtaatgttatggattgatgtggtcaattaactagtcataaataggatatctgacatttaatccttccgttccttagagttagattaaataaatgaaggttttgtagattatttcaaggattaaagactagatctaggaatcattttttttttaaagctggttttttgatgacaaatgaactatagttctttactcaaacagaatcatttgcacagtgagtgacggttccagctttccccaaggataagacaaaaattgtggtgaaaaagttcaaggtaatgtttgagtttattgtttgcttgagcctgatttgaagtgtaaaaataagatgctaacaagtcccaagttgaagaacatattattccacaaaatgttttctttgtgtatttatcagtattttactgtagccattctaaactatttgctatttttatcttcttagaccaaatgtactttaagtaattcctcaagtcatcaagagggaaaacacagctatgagagaatcctacatagtaattttaaaataagattagaataacatgtaaggaaactttttaaaaaggactttggtttttagtcctttctctctctgtcctttatttttgagaaagctggcatcttaatgacttgagggataattacttgtttctcatgttagggttcaggattgctctgattttccttggtgcacaaatattttaggaacaatatttcaaaagacaaaacaacccttactgctttattgatgcttggttcatttctgttacgtatttaaaaagtagctggttatgttacttctatcactgtatggtcacttgtgtttgggaaagacttatttgtgattgtatgttaagcagaatgcctacagtatattctaagttgggggttcacgtttaagtacaaatatagaattcagtctgtgtttctatctctttgtttttgacggagtctccctctgtcatcaggctggagtgcagcggtgcaatctcggttcgctgcaacctctgcctcctgggttcaagcgattctcctgcctcagccttccgagtggctgggactacaggcgcatgccaccaagcacagctagtttttgtatttttagtagagacagggtttcaccatgttggccaggatggtctcgatctcctgatcttgtcattcgcccgccttggcctcccaaagtgctgggattacaggcttgagcctctgggtctggtcccattgagcaaattctaattagattcatgatcttatttctgcactattgcaatagtctctaagtgccaccaactgttctgccagatcatacccgtctcttcttcttctgttattgctagagtgctgtctataaaaactcaaatctgaacctgatattcatctatgaaagtcatagctgagggacatcttaatgacattaattcttgaatggctccccactgcctgtagaatagaacctaagctctttactgtttcttacaaaaccctctgtgatctgactcctgatagccttcccctggcctctgtttcatcctactccacatcttacttccccgtcaggcttagtttgctgtcccagagtgaattaccccttttcctagatagcatttcctaatgtcctcaagaaaaacaaatcacatactccttaggcctcactgtgtccattgtgtttgtttgttttcatagcatgtataacatctgtgccccaatagttttttatatctgcttttgtctgccactagacactcagattgttgagaatagggattgtgtcttacccattgttagcgctgagcctttggcacagtaaacctttaaaaagttggatgaaagcatgagtaggcttaccaaactgaaaattcttaatgtccatttgactacataaacattggtttattgcaaaatcctttgcatgctctcaagtatttgatcatctggattattttattcttcctttgatttatctaataaacacatgttttcttccctctaaatacagatactgagctgggcactggtgaatgaaacagacatggacctattaatgggtctaatattgtctgatttaaagggcaaaaccagggtctaatattgtctgttaaagggcaaaaccattttcatgaagaacctttagctgagttatggcagaaacagactttgatgtttactgtaaagtctgaccttgaagaactacagggatacacttttctttgcctcttcttgaaatgctgtttttatttttgtcaatttccttttgttataaaagtttaaaggaaaatatttagtgggtaagttaaaatgtgtacacgatacttatggtaaaaaatgtctagccatagaatcacttatgaagaggtttaggaagaaatggattacatctttctgctcttaaatgtggcgacttccattaacaccctggagcttgtcaagttatgggtgagtccaaagttctctgtgcacctgtggtagataatgagcattatttaaaaatttctgagtaaataattacatacaacctctgtactttataagacagaatataggggaaagcatcctggaggaagaggccagaaacgtaactctacgcatggctttgacagtcatcaacagacactttacatgtttcttcatcagtaatatacatatgatagccattccatttatctcacagagtatcatgaagattaaatatgaaaatagccatgtggatgcatcaaattattttgtttcaaaataatgcttgcttaagtagtccagaaataagtcttataaaaatgagggaaagcctcttttgtcttcctgcatccagggcaaatactgccaaaggaggtaacccttttttttgttgagcagagggttttcatcaatattcatctactgtgttgtgagtcagcacaagatagactttttttttttattagacagactgtaacaggatactttagatgctatctactgatggaagctgaagatttttagtttttgaatagactccccttctcccctactgacaatatggtcacatcaaaattttttgttaattctgttaatatgactatgtaaatatcattcagtactgcataatgtgttatgattatgctcttttgttgtgaaaacattctgtttttcctgtagttaataattgctttgttgttccatttgcttcattttctttgattctatttccaaatttattctcctctcccaagaaacgtaaaacagtcttaacataaacttccaagtggccaactgtgcagggactctgttagttctgtccttcacctgaaggcatccctcctggaaatttccattcttctgcctctgttctgcccctgccgagagacgttgctctctagggctgccacggtactgtcctcaccttgggattttgctttgcctttgttctgggaattccttttttctctctcctgtattggattccctgtttccagggtctcatgatttcttccttttcctctttttgtggtggtgtacctaactgggggaaggaggagtaatttttctgagtctttattggtctgaaaatgcctttatattaagtttacaactcagaaatacttttgctgaatatagaattctagtcattttttgctcaaggcattttaaaattgtcttttatttatatactgttaagagttccaattcattctcaattccagcttgccatcttgaatctttaaatcctatgaaaacatattcattcatttatttacttgattttatttttttagtagtcagaatgtatatatagtttaataatatttaaaatacattaaaattattcactgaaaagtcttgctcctgttctcatatttatcagcacgtgtcacctccctcaatacctacagggatttgcctccattaatgtcttttatacatccccatgtacttacttatgtaaatataaataattgtagttataggtttattataagcatattctatttgctttgccttttggcttaatggtttcttggtgcctttacaggaaagcactttaagaagtacagaccgctatgtaacataaagtaatttgtattaactcataatttaggatgggtttttgcacacttgcaactacatgttgattaaacaaaaggcttatcatggggaatgacaaagatgggaataactgatcagaaaggtaagggcatggaggcagagttgaaatgctttgagaaaagcagagcaatattaaaaggaaataagagacatggaggtggttatgtagaacaactttcataaactgaggagtatttccacatttgaaaaaaattgttggtatgatagagtgctttactctatgtggagcacatacaaagtaagcagagagagaagtcttacaatgtcattagtcatgattctcttctttcagttttttagattgtgagtaggtttccatgcacatgaatgtcagacaatgaagaggaaggccatatgaatactatgtgtctagtggctgatgctggccacagacttggatcccagcctggtggtgcccaagaggtagggcctccatgtcagagctggcttgtttagggtggttcccaaaggtttcactgggtgtattagtcagttttcacactgctgataaagacatacccatgactcgctgggcatggtggctcacgcctgtaatcccagcactttgggaggttgaggcaggcggatcacaaggtcaggagatcgagaccatcttggctaacatggtgaaaccctgtctctactaaaaatacaaaaaattaacctggcgtgatgataggcacctgtagtcccagctacttggaaggctgaggcgggagaatggcgtgaacccgggaggcggagcttgcagtgagccgagatggtgccactgcactccagcctgggagacagagtgagactccatctgaaacaaaacaaaacaaaacaaaaaaaaaacccatgactgggtaatttataaagaaaaagaggtttaatagattcacacttccacgtggctagagaggcctcgcaatcatggtggaaggtaaaaggcacatcttacatggtggcaggcaagagagaagtgagaaccaagcaaaaggggtttccccttataaaatcatcaggtctcatgagacttattcactaccacaagaacagtatggggaaaactgcccccatgattcaattatctcccactgggtccctcccacaacacaagggaattatggtagctacaattcaagatgagatttgggtggggacaatgcaaaaccatatcactgggatcagtagtctatgaagcaggctctgggtcaagtttaccaagtgtgtcagctcagcctcccagagcaatagatactgctttggacaaggcagtaggctcaagaaatagttcttgaggattagtgaggaatcatggggaagttaactgccctaaggcctttggaaaccaatggccctcagaccaacaaccctgggaattagagaagatcaggtctccctagacctgtactctgaaaattagcaaattaacagaatgatattgtaggatgcagttggacctgaacagaatagccttttcccttgacctcatttattgaagaacacagtactattaaggcaccctgggcctgagggtctattataggcatactctaattacaggcacctctacatgaggtgttattggttgggggatagaaagagaatagcaatttttctttttgaccttcaagattttgtcactcagtaaacacttttaatgtaatgttttggtcaaaaccccttacttaatggactgaagtggaaggtacttctgtggtatgatgacaatagaaacaaaagctagtctaatcttcctgtgtgctctttctccttccctagtcttagaaagtctttatattctacacaaatgattgatgtggaagagtatttctaactgccaatttatctatttaactgttgttttgagaggaaagctcagttaaatacacagacagaatttctgtgcataatctccaatcagctttatattagaactgaaaacagtttcttagtgctaacagacattcattaggccaaataattttgctgtgttaacaaactgtataatcaatttaggattgcagccaagtattagcatgttattccacatgtgacttagctgttttcaaaataaatcaagtggcagctttgcaaacatgatttagaatagcgggaccagtgcagttgtatattcagagcattttaatatgaaaataatggagttaatattttctattcaaataatgaagaaaatgattgtatcttatttatgaaaatttaaaaaggtgaaaccacttgtacaaagcactatcaaagtgatttcaaccataggtttagatgaaatgatagtgcggaagagacatgattaggcttgtagaattcctccagtgtcagggtgctatgtgctgtatataaagcataaactgaatatcaatttgtgtaggattataatctgaataatggcttcattgtttccttcccccaaactattgaacttgctttatttgagtgtggcataaggtcatgaaatttatttgtttattttatatcagaattgaattgatacatccacgtaagtatgttctcattcacggtactcactgggagataactttaattctactgttatagttactgctcagtaattttgagacaactaacttttttttcattatttataactatcttttaagcattcccattggtgactggtcttaattccttgacagtatctgcttttgagaatgagcaaaaagttgtttagagccaattctaggaaatgaagtaaaacactcaaactagagaatatatgaagaaagtaatgaggctctgagttccttatgtgacctggacacatttattccttaggaaaaatatgaaaattgcttgtggagggttatggtatggactgaatgtatggttcccactgcctgcaaattcatatgtggaaattaccctatgtgatggcattaggatgtggggcctttggaggtaaggaaggtggagccctcatgaacaggcttagtgcccctataaaagggacctgagagctagctagctctcattcaccatgtaaagactcagtgaaaagttggctgtctgtaacccagatgagggttctcaccagaactcgacaatgctggcaccctgatttcggacttccagccttcagaactgtgagaaagaaacttttgttgcttataagccacccagtctgtagtgctttgttatagtggtccaagtgaagtaagacaaggttattcttggaataagagttctgtggttaggatctttgacccctccaaacctcatgttgaaatttgatccccattggtggagatggggcctacttctgtttgggccatgggactgaagtccccatgaatagattaatgcccttcttgagtgggaggcaaattagttgtctctccatgagctctggacagagctggttgtaaaaagagcctgacacctcctttctctctcttgcttcctctcttgccatgtgatctgtgcacatgctggctcccctttgccttccaccattagtggaagcagcctggggctttcaccagatgcctaatcttccagccagcagaattgtgagtcaaataaaccatttttccttataaattactcagtcttgggtattcctttgtaacaacatatatggactaagacaaaggatataggatatcaaaactttttctgtgacattgcctgtgaaactgcaaagtagagcttataggattttgtaaaaggataaataaagtattattgtagttgtaatttaaatgcattcacataggacagtttcttgaaagcaaaaatataataattataaacctttatccataagagttgaatactaatcttatattttaacttttctaaaatgtctgtaaatgtacacattgactacaagagtactctatgtactgtgatatgtacattcaacctacaaaaaatacaatcctacctcatcaaagttacttgcaactaatatgctggatttataaccataactaccattaaatgaatgttatccaaaagcaatttttggaattctttctccgaattgggaattttaataaaggtgtcttggaggtttaaacagaagtcatctttttctcaaaatagccttccctgcagcaagctgagtatttaaaactattgcattgattttagaacgatgttacttaaaattgcttgcaggttcttcctatttatgccagaaaataatggtctctcttttgttaataaactgtcaaatagatacaggtggctaaaaatgaaaatacaggctgattttaaacaattgagaatgaggctcaacataaggaggtctacctgaataacttctgagacaatcacttttgaagatttcactcacttgctgcatatatatgtcctggcatatttgttaaataagcataattattgcatagttacacatcataaatatttgaacttgaggtaaaaaaaattcatattttcctatagttacggttaagagtacttttctctctccacctacgtatgactctataatgatgtccacatttgctttctcgatgtttctgctgtgaccactggcagaaacagcatagcctaccagatggtccgttgatttaagtagagaaattctttggcccttatttaattcagttgttctactcaatctgctcaggagagtctaatgagagaacataaggctgctgctgttaagatgaggtacattggcaacatttctgcatttctttcccacccttggctgggcaatattgttagttttcttatctttatgaaaccatcaaatgaatcatttaaataataaaaaggttttcatgtgacataatattttaaagaggagttctaggtttaaatcctgtttcctatagagagttttagaagattggaaacacatttatctgttaacagttgacaagaagttgattatctcatttagcttgagaaatgttttgatgaccaccatgcttccaatgtggaaagataggaaagggtagttgggaagtcctgaaggaatgcagtcctttagaaccacatgtttatttcagaaattatcatggcaaacactgcctttgaaaagatccttccagtgctcacctccttttaatgtggaccacagtgacgccatttcaccccgtctttcatgtgatgttttacttctgtgagaaaagctttatgtccagtgcacttttctttcccgttggttttgatatcaagaatgacaaaattcttggggagataatcctaaatgtcagttttcgattagtaagcctagcagatcttgcattggaaaaaataaaaatgggtgaagatctttgccttaaattctttattggagtttaaagtaattgatggcctgactccctccttccttcctttccttattggcagtaatattatttgttagtatgtagtatgaaaattggtagatataagcaatatgacattattaaagacaattcctacattaaagaagacaatgactgtagagacatgggggttcagcatgtttaggggctacattgttccaataaactgcattttaaaacaaattattaactgaaagacaacttccttaggcagaggaactatcttgaacaaagtaattcaccttagataatgaacatccagcacagtgcctgagacataaaggatgttgattactgaggggctctgtatttaaggatgtcttcacttgacccctactcttgcttaatcacttgcttgtgtatagaattctaaagtcaactttgaagacattgatccattgtcatctgtcatccagttttgcaaatgaaagtttttttgccagtctgatttcttgttatttaaataagacttttttgttttgattcgttgttggtttttaactttctctctggaaactgtgcagtttttctcttattgttgctattatgatagttcattaaaatatgttaaaaaattgtctttaaaaaataactatttctgctctgtacttaataggctcatttaatctcatgcctacggtcttttattcagcaaagagaaaattatgtgtttcattattttctttcttctgttttctccttctgggtccaaattttgccaagcattatgtcagccttgtggttttcagcaagttaacctctaacatctttgatcatcaattgcattattataaagtggaaattataatccccagtaggccagtacccagtatggtaattattctttctccttcagatgtcttgcttctctaagcttatcattttgatcaagggatttgaatctaaatatagacttctggctcttaaagtgatgtctaggctgtttttagcatgaaggttattgggcatgactctggtcttcctcaaggtagcactggctcatttctgaaagctccaacactgtagcctgtgttttgtggcaaatgcagagatcagcacatagaaacgagtcaaagcatatatggaaaggggacacataatgttaaataacaaggaaactcttggagtttgttttaaggtagaagtctataaaagacaacagggggatctatagtatttttatgtgggttcatctgatgaatggctgccacatttatcttcccagaagaacagctctcatcatgtcatattctttgttaaaaatcttaactggatccccactgcctacaaaattaccatcagattcctcagcttaatttttgagttgtccaggaaagattaactccaatgcaactttctactatcatatcccactattctctatatattccttcactcaaatccaaatatgttactctatgcttcccagatctatcccatgctctttccttggattccttcacttcctcccatttataccgggacattcttctcttttaaggttcaacttcatgacctcttcctttaaaaaacctttgccaatctctataactcgaggttctatttctatgtatgccccaaagcacatgttgtgtgcatctcttatgtgtaacatactgcactgaaatgacttaaggcataatctatgtcatgttcatctgtgatctactaaggtctaacagtacttcacttataatctgtgctcagtaaatatggttgactaagtgactggatgcattgtagtcatgctgcattataatgttttatattgagaaaataaatttggaggttgttttgtttttgtttttaaaaagagctgactggtgaccaaaactgtgctttgttgactacattgactttacaggtttttatattatctatatgatcacttcttaatatttatttattttttcagctttattgaggtataaatgacaagtagaaattgcatatatttaaggcatacaatgtgatgttttgatatatgtatatattgtgacatgattaacatgactaagctaatcccatcatatagttatcatttttttggtatggtaaatatccttaaaatctactttcttagcaaatttcaagtatgggtttccacaaatagtgataaacacttgctaatgacacaggagtattgtcagatatttgggaaatagttattcagctttcagtctatttcctgtcagaagtttatataaagaaaaatgaaaatcaaatataatgctgcttgtaactgaaaacattgtgcatttaaatgaaattttttgtaccatttagcttgttttgctcttgaacattatttgaaaataaaccaacttattacttgggattgatggtagtaagtgtgctgagtgttgagatttatttcaaaatgcatggccaggtgcaatggttcacacctgtaatcccagcactttgggagtccaaggtgggcagatcacctgaggtcaggagttcgagaccagcctggccgacatggcaaaaccccatctctactaaaaaaaaaaaaaaaaaaaaaaaaaaaaaaaaaaaaaaaaaagccaggcatggtggtatgaaggggctgaggcaggagaatcacttgaacccaaaaggaggaagttgcagttgagccaagaccacaccactgcactctagcctaggtaacagagtgagactccatctcaaaaaaaccacaaaaacaaaaacatataaaacaaccccaaatgcattctctcttctagttcttttccactgatgaaatcaaagatactgaacaatccaatctttaaattggagaattccttgtaaggaaatgtgtaacttttataaaggtactagcagtttcttgataaatataagaaagagtagaacaagacattgtatggtggtttgttatgtgtgatttataatatttggggaagaccagccataattttgtgtctttagtcagtagaatgacattgatttgtggcaagtcaacatattcctttgtatttttgcaatggtgatatttaggagaacagtacttaagtctcctgaaaagtattttttttttttacatcgtagggacttattcttagccacacatctcctaaatatttaaatattttagttttgttcaggaaatgaaactgttttcaagtgtatattaatggttttttcttcttataaatggaaaagtacttaaagataattttgtttaaaaacctcattttgcagataggaagataaaactgaattttattgggctgaatacagattttcatttaaaataaatataggatagaaattgaaattgggttaaactatagccaataaattgaattaattgcaatgctggcctggtgcggtggttcacgcctgtaatcctagcactttgggaggctgaggcaggtggattacctgagctcaggagttcaagaccagcctaggtaacatggtgaaaccctgtctctactaaaatacaaaaaaaaaaaaaaaaaaaaaaaaaaaaaatagccaggctggtggtggatgcctatagtcccagcttggaagactgaggcaggagaattgcttgaacctgcgaggtagaagttgcagtgagctgagatcgagccactgcactccagcctgggtgacaaagcaagactctgtctccaaaaaaaaaaagcaatgcattctaaattctgcataataatataggattttattataatgcctaagtgcatatgaggtcacctaattgtgtcaagaagacaaaataagtattttcagcaccaggaaaggagactccctcaagtaagaaaagtccaatttcatcgaacttttccgcaatgtttacagtcagaaaatctatgaagaaatgatttctattttaatgtaagaatgagtatgatattttacaatttcagatgttttatcttatattcttttactatttgtcccaccagttttatgtttcttatttttgctttcttgcctttttttgactaatcaagtattttaaaactattttattattttactctattaccttgtagttatacactattttactggattttttttggtagttactccagatattgtaatgtgcatccttgattcattgaaatgatattgttaacactacttaaatctgttcattcactttctacccttaatgttaatattgtcatgttttttaattctacatagatcttctacgtcacaggacattaatatgtccactcaatattcactttgaattagcagtatatttacttttttcactgttctacctcccccctaacttctttttacaactgttgattctctctaccttttactctcctttttttttctttctttgaggttaattttcttctacctgaatatttctctttaatgtttattttagtgctattctgctagtgacaaattatctccagttttctttgtatggaaatggttttaatgtaagagggccatagggagaacagtgatatttagtgataaacagggttaaattagaatgaagggaaagttgagagaagaggttgaattttgtgggattttgttcctgattaactgtgagattcagaagcatagtaaaagaattttagtagctggggaagtgtggatggtgaagtaaaataagccaatggactgctcttcagtagagagtctggggcctgagaatggatgacctgggagttctggacctgtggtgactgacataaatggggaagggagagggcataaagacatttgtgttcaaggactcaagacaagcaatcacagggaaactgtaaagaggaaactgtttctaccaccatactaacttctgtgttctcctcttagctatttccatgacggtgtggagaccagggaagatattaggttatggagacctgaaggttccacttcattcttagggagtgaactgtaagagctgaaaataggccgggtgcggtggctcacgcctgtaatcccagcactttgggaggccgaggcgagtggatcacgcagtcaggagttcaggaccagcctggccaagatggcgaaaccccgtctctactaaaaatacgaaaattagccaggcatggtggcgggtgactgtaatcccagctactcgggaggctgaggcagagaattgcctgaacctgggaggcagaggctgcagtgagccgagattgcactactgcactccagcctgggcaacagagcgagactccttctcaaaaaaaaaaaaaaataataaataaataaataaataagagctgaaaataaatggattgatttgggagatgcttaggaagtaaaattagcagaacttggtgacagagtggatatggatatgggatgtgaatagagggaaatgtcaaaaatgactcccagatttctggtttatgcaacttgatgtatatggtggccattcactgaactagaaatgctggatggaggaagactaggtttgggtggcaaatggtgacaccatcagtttggcttagactttttgagtttgaattgcatgtgagtcatccaaatggggatatcaaatagccaattaaatatatgagtctattgctgtgcagagatatctgggcagaagataaaaatttgggaacatctttctataaattgttaattgaagtcttgggtctgaataagctggacaaaagagagtcaacagagagaggccagtcaagaatgccaatatgatgctgaaggacaagtagaatgaagacaagggtccttaaaattgaggagtttattggtaaaagataatttagctggagggaaagtttagtgtcttttttctttaaatcaaggggcttgaatatgtataaaagccagtgagaggaatctggttgagaaaagttaactatccaggaaagagaagagatcataatatagaacttctaagaagctgggaaggaaataggcatatattatttccccttgctgctgtaacaaattacaacaaatttggtgacttaaaacaacacatatttatctcagagttttggaggacagaaatttgaagtcagttcactgggctgaaatccagatctcagcggggcttcatttgttctggtgggtttgggtggcagggcaggtgtggagatccgtttccttttcttgtccagcatctagaagctgcctgcatttgttggctgttggtcctgaatcgctttgactcctggtttggtttttgcctttctttttctctctctgttttcacggaaacattagcttctctcactctgatcctcctctttctctctcttttaaggacccttgtgactacgttggaaccccctgtataattcagggtaatcttccctgatcaggaccattaacataatcacatgtgcaaaatcccttttacaatgtaagattacatattcacagcttccaggaattaggacactgacatggggtgaaggcgggggaattattcagcttcctacaaagaccaagcacagttagaagggcaggccctaaaggaaagaagggaaaatttcctaatttaattgaagagaaagaaggtagaaaatagaaatatgggtggtttgtatatgtcatagtggaaatacaatgtatttcctatttcactaaagtagaggttgtttcacttgtttgagggaagaggcactggtagtagatccgtagaagaaagtgtcatcctaacaactagagcatgttttcacttcgctaatagaacagcctgctgtgtgccaggagcccaatgggtagagggatataaagatatccagcacagggtgattattacctttctgtcactgggagttttcaaagcatgttaaatatacatttcactggaaaagtttagtaagtattcctgggtgctgagttacaaaagatgacttcattgacagttctaatatttgctaattgtgtaagtaatgcatactttctaaatagaatgcacttttttttttttttcttcctgagatggagtcttgctctgttgcccaagctggagtgcagtggcacaatcttggctcactgcaacctccacctctcgggttcaagcgattctcctgcctcagcctcctgagtaattgggattgcaggtgcacaccaccacacctggctaattttgtatttttagtagaaatgggatttcaccatgttgcccaggctggtctcgaactcctgacctcaagttatacacccaccttggcctcccaaagtgctgggattacaggcatgagccaccgcgcccagcctagaatacactctaaagaaatgtatcataaggctgggcatggtggctcacgcctgtagtcccagcactttgggaagctgaggcaggcaaatcacctgaggtcaggagttcgagaccagcctggccaacatggcaaaaccccgtctctactaaaaatgcaaaaattagcccggtgtggttgggcacctgtaatcccagctagttgggaggctgaggcaggagaatcacttgaacccgggaggcagaggttgcagtgaggcgagaccacgccactgcactccagcctgggcgacagagcaagactctgtctcaaaaaaaaaaaaaaaatgtatcatagaatgctactagaaataattgatcagaagtaaagatatagtaagaattcttaagaagtttttccagatatttgtgtagtcagagctcatggcactctattaagtacttgccctttaacttgagtaatctgatagctttttaaaatttaatttttccactgatagtaaaggaattataaaaattataagaatgaaaatagatacattaaaaataaccactttatgatctcctctgttctcttgttttccttcctagagatcaagattgttaaaaatttggcatagattcgtggaggtccttttctatgggcttacctatgctcatgtgtatagctggtcctccaataaggtcattttcttcaacatcatttttatctaacatggttgaggaaaaaaaaaatctattccgggattaggccactgtctgtgtgaagtgtgcactttctctgtatgtctatgtgggttctctccagagactcatttccccccacttcccaaagatgtgcaggtcaggttaattttgatgtctaaatggtcccagtgtgagtaagtgtgtgtgtgtgtgtgtgtgtgtgtgtgtgtgtgtgcaagtgtgccctgtaataaaatgaggtcctggccagggtaggttcccaccttgagccctgagctgccaggataggctctggccacctgtgaccctgaactggaataagcagataaatcattaaatcattatctcacttgtttttactcatctttcttaaatgtatatatagctcaaatttatttcagtgtttaatatcagaagtgttttgggtctttatttagaagtttggtgatgtttttatgaccagaaatgtgccataggaccttaacttatgtattttatcatttagcccatggtgaaactggtttaaatctttattatgtcttttggcttaaagtcacggtttctaagaaatgattgacaatgttaagtaaggatttactatttatatagaagtataggatattttattgtttttacacaaatggggtcatactaagtaatattgtataatttgtttttttttaaattggacactgtgttttaacagttcttcgttagtccatactttagttctcttaattcctacccagtattccacagtctgaatatattacattttattcatatgtgaccatttccagtatatatggtgtttccacattttctcttgtaaacagcgatgcagtgaactcttccagatacttttctaatcatttatgctccttagtctatagagaaccagaaaaggagtgcctatgtcaagggcatggcttctcaagatttttacaggtgctgccaaatttccttccgtaacatctgttcccatctatatgctttttatcagtattagagaataccactctctcacttgacacttgtaccagcctttggctttatcagtcatttacatttttgtccaactcatgaagatgccttatgttaatgtatgtttctcgtatcactgatgagattatctttttaagtgtttatgtccagtggtatattgtgtgtgtgtgtgtgtgtgtgtgtgtgtgcgcgcgaattgtcttttcgttccttttttttgttcatttttcttttgggtttttttaaacttttcatttttaaagaatgctttctgtatttggattattagtttattcttaaatatattgcatatatacttactcaatatgtgttttgtatttgaattttatttgtggagtcttctatagcattaaaatatttatgagtcaaaattgtttttgtaattccttttaggccttactttggaagacttttcatattacaagattattaaagcattctttttttcttttttttttagacagagtcttgctctgttgcccaggctggagtgcagtggcacgatcttggctcactacaactgccacctcccaggttcaagcaattcccctgcctcagcctcctgggtagctggaattacaggtgcacaccactaagcccagctcatttttgtatttttagtagatacagggtttcaccatgttggtcaggctagtcttgaactcctgacctcgtgatctgcccgcctccacctccaaaagtgctgtgattataggcgtgagccaccacgcccggccattaaagcattcttgagttatttcttctaacatatttataaactaattaattttttagaatttctttttagttgtctaatgttacagtctattttagagtatggtgttaggtaaaaaaatctatattttgtttactcgggtatagttagtctttttagaaagtcttattctttattgattttcagtggcatctgttgcatgcatgcacacacgaacacacgagtctgtcagcacctttttaaaaattggctaactacagttttattatatattagtgtattagtccattctcacactgctataaagaactaccaaagactgtgtaatttataaagaaaagaggtttgattgactcacagttcaactggctgtacaggaggcatggctgaggaggcttcaggaaacttaaaatcacggcagaagggtgaaggggaagcaagcatgtcttcacatgatggcaggagagagagagttgaaggggaagtgctacacactttcaaacaaccagatctcatgagaactcactatcacaagaacagcaagggggaaattcgccctgttcataccagatccctccccaaccattgggtattacaattcaacatgagaattgggtggggacatagagccaaaccgtatcaattaggtacaccaggtatgtgaagatccccctcattgatcttgtttgtctgcctttcttggctacaattgtacattttcttaactttgaaatagtttggctagcactgaaatgatctgttccttaaaggttatatagaatttttttgtaaatcaaaccgtctaggatttggccacaatttttagcagtatctctttgacaactgtctttcttctatagcaattaatttctttgaattttatggagtcaatttgtataaattatattgtccagagaataatctatttcattatgtttttttgcataaaattgggggaagtagtctcttatgattcttatcatttctctggtattatttcttattttgtatattttggtaccttctccctttttccccctagatttgtttcagtatttatctgttttattgttttccccaaagaccagattcagaacttattagttttatcattttacctttttttttcaagttttaatttctacttttatatttattagtttattctttctgatttccttaggtttaatttaataatttttttaaaattttgggatgttagtaaatttatttttgtttaatatacctgtatttaagcttatgaattagagtctgagaattgttttagcagtatgagatatgatatatagtgtttattatatttattattattacatagacattttacactttcaattttcattgttttctttgccagaagagttatttgaagagtcttaaaattttcagatgctaggagcttcttaaccccagattgattagtgatttttccttttactgtattgtgattagtaactattatctgtattctggaatttactggggttttatctttgatgtccaatgtgatcaagtttttttttaaaccaatttcttaaacagaagggatattctctgatttcaccttaaagttaaatatatggcaattaaatctattttattatgttaccctatttatatattttatatttatacctactttttaattctcttgttattcaggctttgagaaggttggataacagtcaattaatagtatgtttccatctgattatctttatacctattttagagtttgctttacaaatgtgtactatatgacaccgagacgtttataatcattttatttttactgtgaattacaccatttagcattatagtgttttcttccttgctcctttcttcctttttatttttatttgtcctatttgcttttgcctattcttatgaacaggcaacttgatgaaacacttggttatagagggttctctttcccatagaatagagcagaatctgtcttatgattcaactgaatgtttttctttcaataggtgagtttagctctgcaacatctctgagataacataaaagtttagcattagtactgttattttatgttttccaatttatagatttttgaaaaaaattcacaagatgttctgctttcttagctttgtgtttgctctttttattagaaaagtttatatttctgttatgattataaatgtaactgtaggaaagttcttaatcctcttatttccttaaaaatgatctattattcctttctgcagatgtttcctcttcatcctcccttttctaccagctgaccttagcattataaaataaattacttagaattctcctatgatttatcagtttaaaatatctttttgatcttagttagcaaagcagtcagtttatatagtatatactgcataccatgtccttgctccctcagctttcatctttttgaaaaattttatcattcatattttcatattgaaatttcataacgattcttaaattgttatggctcatattacttacgttttattatagcaacataatcacatacatgattggaatttagtaccatgattgatttcagtgtttatttcagttatttcactcaggtttttacaatcacttggatgactaaaatttatcttctagtaaattcctcaagaagatcctatgaaaacaagattttatatatttgtaatatgttcaaaattttgaacattgtccgttgcctttataattaatgagtttgattgaatttaaaaatctcatttgtattttcttttttcaaggatttcatgcacattactgcatccagtggtgtatctagagggcagtggtgtccactgaatctgactgttgaatgttgctgtggagagatttgacaacagactgattcctgccttaaaacaagctactagaaaacttttgccttgctgttcaaaatgtttcagtaattttactaggaagtgtcttagtgttgactgtttctctggggaactatgtgactttcactgagttttttttttttttcttcattttgagatagggtctccctctgttccccaggctggagttcagtggagtgcagcctcaaactcctgggctcaagcaatcctcctggcttagcctcttgaatagatggaactacaggtgctcaccaccacacctggccgtatttttttattttttgtagagagacagggtcttgctctgttgtccaggctgatctcaaattccttgacctcaagccatcctcctgtctcagcctcccaaatggctgggattacaggcataagccaccatgcctaacgatcaataagttttgactacaaaaaagtcttatattttatttattcttttctgctgttttggttttcttctgtgcggatttcattttctgtctaatgtttcttaaatttaagataatttttctggctgggcatggtggctcacatctgtaatcccagcactttgggaggccaaggtgggcggatcaggtcgaaagattgagaccatcctggccaacgtggtgaaccccgtctctactaaaaatacaaaaattagctgggcatggtagtgcatgcctgtagtcccagctactcgggaggctgaggcaggagaatcacttgaacccgggaggcggaggttgcagtgagctgagatcgcaccattgcattccagcctgggtgacagtgtgaggctccgtctcaaaaaaaaaaaaaaaaaagataatttttcctctcaatttggttacttcactgttagagtggaggggaaaaaatggctagtggtggatcagatcagctcatcaactgtaaagactgactctatgtcatttacttaaggaagtgaaaattcatagtagagtatgatgagctggtaaaaccagagtttctgaatttacctctgaagatctaggctacatatttattgctgcaacaatctatgttaagaattttcttctcaatattcatggccaacatctggcttctaaaggaaaggcttttggtcttttcaatcacttgctgatagggtgagactgcattgttacccataaccacatgacctaatttagaatcaatcttggcatccagtcttgcatttctaatcaaatttacaatccacctttcagcttcttctggagtcatgttcaatttatctgccaacatgttaatgctgatacactggtggatgcgacagaaagtctcaaatatgaagagacgggcatgaatattgagaagaaacttaattagaatagcaggtcagaggctcctaactgggcaactcaagattctggcttctactgaagaaccataaagaaaagatgaaaaaaaaactattaaagaaagatgaaataataaaactattatataaagggtgacttacattttggaaacaacatattacgtataaattttgaagaattggaataaaattgattcatttaaaaaaaagaattttctgagactggtgttctcaagacaacatttagatttagtgttcacactagtggtcactaatagagctgtgtcagatagtgaaagaatatctacattttcctgtaaagaagactttgtgcttttgttcagaaaaaaatcataaggctaacaattgttaagatgagaaaggaggcttgtccactatgtaaccggagtgactagtctttccacattgattgtatgtgaacataaggcctactgtgtacaaagaacactctgctaggtattctgggagaagcagagaaactaagagactcagtcctaaccttaaggattatatttgtgttgagtggaaaaagtagagcctgttgaaggatttataagttatcaaaacaatgcattagtaagtctcaggcaagaaaggagaaatggaaaagtttaagtcctaaaaaaaattacaaaacagggagtgatatgatttatatggagggatggctgcttgatggaataaattttgatctatgtctttgagagagatgatgaacctagctaggcaatgagttatcccaagggggcacagcacaatagtgtgagatacagggaaagatgaaaggacagtgcaagttgtattttgtgtgaggcaggagattggctggattaaaaaagtatttgtaggacttgatattcaagaaacatctccttattgcttttttttctctgtataaagccactgggggctttatacagtcagatagacactgagatggtcagagagaagttagacatgccactgccctcaaggaacctccattctaaataatatagaatgcatccacataggagacagtagctgaagtttgaataaactggtgtatgagaaagaataaagtggtagtattgcaaggacaggtagggtttgaatctgtaaaatgagatgaaataatacttactttgcagggctgttagaataaaatgaaataacatatgcaaagtgcttaacacttaatgggcaattgatatgtgtttgtcatctttccttccttccccacctctcaattctgacataacttgtatataaaaaggagagatccttgaaagatgcacagaagtgaaattttcagaagaggtgtgactggccttgggccttcattgtggggcttaatgaactgaggaacattatgaacaaagaggtgggaatacagaacatgcttttgggagcttcgttgaagttgagtgggagaagagatttgaaagggggacttgaaacctagaggttggatggtacttttgtattagactggtgcaaatgtaattgcggttgttgtcattactttcaataataaaaaccccaattacttttgcaccaacctaatagcatttttcttctgcccagattccactttgtatactataataactgatggtttatgtgtcaccctgcatcagctgttttggtaaagaggagtcatgagttgattaactttgaattctccataataaacagcacagcactttacacatagtaaggtcttcaatacatatttataaagcaggttaatcaaacaaatgcttgggtacgtcaggaacaagggctgtatgaatgtgacattttatgctaatgtatcaagctatgtatttaataataaaatgtggaaacacatgttgtagagtggaatagtggggtgccttggagagagccagattacagttttctccctggcttagtggctatggactttgtgaacttggtcaagttcttttgcagtatgtgcttaaacccaagaccatttcttagctgcctgctcttctggccttaatttcctcatctattcaatagctagtaccttatagagttgtgagcattaagtgaaaactagctcagtgcctggcacataatgggtgctcacataaatattattgataatcacaataatagttatttttatttttcctaattgaaatattgatatgaaaatattttaagtgacacatttactcttgttctatccaattatcaaataaaattctaaataatgtacactgctattctgtaatattttattgttgactctgttgtgttaaaaacatcttataatgttagtttcgtttttggagataaaagaccaattctctgcagcgggagtttaaggagtgttttgttagtgtctgccttgggctcttccaggccttctgcaaacttgatttcctttgatcctcacagcagttctgaaagttttggtcatagttttttatcctcatttttgcaactgaagaaaattaagggtcaagtgacaaggttagtgagtggcaaagtcatttataataattaatgagaaaaaagaataggctgaagttaaatttggaatcagtgtctaaaataactaggaagtaagataaagcacagtcaatatgagcacctgcaaaggattacagaaaaatgagattccacctgtcttaagtatgcagggtgctatcttgttcagtctgctgactatgaaaagtatcggtaagcttcatttttcaaagacatttgcctttttgataacatagtcacaaaatgccaaattttgctcttcataattttccctgaaaatttagaaacttagttttccagtgttctgaagggatgacctatcacacacacgtaaacagctagtcatctattaagtgtttttaagcccttttagggcatgtatatattgcactgtaatctatacaggacctggatactgttttgaattgaagcgttcattttatacatagtgtttaacaggctttatggtgtgatacaaaacagcatttctaacttccccatcatctagacttcaaacctcagagtaaactttgagaccttgaccctgtgttcacatcagttttcaagttctgcatattcctcacctctattcacttttcaaagcaagtgccgtttccttcttgcagcctgccctgatcttacccctattgtgcagttgcttctaccttggtgcacccttgatacttagcatttaatcactgttagtctcaacttaccactgaatgggatattttaacttaaaaattaatatctctattccactatgagacagtgaccttaactgtcttaataatagtgtgttcctactgcctgatacagggtttggcaaatagtactttgcttgataatttagtgaaatgaattactttcattatgatggaaccccagtaaaatttttgagaccagagataacactttttttttttttttttttttttttagatggagtcttgctctgtcacccaggctggagtgcagtggcgcgatctcggctcactgcaacctccacctcccgggttcaagcaattctcctgcctctcagccttccgagtagctgggactacaggcacgtgccaccatgcctggctaattttttgtatttttagtagaggcagggtttcacagtgttagccaggatgcagagataacactttgtaatatttgaaggctaaattgagaaaagaagacagataaggccaaatattatgggtgatattcttgaaattatttgttaccatggtctttgttattgttggcttgctgaaaagtagctcaaggttagaacagaatcttttacttcacaaatgctaaccccccatcgctgtattagttggtatttgctttcttggtaattttcttttaaaagatcatgataaacctaactggataaggatcaaattaattaatgcctccaaaatagatctgtgactttttatattaagcgcattactgccactcccaactaccattctgagggatttttggttttgaaattcaaagcagggatccttggagttgtagtgtctcttttttcttttgaggaatatgagctcaccatgcatattaaactcacttatgtataaagcagtaaagtgaacactgcctagtagcagtcaagataacgaaatggaaagtttgtgtctgtgttgctgagtatcttccattttgccttgttactacaacaaccacattgtaatctggaaattaccagttcttctcccgctgaaggcagtgggtcaggattgaagagcattgagcagttcagtgaagcttgtccagatgtcagtccagaagagattttacaattgtaaaagctcagattagttttaacgttgcaatcctttttgtcatttttgagtgtttctttcattttttatttagacttcattgaaatttttcttgttagttatagatgttttccattgtaaacctcctccagcctccctcccctagaaacattagaataaacttttcagtttttatgagaagaaatgcaaaatggtcattaaaattttgagaaagttttggcagtggttattttttaaatgcttttaatggaatgaaatatgctacatcacacacatttgtgctttttaaaaacataagtatttgagattgatatattgtagtttaatcccctctttgtatttaatactattatttaggtttattgttaaaataatatttaacagtgtgtgatatcaaggatagctggaaggcttataatacaaaaattttaatgtttaggaaatgaaagatattaatatatattaaaactcttttattataccatagaaattaacactttgtgccaattctaacctcaggattattttttgtgccttgtgtatgttccagttgatctcttcatcaattttatgaatagcataagtaaatttagttcattaatatatttatatactttaaatagaccaatgtaaacagattcttatctgccatatgttgaaatgctttagtaaagacataactgcctagtcaacaaagatggcattgaattgcactgttttggaaaaaaagttgagcgaactagatgcctgttaatctggttctttaaatatcataaacaaaagtatcagaatgtgtttccaaggacaaaggcggggttttccgggctttgattggttgctgccttgtcctgtcccacagccatccttaattggctttgggtagattggaatcacataagcagggtgacatttattactttcctagttgtttcattgcactgagccctgagattcccaaggagtaaccataaaagatttcttttattttgtccatgacctacgagacaggatcattctaagaagagcaggcatgagtttgagtgcaagaagagtcactctgcctgcaataacgccaataattctacagaaaagggtatgtgacttctttatcctttttttctttaatttttcttgctgctttttttcccctgttactgtgtgtttattaatacataggaagctttacttacatacccttgaaagagcctataattcattaaagttgtaggtaaaattaaaggacatattattggaattgaactaggaaaaataatactgcgctaggacatcgctatagttaaaaactttcacctaaaagaagtttgatctcgatttcaggtcactgtgatttagagactgtattgaaacttttccttttttttctttctactgtaacttcaagcctctttgtttttagctcagtaggaaatctgctgttatgtcttatatttgtttactaaggaatagtttctttgtttcaccataattcataatatatcaatctcttcattgttgaatagactatacaattattttactgtttaaacatgtgttaccagtttattctcaggtttctacccatttctattgagcttctgcgtatttgcttaagaaaaactttccattaaattcccctgtgaaagggctttctgttaattattaatgcagtcaatcctgtgtatgaaaatattttatttattagttttttgtaaagattatttttatgtctcacttacagcattgcattttacaaggtggtatatgcaaccatgtcatgtagtcatagtaaacttttcttgtaactctccaaaataagaacattgcactggacttcttaaagaatcaaatctgtcgcattgagaaggaaggcactaaaactcagttttggcaatatgcttaccaaatggttttggtgacactagaaactgtagtgtttatttttgaactcaacttttaatagttaactgttaactatcagtgcattccattaagtcaaaggtcatgttgcaatttatttgaaacatggcaaatctaacagttaaagtggctatagtttttaaaaacgaagtgcctctttactatttttaatttttagattttcagcttattttcttatccagtcaaccatttatttactgagaatattttatttggcattggaacagctatatgataattttgccaacatgagttctttatctttcttgaggccttttgctaattgtaagcaaatttaattaaaaatattttgctttgggttttaacttttatttggaattggacttagcagtgcattaataatgacaatataggttcctggactcactgaggatgtgaaaaggcatattaacatttatcaagtctatgttctcatgtttgaattcttctttatccggttaatattgcagtttagattgactaagaaacttctatcatatggtttgtttttgatgacatgttggtatgatggaaaatgtactatctggactctccatttactagccctgtgactttgggcaaatccagtaaactcttggagtctttacttcctcatctgtataacaaactgaggagttttcagtaaataatatcttcagtcttatttgtgtctataattctgtgaaccaaatattttatattttcatggttatagtaaaatatgtaaattatttttattattttagaattattataaaacattaggaaagaatgctgtaattttcaaggagtttgaacaattagcctaggggaaattggttatgggaaaacttggctagaaaaataacttctagcactgtttgccaagtaggaaaacaagattactctggaaagcggtggttattattgatgttacatctgagctgccaatggtcacctcattgtgatttatcgtggtattttaataataagcttcttgtcaagtttctgttataatatttataaaagtcaaaattccctagactcaagtctatgctatttttttcagtgagtgcacatattttggtgtttatataatttagcacaccattatgtgcttctcctgatattttaactctgaaaatacccatttgattgttctgaagatcttaatgtcttttattttaggagttgggtattttctgatttaaaaatcatccatctgccctggtcacaccatgattaattttttcttccaatataagaagttatttcatacttgtaattaatttattttccatatatgccataattttaaatgatcttataaatcagtacaagcatttctcagagaatttggggagcaacttattttcccatgaaggcaggtgctttttccacaggtttggtgtaaagttcactcatcctgaatgagtggcccttgacaaataatttatcaaatggaatcctaatcatttaaaaggctgagagcattctgaaaatgctccgtagcaatagggagtaattttcttatcaggtagtgtgtctgatccaagtggctgtaagtgtctctggtagtgcttaggaacttgaattttaaacatggcccttcatgtggtatagatctattttgtagcagagaaagtacgccttgatctttgagaagaaaggtattttggtagattctctatcaagtaaattggaaagaaaatgttcacttccaaattctattaggatctgatttctctgatttaagtgaattaaggttctggtgaagaacgttcctcatgtgcttcagaaacgatcacatcctcagcaaacattgtgaatgaatcttttacctcatcgcatttttctcagatcatcactaggttgtagctttttactttttcaaatgagaagactgagtctcttgggtgttgagtgacttatgcaaggtcacccagaaggtcagtggcagagctagaaatagaatctagatcttgtgacttccagtatgcttctcctagatacgtgttacctcctgaaattaatatggaaatgaaattgccttatggtgggtataattgccattcaagtctggaattagcttaggcaaatcctttcatcttcctctgcacctccaccaactcccttatgctctagcatagaaaacattttattcagaaagcaattgtaagcagccaagtgtgtgtgtgtgtgtgtgtgtgtgagtgtgtgatagaaagacagtttatacctggaactccagattggcacattacataaagaaaacattttaaggtcccggagagttaacataaggctcaagtattgtaaagtataaactaagtataatataaaattcacattcttttatggaaacactaccaggtcagaaggccttacatccatatcctgattcggtgggtcaggcatatttcatgtctctatcagattaacattttttgtttgtttgtttatttgtttgttttttgagattgagtcttgctctgtcacccaggctggagtgcagtggcgccatcttggctcactgcaacctctgcctcctgggttcgaacgattctcctgcctcagcctcctcagtagctgggactacaggcgtgtgccaccacacctagctaaatttttgtatttttactagagaaggggtttcaccatgttagccatgatggtctccatctcctgaccttgtgatctgcccacctcggcctcccaaagtgctgggattacagacatgagccaccgtgcccagccaacattgtttttaagttatgtttgcaaacatttttgcattcttcatccatgctacaattacaggagatgttcataagcacacaagatcctgaagtatcttctgaaatctcagagaaaaaaagggatacttttaatgacatatatttttttaagattcaaatccttttgaaaattgtaaattcatgagtgtaatacggagcaatgccatttatgagaagatctaattccccattcatataagagaatagttcatgttataatcatttctttcctcatacaattagactaattgctatgattttctaaaagtgatttagtggaggaaagaacacatcatcacatcactatttttcccagaatcttttaaacatgcacaaaatcagtccaggcttccttagcatttgccatgctccagggcctgcctggccctcagcctgcccagcttcccttgaagccttcactgcagcatatcgtttgcctccttgggcttcaaacggcttttaaaatctgtatatctgcacttctgctcccagaattgtgctctgcagcctatagacaacaccaggctcatttgctttcccaaatgctgtctattgcctaagtgtcggctcaggctgtgttctcatcctaaagccttctaagactcttttgcttcacctttatcttcaaggtgccttgatttagtatcagtggacccacctttattactcatttgtcaattcaaccactacagccctgtaacatcaattttattattaccttttaaataatatttaagtcatattgccgtccataggtgtgtacaatatgactttcagttgctctatcttgtttatttttgtatatcttggaccaccatttggtttccaaaagttgtcttttgatttttggtcttacaactagatcttagtattttaaaggaagaaatctttaaaatgttttgtcatttatgggcagaatgtaatttcatgtaaccaaaaaacacaaaggactgtggattaaggaggaaaagagatttatttttctttcactttacaaggataagtccaaagctaatgttgcagccccacaatgtcctcaggcaactgaactccttctcgctttctattatttcttctctagtgtgggtcctttttccttttatggaaagataaatgtaaatttccagtcatcctgtttacagtctttgcacagagaatgtgaaggaccaagaacaggctcgtgagttttataccagttaacgtgccattgtggagtaaccaggagtttctgcttacatcttgttggccaactctggatacaagaggagtcaggaaatgcgggcctggagtgtagcacactgccctcctcaccagaatcaggattcatcaggaaggaagagaggaagggtggatattggtgggtaactcgccatctcctctacaagtgccttggacatattagacatttagtaaatatttgtctgggatttttgttattctggtgccagatatgaaatgtagctatgctttttgagcaaataatattctattacttgtatagggattgtaggtatggtaataagtggggagagagcagatttcctgtgcagaagagggtcgtggaaggccatggatggtggtcttagtttagatggtggacttgcttggaaggtgatagtgaagtggtagtgggcattgttactgctttttatccagagttctcattcttgctaaaccttgatatttctcctgccctttttacttttgtacagagtaacttagttgcatactcaaccaggaagggtgtcacacagatgaatggtatttgcattttagtgaaatgtttcttttcctgagaagtgagtttttaggaagtgtgttgtagcagattatatgtatgctttagagccaggaaacccagagtttgagttcagcttcatcactctccagtgccctggctttgggagcattctttcaaaaccctctgagaatcagtttctctatcttggggatgatgatgcttcctcacagaacagttgtgaggattcaacagaataaatatttagaagcatttcacacatagtagaagtctaacaaatatgaatttccctttttccccacctgtgaaatggcatgttttactagtttcataaacagtttaaatttccctgtgactgagaatttaaactttccgtgccctattctcctaaagtggttatccaaagatttcatagtagaaagtgagtcaaacaaaaagtggtttttcttcatagatttcagccagggagagaaagacaatatatctttcaaatgcttgctcccactgctttcctttctgtaactttagaaggtctctaatttgaattaaaaaaaatgaatccaactatatacgctgatgaatatattttttaaaatctttgggaacgtagatttaaatacaagataggtggttaattactcctcctttcagtgtcctaaggagtattagacggggacttctgggttgtatatttgaaagggataaaagtaggtctagtattaagacgttgcttcagtaggcaagtggtgttactattaatagaaccttagctgtatgatggtgagaacttgttacttttgatcatcattgaaccccaatgcccagcacatagaaggcacaaagttggtatctaattaccaattagttggataaaaacaatttttgtaaaggcaagattgagctctttagatactgacctgctatttccttcctaatatttgtctctgttgcttttctttaatttttgccaagtttctcatcttttgggatgaaaagctgtaatgctcaggccttttcattacctttatctagctccaacttgctgcagtgggcaatttggtatacccttcacacagagtattgcccttcacaaagaacaataaaaaatagcagctacaacatgttcagcattgattacacattcactttaaccctcataagaaccctaaaagcttggtggccaaacccatttttggatgaggaaaattggcttagagagttaagtgtcttggccaaagcacctcgctcataaatgacagaggtgggacagaggtccgggcctctgctccacctagcacaggaggctgtccctcagaattgcctgggcacatgtactgcatagctactcatcaccgtgtagctgcagtaatttgtcctctcacctgtagtcttttcatgggacgaatctcaccttttctgccaatctgccttttgctctcctagttacttttccttgctgtgcactcagttttgcctcaaagacatagtgattcaaccatcaggtcagagtttcttagagctcaacaggactgtaggggtctcttgggacttattcagaaatgccttattttgctttcaaaattttataataataattgctaacattagttgagtgctatcagtttgccagcattttgcccattttacagtatgaggagtctaaaactcatggctaataataagtttggggtctgagatctgatcacagcagattccaggatcccctgtccactgtgaacacctgggctgaacccccatgagtacagttgctgggcatcatgattttgcacactgtactgcatgttccacatttggcagtgaaggctgattaaaaatagctgggctaatgaacggtctcagactactgcttggggcggtctgtagggctggctctcatggctgtgccccagaactctaagccaaatattaaaaataataatctcttttttggcaggaaaaaaaagaagcaagacttttggtaatttcagattctaaacccctagaaaggataaggattttctacccctgtaggatattaataatgcttgctattatgataattctcaaagaggaattcaaaatttgttttggcaagaacagcattgtcagaaagcctcctaatcagacatgcatatttgaacgtatacattcaggctttgtttgggaaaataccaggaattattattttgcagtttgaaaactgaaattatcttgggtagttttatcaatatttgaagaaaaaatttgatataactgttcgaaatcccagcgaaaactccaagtttgagttccaggaaaggttcctggtgaggtgacacatatgtatatatacatatgcccccccaatccttcttattaatgtttaatatgtagaaatcatttatcttaaaaattcaaatatttactaattctgaaaaaatagatattaactttgtcacaagcttgtgattgtatcaaacagaaaccccatagttttaacaaggttgcagttttcgaaacatgatattttctctatttgcacaaactgagaaataaagactccctctgctggctacttcagtatttgcaattattctggcgagaagctatgaaaagtgaaaaaacaaaacaaaatgaagaaaaatagtctttttttgacactcaaaaagctaggtgctttgggatatatgtatgtatacatctaattatgttctagtgtttatttatctaatacttttatccaagatgtcatgtagaagcagcagcttaaagcagcctaaatactggacgaacagaatggtaagaatacagcatcaggtgggagccagaaatggggttctgtggctggctcagctggtgaccatttggaggtccttgagcaggtcaagactccagcttcagctttttcatttgtgaaatgggaggatttcagtggatgttctccaggaacccttctaacctttagtattttatgattctaaacagtatagattccatttcttttacaacactgtgctctatgcatgtctttcactgatgtaaaataaatatttagaaaaatgtaaactagtacaaccactatggaaaacagtatggagattcctttaataactaaaagtagaactaccatttgacccagcaatcccacttctgggtatctacccagaggaaaataagtcattatacgaaaagatacttgcacattcatgtttacagcagcacaatccacaatggcaaaatcgtgtaaccaacccaaatgcccatcagtcaacgagtgggtaaacaaactggtatatttatatgatggaatactactcagccataaagaggaatgcagtaatggcatttgtagcaacctggatgaaattggagactattattctaagtgaagtgactcgggaataaaaaatcaaacatcatatgttctcactaatatgtgagagctaagctatgaagatgcaaaggcataagaatgatacaatggacttcggggacttggggggaaagagggagcaggcaagggataaaagactacaaatggtgcagtatatgctgctcaggtgacgggtgcaccaaaatctcacaaatcaccactaaggaacttattcatgtaaccaaataccacctgtaccccaataactcatggaaaaataaaataaaataagaaaagtaaataaataaatatttagaaaaatgaaggaaaagtaaaattacaaaatgggtatacatcagttgttcccagtgtttgttactgcatgggaatgttaggatctagaaagtgatgttttgtacactattataagtttatgaaataatacccccaaatgtcctgggaaggttgaacatagcatattttattgattgtatggcactttaagttgtaagaagcatcattattttatatacttccaataaaactataacataccattaagggtaagttacatccaggtttcagagaagttaaatgtgaaaaaaatgtgcttttaaaaaatcaaggaaataaggtagttcctaaaagggcttcaattgatgccagacaactcaataattgcaataaagtctgatgtgtcttgggctctagcaaacagtatctttctccacctcacgttttccctctcttctaaacacttattccacctctgccctactacttgttcttctttctcactgtgtgaatcaatttttaactttttcacttagacatgtcttatggctgttctgggaataaactattgcttaaaaactgaaatgagatcctgaaataacattgtgtccaacataagcatggccagtggtattctgctttaaatatgaattagcattagcacttgcagaggttttcttgtttcaaagatgaattagccctggcatcttagcaggaattgcatgagtattaaaaacactgaaacttcagagaacacagctttgatgaaatcatcggaaactttagtgtgggatttgtgatttgaacctctttattattcatattggatttaggtcttaacatgtgtgtctgtgtgtgtgtgtctgtatgtgataacttaggatattttctaacttagttgttaatgtttgctttcttttataatgaaattggagcagtttcttttatctttttttctgccacataacagagccaactgaaagggcttgaatttctctttgtcaaattgaacccccacttgagttggagtccttctttctacctaataggaagaaaggaggcccaaagaatgagtactcttcatggctcttggcctgagacaaggagagcagaaaaggtaaataatagagtaggaggataaaggtgaatggaggggctttaaggagatgtcctgagcctcttcttgcctgcaggctttttttctcttggttggaaccctagatgcggcatgctgctgcagtgtcagtgccccaggctatctggtgtgacagtgctaacttcccttctgtgccaagtttagggcatttccagtagtgagaccactactctttagcctgttgctggatgggaaattaatgcatcataaaacatcatctgtggattttgaattcatatccaggactcctggaagctctctgtggatccccaggaacacaaattctctatttctgaatctctttagccaggcatgaccctataatttactgcagaaatgtaatatcatacaaatctataccagggctgggtttttacagagctggtgtggagatgatccatcttgcgaccttaatgataagagctatacctcaaagattgtgaaaggacagaaagagccttggtcaggggtgacttgatggaactgcctcaccaaatcctgagctgcctgccctggtttcaaatgtgagaaggaagtcaacctcaatctggctaacccattgtaggtaggaatgactttctgttattgtagctgaaccctttcctaagtgattaagtcatcatgtggatatttatcctgattctcttaccactttgtaatcatattcatgtaaaactgtcatttttattattaaataacatttaatttttaagaattatttctacgttgccaactttttaaaaagctacccatcacttgtgtatcttgaaaagcatttcctattgtggtggcccctggctagtttgcactgatggaaaccagtgtaccacagtaccgggtgaaggcaccccctcctcaggctgcctggcacccatgcttactccctgtcctcataacttagcccttctgctctccatttagtgtggtctggttattctttcctgagtattgttcactcctttcttcctcagtatgtttgctcatgtttgtcccacacaggtgttttcttaccttctttccttattctttcagaatcccagatatgaaatggctctcagcagtcacctaagccacctttgttcagtccataagtttcatgaaaatttgcctaaattttctctttggttcacatgtgtcttttctcccatagaggttttcaaactccgtgaggtgtcaacactaccattttggaattcactaatactgtctcatacaggggtgtacatgatggtttctttcatcactgaaggaatcgttttgactgtcgctgtgtgccccacattttgctcactgctggggatataaagaggagaaaacagtggtccctgatgtcatacatcgttcttatggtgaagggcaacacgtagtaattatagttgcacacttgcatgcttgcaacaaagggcctggacctaagctggagggtctttggaagcttcctcccagaaataatggtttatcctaagatatgagggagcagaaaaagtagagggtagggaaaccgtgttctaagcacaagcagtagcatgtgcaagggccctgtgttgagaaggagcatgactttttcaagaaacagaaaaaaatgtaggattggagtcagaggacaggattgtagggaataaagtgaaagggggtacaaggatgtggaataaacctgtttgtgtcaatccttgtaattctgatattggtgacagtatctgttttaagtaatgtcttataactaatttaacatgtactgttcatgctcaaggaaaatgtgtttttgactatccctcgcaagtggagaggattggaggcttttcttgcaacctgatttctcaaaactatatactgtttttctcttagtaaatatttgacagctagcaaaataatacaggatagcaataagaaagcagtggatattcttgagctgttagggtcttttggagcagtctttatttttaaaatgcaaaattttaaaaacacaattagagatttggaataagtaataatgactacattgcttcccattccttttctttcaagggaactactgagttgcttaattcaagatatctaaaaatgtctcttgttatcttaggacactgtgtttcttatttataagaatgtaaaaattcaggactactctgaccctgatataaaaatatttctcatgaaatattagtacattgcctatctattagtacattgcctatctattaaaaataataaagaaaaatattgaaacattataagctcttttataattttactgtggttagatgataaactttcaaagagctgtagaaataagcttagctttaggacacagttcagagcaaattcctgtgagccttgtttcttttatcttgtattaactatatgttaactatacatatataattaatagatacaatacataaattaatgaatttatatttctgtttaaaaattatatatgtctcatcatgctaaggtcatatttaaatatgatatttaaaataaatttaaaataaatataatatttaaattattttaaattgaagactaattaattaatagtaatttagttaggtttaactattgaatttaaaatttcctaaaatagaaactttgacacagaagataaccatagataactatgcccaaatatctttttctttcacttttgctcttttttttctttctcttgcttcatcttatggattcttactcattgttttatgtttaatccatgctcattattttacctgctgaatgatgatttctcttctctctattcttgaagaaacaaagaataagtggggcaaacctatggcataattaatgactttccagtcatggcagatccaaagccctcttctgctccgtgacattctcaaacgaccattgacaatgctgaattcatttcaaatattctagaatgaattcacattgaaaaggatctggctatcccatgccatcccattccttggagtcagcaaggaggaggagaaaggctgactgcttagcctttgctcacttttttccttagttatagctttccaaatatgttcttagaatttcaggtgatgcagagaaatactaagtatgctttgggagcaaggtgatacatactgacttgactttattttgtttatttatttttagaaatggcctttgactttcattttaaatattttgtcgcttttagtctagaggctttaaaaggcctcaagtttttttttctgaaaagttaccatttcttcttgtgctttaacattgttgcatctagtattctaaaaatgggttgtgttagtttttttaatctctttcctccacttactttttatgaagagcagtctaggggaggagttgatgtgtaaagtgtataaacatgccttgatagaatgtcagccaaaacagagatttgcttcacccacattccagcatatccctgcaagggctgcagtgactacgtattaaatttgcattgctaggtgccatgtgctcctagggcagtttttgaagctgtaaactactccaaaggccaaggttgttgtgattgtcaggattagagtgacacagaagggctttccaacacaggcagtgtgtacaatcttggccttctttggacgctctgtttatgctggtgggttgttatagataaacattatcagtgctatgtttcttttgctagtcaactttcaatcctttgatggaacaaaatttcttcctattcttctttagggtccaggaagaatttcttcctgttggcatccaatttcaaaagatcttgtaaataaattgatatgaataatatactcctcactctaaagcaagctatgaatttgggccactgcactggaaatgtataatatccttttattaaagaaatgtataatatccctttattaaatagcatgattatataatgtttaaatttttttttaccttttagtatgtataggaaatagaatactaatattttgcttcagtggttcttaagaacagctctgctatttgttttttacatgatcacaaaagtctttaacttagttttaacccatatagtcatgcagtttttgtgatgagttgaattcttcttaaataggaaggtttagtgtagtaattctttgggcaagaggcatattcaactctactagagagttaaggcttcagttgtcttttccttttatatatatatatattctttattgagtcagagtgttgctcttgttgcccaggctggagtgcagtggcgcgatcttggctcaccgcaacctccgcctcctgggttcaagcgattctcctgcctcagcctcctgagtagctgggattacagccactcctggctaatattgtatttttagtagagatggggtttctccatgttggtcaagctggtctcgaactcctgacctcaggtgatctgcccgccttggcctcccaaagtgctgggattacaggtgtgagccaccgcactggccctttcatttattttaaggaggaataaatagaaattaaatgagactttttaacaaaggcatcccattcatcgtataaggaattttgataattacagactatatctaagagatgacagagatttactgcgtggaatatcaacctaaatataattccgttattcatagatgaacgtgtattttggataagtgtgagcattaaataggatttttaaaaaataagggcttgaaatggatttcaaacaaaaatattaaatttttctctcagcaggttttattcattctaacaatgaaatatatgcacttattccagaaattcaagttggcctaagcccctctaaatttgtgcatctcaattcttgtcaacttatgtctaaatttgcagtgacatagtctgaagaaaatagtggcatatcctgattatttagtcactttctcattttatccaactttacctcttgctcttttctagcccttttttaaaaaaaattggtttagccttcagaatgtctctagtttttcattttcttagcttctctgaaataagagatagaacatgcaaaataagaggcatacttctgttaccccaggtgatgagagcttactgtaggaaaacatatgggggtagtcaggaggtgcagagaacattttcagcaacccctagatcattcttcaggccccccatttcttggcatggaatgtgcagcagggaacagaaacagtgatgttattgctgcatatgaaagagcagtcccagagttggttcctcttgttctctcaggagtggtcatcttcacatcatctttggcagaagcacccacgagtgtttagtccaggcagttgtaagcacagcagcatgcctcagaattccatcagttttctagtatagatgcacatactgaagatatatccttaagagcagtggcctaccaagatgcaaacatgagaaacactgagactccaaatagaccttgacatcatagggcatgacatgtattcaccaaaatttgaatgaagtgaaaattcagagagaatagcatctgattttgacagtgtgtttttatgacctttttcatatgacttagtatcagcctcaatgacttcaaaaactcagaactgccatattgagtcagttcctacctaggaatttgtatgatgagaaagtatttgtctcttactcattgagaatatttttaattttctgagcataaaaatgggaattaattatatactcaaaggcagaaaatacttttctattaaaatttgccattatatagagtacctaccatttacaatgcactgtgataggctttgtaagtggtacaaagttccctcgctccacatatctgtattaagtcatgtatcaccctggggtaggttcctgtgatacaatgataaattatgaataaagagagacttttcttaaaagagtttttgctaggagggtgatacagtttggatatttgtcctctccaaatctcatgttgaaatttgatcgccaatgttggaggtggagcttagcaggaggtgtttgggtcatggggacagattcctcatgaatgtcctggtgctatattcatgggattgagtgagttttcactcttagctcccaagagatctgtttgttaaaaagcatcttacaccgccctcccctccctcttgctttctctcttgccatgtgacacccctgctcccgctttgtcttctgacatgactgtaagcatcctgagctccttaccagaagcagatgccagcaccatccttcttttccagcctgcagaaccatgagccgaataaacctcttttctttataaattacccagcctcagatattccttaatatcagcacaaaacagtctaagacacatagctggggagaaagacatgcaaacaaaaagttacaaaatgagagcacataaaagaggcgcattatgaacccttggacagtcagggaaggctttctggagcaagtgtgattggaaccagggccaaatttaggtggaagtttgccagagaaagcatgttgtttgtgagcggagcactgaaatttcttccaggtagaaggaatcacacgtgcaactaagaaagaatggtttgcaagtgtttgtcttatttggtttgggtcacatagtgatctattccataggacactaatcctatttataggggccccacctgcataatgtaattacctcccaaaggccccacttccagatatcatcatctgggactagggattcaacatgtgaattttggagggtacaaacattcagtctattgcattatgacttactctgtgtgggccccatttgcccacagttgttcttttagtaacagtagcagctccagcctacattttcccaggcttaggtccagtagaaaaggaagtgtgtgccaaggttatgtgaacatatatctaaattggctctaactgcttctgattaagtcacatgctcatctgttaaataatcactgttgtctgggtactgattagtcaatatagaaaacatcttccaccctggagctgaggcgatggtgcactgataaactggctctaaaaataaaaattttaaaaagaccttatatgtaaaatttactggtttctatcatataaatacttccatcatggctgattttaagatgcctggcttttagagctcctgaatatttaataatcagctcttgcaagccagttccagcagctccagcaaactgtcactgagctgaaggtggagctaccagagcaccaagtctgctggtgagggagggagtggtactctaaaaggaaatgtatctatctatcagaagaggagtaggcgactggtagacaaagccaagtaattttgcacgtaccactgaagaatttttaagtgctcttatatcattttcttgaataacatttttagggaccatataatattccattctgtgaaaatactgtagtttgcatttttttttttattgttggatgtttaggtcaatagaatgacacataatgctttgctggacatgtaatgcctaaagccattttccatatttagttcagatgtttaaagtagtttgcttaagaaaaattgctgggtcaaaggaatagaccatttaatacttctggtaaatattctccaatagatgtacaaaatagttttaccactttatatcattgtaagagagagcaactatttcattgcactgtcattaagtataatttttaaaagataggacagaattgatatatcattttaatttataacattagctgctgtaatagataaatcctaattcacagtgagttaacagaatagaagtttatttcttgctcatgtcagagtcttatatgggttttcatagttaggcgtcttctatgtggttatttaggaacaaaggctcattctgtcttatggctttcctttcctctaggcctttgtagtcattctgttcagtgggagaatggcaaaaagcaatggaggacaatatgtaggagattttcatgggccaggaagtgtaacattctatatgcttacattccattgactaaaattcaattctttggccacaactaattgcaggggagaaaagagaaaggattgggtgaacatctggccaatttttactgaaatattcatacctgagatggagaaatcttttcataaagtctgattctattccctccttgtactacttgagtatatctgcaataaatcacccatgttactagggttatttacggaatttaaatatagaatatgaaattttattttattttattttattttattttattttattttattttattttattttattttattttattttatttttagatggagtctcactctgtcacctaggctggagtgcagtggcacgatcctggctcactgcaacctccgcctcccaggttcaagtgattcttgtgcctcagcctcccaagtagctggaattacaggcatgtaccaccatgcccagctaattttttatatttttagtggagatggggttttgccatgttggccaggctggtcttgaactcctgacctcatgtgatccgcctgcctaaacctcccaaagtgctgagattacagatgtgagccactgtgcccagctataatattgataagagatacatagctttttcatagaccaaagtggtggggaagtaatactaaatagttattgaatgacctttagtttagacactgaagagaatgaaagttgtcggacaaagtagctttggcacataaacaagtcttggatagataacattcattcagtgtataagaaaattaaatgtagaagacactgtataaggaattataactgattaatctttgctgacttaccagaatgatattttaataaaatattttaataaaaaggctacctgtggattgggaaaaagtatttgcaaaccacatgtaattataagggttaatatccaaaatttataaataactcatacaactcaatatcagaaaaacaattaacccaattaaaaatgagcgaaggactgggtgtggtggttcatacctgtaaccctagcactttgggagggtgaggaaggcagatcacctgaggtcagagttcgagaccagcctgactaacgtggcgaaagcccgtctctactaaaaaaaaatacaaaattagctgggtgtggtggcgcatgcctgtaatcccagctactcaggaggctgagagaggagaatcatttgaacctgggaggtggaggctacagtgagccgaaatcgcaccattgcactccagcctgtgcaacatgagtgaaagaatgaaactccttcaaaaaaaataaaaaaagcaaagggcctgaatagacataaaaatggctaacaggtatatgaaaaggtggtcaacatcaccaatcatcaggtaaatgcaaatcaaaaccactatgagatattacctcatacccattaggatggctgttatcaaaaagacaagagataacaagtattggtgaaagtgtagaaaaaagggaatgctagtacactgttggtgagaatgtggattgatacggtcattctgaaaaacagtatggatatttgtaaagaaattaaaaatagaactgccatatatgacccagcaatccctctcttggatatatacccaaaggagtttaagtcagcatgtcacagagatgcctgcactcccatgttcattgcagcattatttacaatagctaagatatggaaacaacttaagtaccatgtcccactgatgggtgtatattggagcatatatacataatttattttatatttgcattacacacacacacacacatacagatacacacaatgaaatactattcagccttaaaaaataatatgctgccatttgctacaacatggatgaacccagaggacattaagcttagtgaaataagtccttctttcttttctaacagaaggaaaaatattgcatgatctcagatgtgctgtctaaaaataagtcaaatatgcagagatagagaacaaaacagtggttaccaaggacagtggtggggtggagggaaatgaggagatgtagatcaaggatacaaagtagcagatgtgtgggatgaacacatctagagctctaatgcacaacatgagaactatggttcataatagtgtattgaatttggaattttgagaaatgagtagattttagctgcctttgccacacttgcaagaaaatgggtagctatgtgaggtgatagacatgttaatttgttttactatataaccattttgctatttatttatatatatctcataatatcgtgttgtatactttaaatatatacaataaaatttattaaaaacacaaacaggaatattttaggtctttttcttgtttctacctacacaggtgattaaagtatacagtgaagatgaaaccagcagggctttagatgtacccagtgacataacggctcgagatgtttgtcagctgttgatcctgaagaatcattacattgatgaccacagctggaccctttttgagcacctgcctcacataggtgtaggtaaggatacggagttattgtctcacatcattgcttttctatttcttgttcagctccctcttgaacaccaataattcttagatttggtgttttgagataattttctatatcttgtaggtgatcccagttccttttcattcttttttctttttttccttctgatcatgtattttcagatagccaactcattgatgttttcctctgcttgatccattctgctgttgagagcctctaatgaatttttcagttcagaaaatgtagttctcaggttcacaatttgttgtattttttaaaaaattcaatctcattgttaaatttatcttataaatatctgaattgattttatcagtttcatcctggcagtcactgaatttccttaaaggtgctattttaaattcttggtcagagctcacatatcgctgtcttgctggggtcactaactggttccttgtgtctgtttagagagatcaaggttccctgttcgctgttgtttttgtggatgtgtgtctgtatcttggcactgaaggattagttatttattcgagccttctttacctggcttcttttgttctttattggatatattccttagaggtttttgcccataggtcattgccttctttttggctctaggtggtgccttaaacctaggttcgccttggctctagtgaaggtcagagcactgcactttccaaatgggagaggttcccaaaggggatatcccaacagtttgggacagctggctagggacccatggccaggggacctgtgggatgaacctcctatcgtgtggtgctgctgaacagccactctgatttggtgtctcctttggctgggttgcagagcagagtttctggggctgggaatggttgtcctgcccccttttatgtctctgcctgtcctcagggatatttctcccatcaggcaatcacgatgcttcctatgattaagacagaggcagatcttctgccagggaacccaagatggggtaagaggttgtctaccttaatctcactttttctggtgtaaacacagtgagttgggggaaagtttttcacaagcttgtgggaggggcatcgtggtggatatggaagtttgattctcttaccatctggagcttttctttactttcctgtcgcccgtggaactgcctcatcttcatatttgagttctgggatacttctggggaaaatctcagtgctatttatttggttttggttttctgttggggagagtgaagccagtggcttctttgccattatttttcaggaagtcctgcttttctgtttattttagtatagatcctatggtgaagattttcttccgaggtacaaaaatagaaaagaattatgaataatcatttctttattcttttattttttgttatttgtagtcacaagagaaagaaagtagcgcaaagtagaaacaagcctagaaatttttataatttacccacccctcttcatttaaagatctatgggaattttagacctaaaacagctcaaattgatggaagaatacatttcataataattttattagcacaatgcaaagtgtttgatttatttaaaaaagtaagctgtcatttggaccacattttgagtcaattgtagcacagacaggtacaaatatccatagcagtggttctctttatggtagtgtagaccctaaatttttcttgaagaaataagtaagtccttcacatttttaagacataaacacaaggagtagcctcttaaaatgttttatttggaaatgcatctctattgtgaagtgtgaagggcttaaaaatattcttttagtatgttctaaagaattcgttctactagagtgagacaggatttggcaacaattttgtcccctgatttcttatttttatagatttgttttcaaaacatgtttacatataagtagataagacaggaaggagttcgttatggcagtgtcattcgattctttgaactccttattagtttcctgtggttgctgttccaaattaccacaaactcgtcttaaagcaacagaaatttattctcacattttggaggccagaagactgaaatccatatcactggagtgaaatcaaggtgtcgtcagggatgtgtgtcctctggaagctctaatttcttgcctcttccagctctggtggctgccagcatttgttggcttgtggctgcatcacctaatctctgccactgtggtcatattgctttctgctcttctgtctgtgtcaagtctccctctttcttataaaagcggtaacatttcgggcccacccagataattcaggataatctccatttcaagatccttaatttaatactgtctgcaaaattttttttccacgtgacattcacaggttctaggaattaagatgtggttatctttcgggggctatagttcagcctgccacaaacttcattgcattatatgtttaacaacttttagtaagaaatcatcaaaatcattttaaataatttatcagtgacagctccattagttgcttcaatttgttcagacttgtgaaagaattttatacatagtcattagagtcatttactttctagcatagctgccaatatacaaaatcgtccctttgtttgatgcattcaagagtttatgcctcagagcaatgtgccaatgaaaggttctgttcaaatgaacatcctttctcttatgaaatggaattaaaaatgattttggcagaaaaggtgtgttcttagaaggattcattttttaaagatttgggaagtggtttttttgaacactacatgcattccctgaaccatttagaaaatgtttgtacttctgatttgacaactggtgtcctaggacatgtcagaacctcgtgaaggggatagagtaaggcctgtggagaggaagctagaattgttccacggtatcctcagctgatagctgatgagctacaatagtgcaactgactttgacagctcagcctagatagttatcaacctgccaaggacgcttgcttctaaaggtatgtcatactggccaatatgacttgttgcctcatcttctaggacagaagaggctcaacatatattttcttcattgccacttgtgactagtttaacttctatacatgataattaatctcctagaagtatggtgttaattctcaatagatatctgccctattccaagctatttcatttagctcctaattagcataatatattattacagtattttatattcttaaatttttctttcggggggacttaaatttttttttgttatagtcactaccatttatctctaacaaatagctttgcagttcagtaataaaaatctgctctgtaaatcaagaagtgtttttccctgagaacactgcaaattatttgtattaaggaataaaacacacaggtcttttaatgcaaaagctgaaagtggaacactgggaattaatttgatccacatactaaatttaaacttttaggcatcaagtagcaatagaagtttatttctttattactgtattttctggaaactgctgaaataaaatcaaagatatgagcatattctcatgacttcatcaaccatgcattagaccaaagctcataagaaagaattttatttccagagccttcttgtgtttttgttttcctttggtttttcactcagattatatgtttaaacagaacaattgaaaacattaatgctaccccaaaactaacatgtattagatttaatagcttccagttctttaccgatgtaagaggagagtaatcactattgaggtactgtcatcttcctcagcacaaaatataaacagttttgtctttaaaatgttttttgttttagttttgcctttttgcttagtttattataatcttgcaatatctattcagtctaattgtggtaggaagtaaaatgttcaatttaatttgcatatttaaatgaatggaaagaactacagtggtttttttctccttaaatgtgatatgcagctacagatactctttgttaacagaataaaccgctgacatctttactgcaagtcttctgtgagtgctactgatgtaaagaaccaaaggatgaactattttccagaactttagtgatcagctagtcggctctgcatattgtttaagaaccattcttgcactctttttgtccaaaatgatgaattttcaataaataaaattatatttggttttctgttcctgtgttaacttgcttaggataatgcccttattgaatagggagtccagcatccatgatggctgtaggagtgtggctttatttctttttatgcaggacatgatttcattcttttttttatggcttcatagtattccatgatttatatgtaccacttttttttttttcttttctgagacagagtcttggtctgtctcccatgctggagtgcagtggcgcgatcttagctcactgcaacctccgtctcccgggctcaagctattcttgtgcatcagccttcagagtagctgggattacaggcacatggcaccacagccagctattttttttttaattttatttttagtagagatggggtttcaccatgttggccaggcttgaattcaactcctgaggtcaggtgatccacccaccttgacctcccaaagtgctaggattacaggtgtgagccaccatgcctggcctatatgtactgcattttctttatccagtccactgttagtgattctgtgtctttgctattgtgaatagtgctgcaatgaatgtaagagtgcaggtgtctttttatttattttggatgtatgcccagtaatgggattgccgggttggatgatagttcttttttaaattttttgagaaatctccaaactactttccacagtggctgaactaatttacattccaccagcagtgtataagcattcccttttctctgcagccttgccaatatctgctgttttttttacttttgatgatagccattctgactgatgggagatggtatctcattgtggttttgatttgcattcctctgatgattagtgatgtggaggaatttttcatgtttgttggctacttgtatgtcttctttcaagaagtgttgattcgtgtccttcaccactttataatggggttgttttttgtttgttgaattaggttcattatagattctagatattagacctttgttggatgcatagtttgcaaatattttctcccattctgtaggttgtctgtttaatctgttgatagtttcctttgctgttcagaagctctttagtttaattaggttccacttgtctatttttgtttttgttgcaattgcttttgaggacatagtcataaattcttcctcaaggctgttgtccagaatggtgtttcctaggttttaatcttttaaatctttaatccgtcctgagctaatttttgtatgtggtgcaaggtaggggtccactttcattcttctgtatttggctagccagttttcccaataccatttattgaatagggagtcccctcctcattgattatttttgtcaactttgtcaaagctcagatggctgtaggagtatggctttatttctgggttctctgttgtgttccattggtcaatatgtctgtttttgtacaagtatcatgctgttttgattactgtaggattataatatggtttgaagtggggtaatgtgacccctccagctttgtttctttgctcaggattactttgactacttggtctctttttgggttccgtattaagtgggagctaaacattggatactcatggacatagagatggcaacaatagacactgggggctactaggggaggaagaggtgggaggaagggttgaaaaactaactgtcgagtactgtgctcactttctgggtgacgggtgcgattgtatccagacctcagcatcacacagtatacccatgttaaaaacttgcatatatatatatgtgtgtgtgtttcttgaattgaaataaaagttgaaattataaaaaataaataaatagaattgtaaagggaagggcatagtatctatttatttaaatttaaattatttatttaattttttttagagatagggtctcttttgcctgaggtggagtgcagtggtggagtcatggctcactgcagcctcagattcctggactcaaacaatcctccagcctcagcctctgttattattattattatttattattattattttttggagacggagtttcactcttgacacccaggctggagtgcaatggcgcaatcttggctcactgcacccttcgcctcccaagttcaagtgattctcctgcctcagcctcccaagtagctgagattacaggcacccaccaccacgcccagctaatttttgtattttttaaactagagtcagggtttcaccatgctggccaggctggtctcgaactcctgacctaaggtgaaccaccccacctcggcctcccaaagtgctgggattacaggcgagagccaccacgactggcctattattttaaaaaatattttaaatacaaaaataatctatctcattgtaaatacctcaaaaatcatgaagtaaacaaaattattcataatttcaagaccgagataactaatgttaacattttttaaaactctttaatcagtttctctactttaacatagttgctatatgtattaactcttatagactaccttctttttcttttttcttttgtgcacttaaaatatatcttgagtatttgtagttttttacttgtcattttacagattccacaaaaatcagtaactcctcttgccttctctggctgcgttacccaaacagtttagcaaatatttattgacaattttgtaccaagcctatattttgctgtagattctggggatgcagtatgagcaaaacagacaaaaagtattgcccttgtgagtttgcattttcactgggagagagacaggaaacaaggcctaatatttgttatcccgtagaggatgataagctctggggagggaaagcaggaggaaagagggagagtgagtgctagagcagaagggagatgtgctttattttttatttatttatttagagaccgagtctcactctgctccccaggctggagtgcagaggtgtaatctcagctcactgcaacctccaccccccaggttcaagtgattctcctgcttcagcctcccaagtagctgggattacaggagcctgacaccacacccagctaatttttgtatttttagtagagacagggtttcactatcttggccaggctggtcttgaactcctgacctcatgatccacccgcctcggactcccaaagtgctgggattacaggtgtgagccaccacaaccagctgggagatgcactttaaagaggcatcagagaaagcctccctgacggagtgatgtttgagtagagaaatgaagcacgtagcaggcaggctgtgcaattaagtggaagattgttctagacagagggaacagcaagtggaaaggcctggacgtggcagtgtgcttgtgttcaggaagcagcctaggggccattgcacctggagtggagtcaataaggtggaaggtaatgggagaggacatcacagagttgccccaggaccagatcgtgtagggtctcataggccaagaagtgggcctggcatttacactgagtgagagaaaaagcaaggggaggtctttgagtcagagaagaatatgatgtgatttagttttaaaagtatactactaaggagaccagaatgcaagatttgaccttttattttgcttttccatcagactacctgtggctccctggaatgatccccacctatctgtcatttctactagctgtacatgcagccattgtaccatcttcacacgtggtctgtttatgagatttagtgtttgtgagatcctgaggcctcataggtaaggatattttgacttataggatagatgagagttgagggttttctgcactttagctcacttttagtgaccaagataagcttaggccagtttcagagacattccgagttgtgaatacatatgctactatcgttgcttctcatctgtctaaaccatatcacaagctactaaaagcagaagggggaatacttgaaattcaaaatgtggtaagttcctgaacctgaagtctaatttcagagttaaattttctgtggcaaaggaaacttcaatcttattagtattttttttttccgagatggagtcgccgtctgtcgcccagggtggagtacagtatgtgatactggctcactgcctcctccgcctcccagctgcaagtgattcttgcgcctcagactcctgagtagctgggatttcaggcgtgcaccatcacgcctggctaatttttgtatttttagtagagatggggtttcactatgttggctaggctggtcttgaactcctgacctcaagtgatccatctgccttggcctcccaaagtgctgggattacaggcgtgagccaccacgcccgaccgttattagtatttttaatataaatgcatatgtgtgatagctactactagtgtgcatagagtatgtattttaatatccatttacatgcaggaatacaaagatctagattccattagattctgtaatctgcattttccactgaagcaagttggtttcttcccaccacaatatttcaagcaaatgttcctgagattctgcggtcggtttgcctctgtctcactctacatctctctcaggaatgctataatttaaattgcaaaccaccaggaaaactttcgtataaacgttcctaacccaggtggtaatgaaattactgagattgaactgagccaacccagttcaccttatagcagagccagatatttattttggctgagcgagagagaatcatgctaaaagttacctgtttttgaatttgtacaaaacatgaattgtataataatactatgtttggaactttgaatgcaatgtccatgtttcatatcctctacctgtaattattaatatatggctgctgagaattttaataggcagagtcagtcatggaagacaactaaatatcttgattttgttatgaatctctgaatggcctgattttggatcatattattatatggttctacttgtacacacactttgacagacattgaatttaaaatgtcagcacatcaacaaatatttctcctttcatgatgtagtaaaccaggttttgcaactggtgtggtttgcttcacagccactggatgtcactatagttccccagatagaatcctctgtgctgttataatcaatgtaagagtagggtgggggaaaaactttagcttcaagtcctctgaaacttaatgggatccatgtttgtcttgctcccattctgattcctaattgaagccatggtatgaagcagtggcaattaacacaatacctcaagcgcatacctacagactcctcgggaagaggaattaattgtattttagtatcattgctagggacagctgagatttccattgtgaatatcattgtggagtggctttaataagcaaaatgaatgactggaggcttttaatgaaaccattttaatgtgtgcagctatgcccacgtgatcgccttaagacagaagcgatgcacagtgacagtgagggaatggttcacagcctcctgcttggaagctgctccttcgctcttttttttttttaacaaaggaagtacaagtgtttttcctcttctggagctgacatgtagttggacttcctgtgcagtttataacataccagccatcagagttgtgaccaccctcatcacagcagaaatcattgtgaagcctttgggacatgtggcactgtgcttccttccataaagagaaccatgtgccctgaccctctgggctttcaggagacatggtgtcctggtggcacgcacagaccggaaatgggcaatatgtaactagcaaagatagtaagtgcccacaactaaatctgcttctgattcagctgattttttcttctacatattcttatagcctcggctacatgaattcaggtccgagcatctctcccctcaggtattatgttagcctcacaactggtcctcctgcctctggtagtaccaacattatccatctgaatgcagacctgattctttttgcatttggatccaaggtcctctgtggggcttgtagcatcttgtgacctgtctgcccttcatagctgcagtcttaatgtctcacccctccctccttttagtttatacattagagaactgcctgcagatgcctgcatatactacagtttctactcagttttcttgtttgtgatgttaagagtcacaggaaaccccttcctgtccatctttacttggctaactgctatgtatcttccagggcttagttattttagttaaaaatgtcaggaaagtaaaaccccagccttttcttaaaaatacttatggcaataaagatgaaaactctgagctgtccaagctgactgataggtaacgtagtgccactgtccagggagagtggagagagaaaagcagttggaggcatcccatgctcagccttgtgaagtagaatcaccctttccatctatctgacagcaggccgggagacacacctgcctcttacacttgcctgactgcatggcgcaaactgctgctgctgctccagggctgttccttgagatgatcaggatgcttgctgccaccgtccgtactcatacaccccttgggcaattgcaaatcctgaaaacagcagagagctgcaggaggcactaagagtgttagtgatgaattgtgtcctgggaggtgatgcttccacaggacatactatataggtgggtgtgagaaacaagccgtgtggacaagatttagatacaaggttgttcaaagtagattgtttataatatcaattaactagacaagtaaaacctcagtataaaaggagaatgttataaattatagtacatccataggttgtaatgttatgcagcttttgatcatgcttttattcttcctttgaagactgatgtgggtaaatgtaaggttgtggtgacgattgaataaaatcagtgcataaacatatgatgttttctaatattataaaaagtatatacacatacactcatatagagcaagagaaaacgacaagaaaggaatatactgaaaggttaggtgcttattcctgattgacaggtttaaagatgtattgtgattgtaagttatctgtatttgtaaaatttcctttaatggaatgtattattttaataatcagaaaaaagaaataaacacaattttaaaaacttttaaagagatttttaaagccttagctcagacatctttctgaagccccaagttggacaaaatacacatcttctttgctgctgtaacagtttctacaactatcttaacagtgatcaaattattaaaattagacagtaattccatggagctgggactctctgtacactgcatctttgtaacccagggtctaagacaaataaatgtgtttggaactaagtcatactaaactgtaaggcatttatatcaaaaaattaaaaggatggattacaaagtacatagaaggaataggcttggaaaagaagccaaagaaatcacatgctgtgctcagatagaatttactcttgagtcctcaaagaatgctgtgagaaccttcgaattaatggaagctgtctgtaagctcttcagatatttacccagtcaactcgagatcatatatatgcaggcatttttgtggaaaaataaggctgcctctgaatataagttccaatggttgggtcggagttaattggagactatttcccctcgcagaagaatgaactgcagggctttatagccatcaagctgaagtgtcacaattttcctattattgcacttggggagttgaatgtgtctgatggcaattttctgagggatcctgctggtattaagtagtattcttaggttaaggaaccttttagaaattgagctgtgttttattctttgcttctccagtttttgttttgcttggccagaggctgttcatttttatctgaaaataagattgacaaaatgtatgtagtttctacccagcatagagaagtacaaggaccatttgtctcctggagtttcctgtaaaaaaggtattcaaaaaattgttttctgagcgaattagaggtaaaagccacttttgtttcttctcttatcaagtgagagaagagtagggactcaggtttctatttgagctccacgctgtacttggcagtagattcagcaaagaaatccaggcagaaggtcacaggtgagcactctccattcttggaggattgaggtttttaaaaagactttgatgttaaatcaacagtttcagaagaaacttcttgctttcttcttcttttttcttttctttttctttttttaaagaaagagtttctgaaaattcaaaaacagaattacatgtagttatcattatttggtaatatttctttttattaccataagacctcactgacctattagaaacaaaaaacacaacttaaggcaataggaaatttttgtttttgttttgaaaaagcctttaaaatgcttttgaagcttttctttttccatcttcttgattgctatgttgaagtaatttaagagggcttccctcctatttttctacctacatatgagtggtagttgacaattgtaatttactttccaatgcccgaaaaataacgtcagaaagttttattttaaatagacttgtatctgtgaagttttaataacatgttttattatagtattttagatggattttataaagttttaaaaataaagtctaaaataataattttgaattcatgtgattcctacctgtggtcacttctcaaatggtaattcaaaaagtacctgagttcattctgggttttgaacatagcagcaaagagcccctagttgtagaattcatattgttcctttttgatatttgaaataaatgataaataacttagtaggattacttacttggttaaaatttgcttggtaggagaaaggtccaagaaagtttattaaaggccttttgttttagtgttttgttttgttttcccttttcttaggtcttggtgatggtgttttttggctagaccaaggcaagagaaagttggtcttcagcaacatttcacctccttttgcagcgtttttattttcttctcaaagtagtccatctagtcatcttgtatattcctgttgaattttctgtctactagggcctgtatttagtcagatatctgcattgaaaaaagaaatgctaattttatgtgagatgtgattaactgatattcaattatgcctcccagggttatttggattattgtaacattaatcctttaacataatgagattggttgggggaaggtacaattcatgcaaattgggatggtgatatataaatttaaaaagaatatgtaatataatttctaaaaatcagtttctacaataagaaaattatatcttcattaccaggctagtatataaggtaaaaaactatagctgcattcaatccacttgacttttattagcttccttaatatgttatctgaatttttgatagaatagtactagaaatcttttttcgaaggaatggaatgtatgtctttggctttctcacatactctatttcttgatggctttttaaaagatgtatttttcttaagattaccagattattttcctagtgctagtaattgcagtatgtaaatactcagttttatagttctgtgacattttctgcaaatcttttatcctttattttattttttcaagattggtattctggtttttatttgcatgtagtcaacaaaacccctgactagattccacttcttggtaaccatacacattacgctagttcttttttatattcagactcctgagtagctgggattatgggcatgagccaccgaacctgcttagttctttagttacacatttgtcatagctgttcaaatgtagtttgatttttcaaccttttttgttttattttcttttttgatgcagtccaaattcaaatgatttgtactttgaagattgacataatttgaaatcttgcccattactgttttgtcccttacacttaaaatgtgatttactttcagttaattagcaaatatttattgaatacctttcaaaataaaagaattggggccgggcgcggtggctcacgcctgtaatcccagcactttgggaggccgaggcgggcggatcacgaggtcaagagatcaagaccatggtgaaaccccgtctctactaaaaataggaaaaattagccgggcgcagtggcgggtgcctgtagtcccagctactcgggaggctgaggcaggagaatggcgtgaacccgggaggcggagcttgcagtgagccgagattgcgccactgcactccaccatgggcgacagagcaagactccatctcaaaaaaaaaaaaaaaaaaaaaaaaaagaattggaaacaactaaggtagagaacggcaggagcatgaaagagcaattttagttgatatagacagaatgtgcaggatgtaaatagatccagcagaggcgctagggaatgtcccttgggtgagaacttccatgaagttgaagcaatgtgtgcagggaaaagaacatcaacttgggctcagacatgtggttgtcattcaacctgggcacttgggacctacaagagggggcacttgggacctacaccatccaattaccatccagctccctcacagtctccactccaccagtttccttcaataactctttaactctgcctcgtttcccagagggcagagggtgggtccatatacatggctattctgaacctctgtttctatctgtaaaatggaactataacttgcttattacattattatattgatttcctaaggcttatgtaacaaattacaaatttggtggcttaaaaaatagaaatgtattctttcacagttctggagagtcacattctttccaagaaccttagggagattccaccccttgcccgttaacagcttctcttggctactagcattccttggcttgtgatgatttcacttgaacctctgcttccctgatcacattgcttttcctcttctgtctgtgttaaatcacctgcctctgtcttaaaaggatatatgtgattggatttaggtcctaccttaatccaggatattccccccatttcaacatccttaatttaatgacatctgcagaggctttaccacataaggcaacatttacaggttctagagattaggacctgatatctttagggccattatttagcttactataggtattataagaattaaatacaataatgaaacagctgtcagactcagacatgcagaaattactgtattttgaattagtttctgatactgagtaacctggcttaagaacagacaggttattcttctattatttgtttgttctctggattgttcttagtctttttggggaaaataatcaatgcagtttttatcaatgagttccatacacgtttgaaatgtgttcagttgaaggtttagacctaccttcactcctccagcactctgttgggacatgtaaatccccagagggatatctgtctaacttttatccaactgttgtcttcatgttgtagaaactcctgctttttaagcttattgcttatatcatgatgacccttaggttcatggtcttcctttagtccttccacatttcttctcaggaatgtggcactacaatactcttgccccgtactgggatgctgtggacttgacattgtacttagctattgcttctctgtcatgcttggtgaagggcttctatttaagggcagggtatagactttcctaagtctatgctctgatttgagccacataccactgttaaacctatccggagtcttacaactcatagagggttctgttcaggaaggaggcaggatatggggtcacttgggacctacaccatccagttaccatctagttccctcacagtctccatccactccaccagtttccttcaataaccctttaactctgcctcctttctcagagggcagagggtgggtccccacaagtgacaatggaggattgactaggcatgcttcttcctaaataattatatttgtcaaaaattgataaagtctactgtgacactcaaaaaaacaacaaaatgcctctttgctattttttcctttctttatagtgtagtatgagggcagaattcatactattttcttagaggtagaggaaggtaatgggtccaaggaaacacaggttggcaaagcaaacaaacaaacaagcatctttgttgatatcttgaaattgtctcccactgcagttgcaaagaatacagataccgtgcttagcacatagtgcatttaataatgtgtacctgtgtttcataatcttgaaaataccagctgagtttgtgtgaaaagtaaacagaagtaaggacagatttttaaggatgcaacttcccccttggtagctcagtgatcactggatgtccctccagtttgtcttgcagtttttctagcttattactggtaacacatccttccaagtgctaaggctgagaaccttgatgtcttcctcaagtactttctttttcactccatatccaatttgtcagtgaattctgttgtccctaccttcaaaatacatcaagattctgtgtattttttttaaccacatcaactgctaccatgctaatgtaagctgcatcatctctcctggggttagttccaatagcctaccaaatggtctttgtgctttcagccttttaaaatcagttttctgctccacagtgtgatcctattgaaacttgttagttcatgttattcctgtgttcaaaatgacttcccatctaacacagaggaaaagcctagcccttactatagactgcagggctttctacaacccactatctcatccccattatttccttaacttcttctcctgggataaccccttttccttgttcagcattagccacactaacctcctggctgtatttcaaacataccagcctttctctcacctcaagggtttttttttcttgcttctcctctctatctgcttggctcctgtcctcttctcctttaggtctctgtttaaacattaccttctcaatgaggccttcttgataagctgatggaaatggattcctatcccctgtcctcagcactttctctctcttcgctgctctatttttccctgtaaggtttatcaccactattatggtttaaatatatgcccctccaaatttcatgttgaaatgtgatccccagtgttggaggtgggcctagtgggaggtgtttgggtcatgagggcaggtctcttgtgaatgacttggtgccatccttgtggtaatgagtgaattctcactctatttgttcacacaaaagctggttgttcaaaaaagcctggcatgtctattgctgtctcttgccgtgtgacacgcctgctccccctttaccttcctgcatgattgtaagcttcctgagacctcaccagaagcaggtgctgctaccatgcttcctgtatagccatgagccaaataaacccctttcctatataaattacccaacctcaggtatttcttgacagcaacaaaaaatggattaagaccactactttttatgattcacattttatttattgtccatgtattcccattagaatgaaagcttcatgagggcagttattttgttactgtcttctccactacaaaatttttagccctaagatgagtttttgacatactgtgaaccttcaacaaatatttgttgaatggatgaacaaatgactaagttataactaactgccagactatatgcatttatctataacaggcagaagcagacaagctttttgggcagggttcacattcatacacatgttttaggaggtttgctatgctatcggtgtccacgttggattagaagaatgagaaagtagaggcttgaagattagttaggctgaacaacaaaaggcaaaggtctaaattgaaatggtgacagtgggacctggtgtgggggttgtttgttgtgtaagagacactcagagaaagaatccctgctatctgagaatttcaggagtagaagatattggagcagacgtagagaaagttgcaaaggtgagttgtagtctactttttttgacggaatgtggtaaaaatgacagtaatggagacgggataatttaggaagaaaaagtcatttgaaagggaaaaatgtagatgactttgtttcgtttttaagtttaaaaagttttttggtaccatttgaaattttgtatgtgtacagttcagtggcgttatatgaattcacattgttgtgcaaccatcacgactggccatcaatctctgaaatattttaattttctcatactgaaactctgcatcaattaaacaacaaccctttattccctactccctcctacccctggcagccaccattctactttctatctctatgaatttgactattctaggtaccttgtataagtggaatcatacagcatttgttcttttgtatttgtcttatttcacttagcaaaatagcttcaaggttcatctatgttgtagcatgtgtcagaattacattcctttttaaagctgaatattccattgtaggtactgcgtataccacatttgttatctattcattgttcatggacatggacattaggtttccaccttttggctattgtgaatgatgttgctatgaacattggtatacaaatttctgtttgagtccctgctttcgcttcttttgagtaaacagccagaagtgaaattgctgatcctatggtaattttatgtgtaatattttgactttggttttagacatactgtatttgaggtggtgcacagtatagtagttaggacaggagcatgggtgagaacaattatagccagagatttcacttcagaaaacctgacaaattagatggttgaagaggtgagaatggattaatttatagggggagaaagaaaagagttgaaccaagattgtaggaggagaaggagctagtggagccagtcgatgggatagaaaaggagcaatcagagttaggaatagaaccccaagtgttgatatatacttagctcaaactcatccatattcattgaacactcttaactgaacttcttttttggatgaataaatgtctatttaagaatgatattactttcaagagtttgggtgttgtaggtcacaaatcactactgaatgttgaatttctgagacataaatgctttttaaaaacatcctagaaacagtaaaacagcagagagtttccatattccttatttggttgttctccatttcctattttgcattggtaatttccagtttcttttcttttctccaccttttattgaagtatggcatacattaagaaaagtgtacaaaccaagtgtgcacaactcaatggactctcagatattacatatactggagtaaccaaccccaagatcaagaaacagtattgtactcaccccagtgattccgttcatgcccccacttacttaatgtctccaaaaccctttctagcactgtagattaattttgctgttttgaaccttatgtaagtagaatcatgcagtatatactatctgtgtctggattctttaattaaatattgtgttcatgaaatgcagtatttatccatactgttgtgggttgttgtagtatattttcactgtgtgcttttacacaatttacttgttcattctcatgtcagtgggcatttgggtagtttcaagtttggggctattatgaataatactactgtcaacatcctcacagtttcttataaaaataggaatttcgcatgttatagtcacctctttaaaactgcctttgcttacttcatttaagtgccttttctgccaagtgccttcccacccacttaattatcttcattgttaatacaaaatatattttccttggtattagctttgaaagtataaagtgccccaaggaattgggcttcttaaaaaaaacctgtatcttcttgtattaaaattttcctttaaagcatttattttaattcttctcagctatccagattagtctggacagtcttaaatgcacatgaacctgtcaaaattcttcatctcttaatgaggtgaattgtccaaccttgaaataaatactttagttttggcaccatgatgagtcagagaaaaaaatagttcccatatacttaatgcagatgtgttatcaaacttatattatttacacagtaataaaaggaaattgagataacaaaaagtacattatgatattttatacatttttttctttctagacaacagtctgctttggtataaaaatgaacattagtaattgaaaattgatgacaaattttatcaatctggctatctcataattaagttgaaatctgctatgtttaacaaagatgcgtaatacattttatatgtttgtatgtgtctgtgtgtgtatatatatatatatatatatatatatatatatatatatatatatttgtctatctgtcaacatactcattgaaacattctttacagaaagaacaatagaagaccacgaactggtgattgaagtgctatccaactgggggatagaagaagaaaacaaactatactttagaaaaaattatgccaaatatgagttctttaaaaacccaatggtaagtgaaatccctcctaatagttacggaaaataaatgaacccgttaaattttatgtgaagaagatagtcactgtaaataaaatacagtcctattcggtaaattgtagatgaagactctggtcctttgaaattatacccatatttcttatgctaacaatgattagtgaacattatacacagaagttcagatacacaggtgcaaaactttttaaagccgtattggtaaagtctgaattgagatgaatttggtttatttaatttaaaagtattaggaaacctagttttgccttttgtgaaaaggtaacaattatacatttgatgtgggaaatgaatttctataggttctcacccagattaggaacaagtgttaagcaaaatattatatcttaacactttctatagaatttaggaaatttaaatagctttctaaagtaaaagcagactaatgattgttgagagtattataacttagccagaaattaagattgacatgaatcttgctattccaaattattttgttttcggtgcagtaatttttgaactaagtagaaatgagataaagaccagtgcattatctagtaaatactactttcattgtagttctctttaaaagaaaataaatgtgtgtcacattctaatgaagactagggatctagaaaagtcagaatagcctctgggctcattattttaaattgtttttgtctctgcagctgaagcatatttttacactaagttttggatgataattggattgaaatgattctttatgaaaaatatatgatacacaccataatagaatattttcaaaccctgaaagacctctcacgttgtcttttatcttaacctattaatagaaacataatgggatgatctttggcaaagaaaattagtcataataaaaattaaataaattcaactgtgaagagaaagtgtttctttttgttgtgagtccttattaaagacaagaatttaaaaagatatatttaaagaaatattgttcaatgcttgttttttatttattttttatttaaacaaggctggacatttgttttgtagacctattgcagtggttcttaactgggaggtgattggacaatgtctggacacatttttggttgtcacaactggcagtagaggggagggctgctagtgagcagaggataggaatactctaaacatctataatatgcaggagtgccccccctcaacacagaattattagaccaaaatgttagtagaactactgttgaaaaaccctgtcctagaggaaatatagtagaatatattttcccaaacttgtctaatcataaaatttactgaggggagagtgcttattaaaaacatagaatccaggacttgcccggatctactgaatcagaaactccaggaatgaggcctgggaattcctattttaaacaactgccctgggtgaattttatgattaaaaagtttggaaaaatggtaggtagaaagaactggacttttagctcccagcccagtttaagtcctgacctccactgtgctgtgggctatgaccttgggcataccctaaactctgtacttctgtgagcctgttccttgtaaaatgtcatggatagtccttttgacctgataggctggttgcgggactcaggaataagatgtgggagcaagcacattgtcaacttcagggcagtgttttataactccagatacttgaatccatccacatcagcattatctgggggcatttgctaatctttgtgcccaactccagacattctcattaaggtacctatgagtagagtctaaggacgggcattttcaaaagcacttttgggtgaattttagtcacaccagtttaaagaacttttgcttttgattactatattggtcataattgaatcttttctagcatgaattttgtgataatttaactgtgtctttttgacagtatttttttccagagcatatggtatcttttgcaactgaaaccaatggtgaaatatcccccacacagattttgcaggtaaaatatatttttattaacatatataaataatagcataatgaaggaaaacttttaagtccttttttatacatgcccagattttgaaaagttatgctttgaattattattaatattttttgctggaggtaaaactaaaaaaaaaatgcacccaggcaaagaatgtcctaaatcaataaagctctttaacaatattcttcttcccagttttagccaattgtcaaaggattttacatatttaaaaatgtgtgtcttaaaaggaaacttgcaattttgttctgtgatgtgtgtaaatattatgttagtctttagaaaaatcagaattctttgtaaaatacagatatcttaccaatagatactcagtatcagctttcataataaacaccctcaatcctatttgtaataaaatgtttagcaaataaatgaaaggagataaaagatacaggatgcaaatgtattcactagcgtttgtaatagctgttatggaaatccttgcatagaattgtgaaatattcttagctgaattaagaatactagttatctaattaaaaatctccttatttttgtgtctattggactcatttcttccaaactggcagtggcttgaaatggttattttcaaagacattgtcattacaataaatgaataatttcagttattttctttaattttcgatagatttgtagattttacatcagaagctctacagttgttttttacaggttaatgttgagcaatgtctttataatggttgccgtttgagctcagccccatgcatccccaaacccactcagtatcccctgatctttaatgaagacaacttttaatatttccagtattgtttgaccttaaaaatattaggttggcagagctatcatggatttttctgtgggctttttaataggttatatttcatttttgtgcttcagaatatttttgaaacatgattagtccccagagatttttctaaaagctgcttctgtgctcctgggtttttacagagacaccctgtcaaaatgttaggtaaatggcagcagcagctgtgccccaggactttcagatctcagccctctgaatgcttcaccactgtattacaacacagtggtgggatggagtttttattccgcctccttttgcaagtcttcctgtagcacagttatgttgctttaatgttaaattataaaaacaagaaaaatcacaggctttggaatcagatagtcctgcatgtgcccctgacctcttctctccactgaggcaatgtttcccctttttaaaaggtttcttctttttctagtgtgacctctatgactctctttttaaaatttaattggtttggtttaataacttggaaagcactcaaactaaaaaacctacttgcctgttttgcatgtcaattaattaatatctgtggctcattaaattaaatttcttttagtaatttactttaaaaaacataaatatctactgtcagcatttcctttagtagccttttaaaatgtgttacactattttagttaataaattcccttatttcaaattttttccatttgtttattcagagggatttctattttctttttttttttaaatgagacactaatgcatttccactgtcttattaaggatgctgagcacaaacgctcagttgagctattccttttcattctcattttcttgaccaacacatgcccactgtctcaattaattattaccatgtaacaaactattccaagcctttgtggtttaaagtatccatttacattttgccaacaatttgtgggacaggcatctgggaagagtttagctgggtgggtcatctctgaggcacgttgactcagtgctggggattgaaggtccccttctaagagagttttttgactgcatgtcgtttgatactccttggtgtctctgtctctctcccctgtttccccccacttactgtctctctctgtctgtctcatggtgtctcatcctgcagggcttttccagttgcattggactttttacctgtgatggtctcagagtagtcacatttcttatgtgacagctggattccaagggccaagtcacgaaaatcaccaggctagttaagggccacacctagaattggcaaagggtcacttccacatattgtatgggtcaaagcaatgacaggcttgctcgcattcaagggagtggagaaagactccacctttttgtgattcagtggcaagatgacattacagaagagcatgtgggatggaagacattgttgctgtcctctttggaaaacatgacctgccacatccacccacaactgagaaccacagatgacaaagaagagatagttttgtttgctttacccgcctcaaggaggtgaacttggctcaacttcctgcttcacaattgaagtcaggattgtggtcttacttataccataatgaagttaataggtaaacctgtaatctcagggaaaaccatggaaaacgatgaaaagcatatcaggacttaacgcaatagatgacgtccaactttttgaatggacattcaattagctgataattttggtagttagataactatgtactatcacttagaatgtatattttgtgaactcattttcatttgaaacatcttaggtttttggaagactgatttattttctgtgtgtgtatgtgtgtgtgtatacacacacggagatagaaagagagacagaggagagagatataccaaggactatcaaagcaatgcagtatacacaaacacatagttaattaccataatgttatatgttatgatcttgtgtgatttttacatgtttatatttggaatcttaatatgattagtataaggctaccatatcattgatttaatcatagtttgaaaatatataaattttctttcagatgtttctgagttcaagcacatatcctgaaattcatggtttcttacatgcgaaagaacagggaaagaagtcttggaaaaaaatttacttttttctaagaagatctggtttatatttttctactaaaggaacatcaaaggtaaattgaagtatccatgatgtgttatgactgacatattaagctgtaagttaaaacacgttgactttgttgtatttattactttattacttgatgtcaaaggttggtctttgattttcttgatttaaaacgtttgccttgattatttaaacactactcagctttacttcacactggtttcaaagtgtagtatctttgatggagtctggatactcttatttcagtacaacgtatgttactcctttgtcctcactctgaattcactcctttctcctcatccttggcttcagagtttgaagcctgatgtagtgtataccttttctttttaccccaggtcatactgctgatcttgtctacttctgaatctctgttgatcaacatcaacagaacagttaataatagaacagttaataaaatgtctcttctgagtcatttattgctcttttattattgattgatggatttatttcaataggtttttaaggaacaggtagtgtttgattacctgagtaagttctttagtggtgatttctgagagtttggtgcacgcatcaacaggcagaatacactctactcattgtatagtcttttatccttcaccccctcccaccttttccctgagtccccaaagtccattgtatcattcttattcctttgcattctcatagcttagctcccacttatgggtgagaacatacaatttttggttttacattcctgagttacttcgcgtaggataatgatctccagttccatccaggcagctgggaatgccattatttcattcctttttatggttccgtggtctgtctgtctatctatctgtctgtctatctcacaatttctttatccactcgttgattgatggggatttgcgctggttccatatttttgcaattgtgaattgcgctgctataaacttgcatgtgcaagtatctttttcatataatgacttcctctgggaagatacccagtagtgggattgctggatcaaaatgtagttctacttttagttctttaaggaatctccacactgttttccaaagtggttgtactagtttacattcccaccaacagcacaaaagcattcccttttcaccacatccacaccaacatctactgttatttgatttttttgattatggccattcttgcaggagtaaggtggcatcacattgtgattttgatttgcattcccttgatctttggtgatgttgagtatttttttcatatgtttgttggccatttgtatatcttcttttgagagttttttattgatgtcttcagcgtactttttgatgggattctttgttttttttcttgctgatttgtttgagttccttgtagattctggatattagtcctttgtcagatgtagaaattgcaaatattttctcctgctctgtgagttgtctgtttactctgatgagtgtttcttttgctgtgcagaagcttttagtttaattaagtcctatctatttatctttatttttgtttcatttgattttgggttcttagtcgggaagtctttccctaagccaatatctagaagggtttttctgatgttatcttctagaaacttttgtggcttcaggtcttagatttaagcctttgatccatcttgagttgatttttgtataaggtcagagataaggatccactttcattcttctacatgtgacttgccaattatcccagcaccatttgttgactagagtgtcctttttcccacttttttttgtttgctttgtcaaagaccagttggctgttaagtatctggctttatttctgtattctgttccattcgtctatgtgcctatttttataccagtactttactgtttgggtgactatggccttgtagtatagtttgaagtcgggtaatgtgatgcctccaggtttgttctttctgcttagtcttgctttggttatgcaggctcttttttggttccatacaaattttaggatttttttttctagttctgtgaagaacgatgatggtattttgatgagaattgcattgaatttctagattgcttttggcagtatggtcattttcaaaatattgattctgcccatccatgagcatgggctgtgtttccatttgtttgtgtcatctatgttttctttcagcaatgttttgtagttttccttgtagagttctttcaccttcttggttaggtatattcctaagtattttattttattttttttacagcttttgcaaaagggattgagatcttgatttgattctcagcttggtcactattggtgtataacagagctatttatttctgtatgttaattttgtatgctgaaactttgcttaattcatttatcagttctaggagtttttgggggaatctttagggttttctaggtatacgatcatatcatctgtaaacgatgacagtttgacttcctctttaccagtttagatgccctttatttctttttcttgtctgattgctctggctaggactttcagtactatgttgaatagaaccggtgagagtgagcatccatttcttgttccagttctcagggggaatgctttcaacctttcctcattcagtataatgttggctgtgggtttgccatagatggcttcgattactttaaggtatgtccttctatgccaattttgctgaagttttttatcataaagtgttgctggattttgactaacgctattgagatgaacatgtgatttttgttctaaattctgtttatgtgttgtatcacatttattgacttgcatatgttaaattatccctccatctctgatatataacccacttgatcatggtggattatcttttcaatatgctgttggattcggttggctagtattttgttaaggatttttgcatctatgttcatcagggatattggtctgtagttttcttcttttgttgtgtcctttcctggttttggtattggggtgatactggcttcatagaatgatataggggtgattccctctttttctgtcttgtggaatagtgtcaatgggattggtaccaattcttctttgaatgtctgatagaattcagctgtgaatccatctggtcctggacctttttttttgttgatcatttcttttattaccattttaatctcactgcttgttattggtctgctcagcgtttttatgtcttcctggcttaatctaggagggttatctttccagaaatttatccatgttctctaggttttttagtttatatgcataaaggtgttcatagtagccttgaatgatcttttgtatttctctggtattggttgtaatatctcctgtttcatttctaattgaccttatttgggtcttctctcttcttttcttggttaatcttggctaatggtctatcaattttatttatctttacaaagaaccagcttttgtttcatttatcttttgtattgttttatttgtttcaattttatttagttcttctctgatctttgttatttcttttcttctgctgtgtttgggtttggtttattcttgtttctctagttccttgaggtatgaccttaggtttcctatttgtgctcttttagactttttgatgtaggcatttaaggctatgaactttcctcttagcactacctttgctgtatcccagatgttttgataggttgtgtcactatcattgttcagttcagagaaatttttcatttctatcttgatttcattattgacctaacaatcattcaggagcaggttatttaatttccatgtatttgcatgattttgaggtttccttttggagttgatttccaatttattacactgtgttctgagagagtacttgaaataatttcaatttttaaaaatgtattaagacttgttttgtggcgtatcatatggtctaccttggagaatgttctgtgtgctgatgaatagaatgtatattctgcagttgttgggtagaatgttctgtaaatatctgttaagtccatttgttttaagatatggtttaaatccactgtttctttgttgaccttctgtcttaatgacctgtctagtgcagttagtggagtattaaaatcccccactgttattgtgttgctgtctatctcatttctttacgtctagtagaaattgttttataaatttgggtgccttaggattaggtgcatatatatatttaggattgtgattttttcctactggacaatttcctttatcattatataatatccctctttgtcttttttaactgctgttgctttaaagtctgttttgtctgatataagaatagctattcctgctctcttttggtgtccatttgcatggaatgttttttccacccctttaccttaagtttatgtgagtccctatgtgttatgtgagtctcttgaagacagcaaatacttggttggtgaattcttatttattcttccattctgtatcttttaagtggaacatttaggccatttacagtcaatgttagtattgagatgtgaggtactgaggtactattctattcattgtgctatttgttgcctgaataccttgtttcttttttcatcatgtttttgttttataggtcttgtgagctgtgagctttattctttttttgtaagatggtgatatggtttggctgtgtccccaaccaaatctcatcttgaattgtactgtcataattcccatgtgctgtgtgtgggacttggcgggagataattgaatcatgggagcaggtcattcccatgctattctcgtgatagtgaataagtctcacaagatctgatggttttataaaggggagtttccctgcacaagttctcttgtctactgccatgtgagatgtgcctttcaccttctgctgtgattgtgaggcctccccagccatgaagaactgtgagtcccttaaacctttttcttttgtaaattgcccagtctcatgctgataaagtatatctttatcagcagcatgaaaacaggctaatacagatggagtcttgctctgtcacccaggctggattgcaggggcaccatctcggctcatgcaacctccacctcctgggttcaagtgattcttctgcctcagcctcccagatagctgggattacaggcaaggaccaccatgccagggtaatttatgtatttttagtagagacagggtttcaccatgttagccaggctggtctcgaaattctgccctcaagtgatccacccacctcggcatcccaaaatgctgagatttattctttaaagaggttctattttggtgtattttgaggatttgtttcaagatttagagctccttttagcagctcttgtagtgctggcttggtagtggcgaattttttcagcacttgtttgtctggaaaagactgcttagtttcgctggatacaaaatttttggctgataattattttgtttaaggagactaaagatagggccccaatcccttctagcctgtagtgtttctgctgagagatccactgttaatctggtaggttttctttttttttttttctttttctttgagtatccctctgttgccaggcagaagtgcagtggcatgatctcagctcactgcaacctctgcctcccaggttcaagtgattctcctgccttagcctctcaagtagctgggattacaggcgcacgccaccatggtaggttttcttttataggttacctgatgcttatgcctcatagctcttaagatttttttcctttgactaggctttggataacctgatgactatttccctaggtgatgatttttgtgattaatttcccaggtgttctttgagcttcttgtatttggatgtctagatctctagcaggctggggaagttttctttgatgattccctcaaatatgttttccaaactttcagatttcttttcttcctcgggaacaccagttcttcttaggtttggtcatttaacataatccgaaacttcttggaggctttgttcatcttttaaattattttttttttgtctttgttggattaagttgaaagccttgactttgagttctgaagtcctttcttctacttgtttgattctattgttgaaactttccagagcattttgcatttcttttagtgtgttctttatttctaaaagttgtaattgttttttattcatgctatctatttcactgaagatttttcccttcatatcttgtatcatggctttttttttttttctcactaagttgaacttcacctttctctggtgccttcatgatgagcttaataatcaatcttctaaattctttttctgacaattcatagatttcttcttggtttggatccattgctggtgagctagtgtcatcttttaggggtaagaagtaacttgttttgtcatattaccagtattgtttctctggttccttctcattttgggtaactatgtcaaaaggaagatttgtggctgaagggctgccgttcagattcttttgtcccacagggtgctcccttaatatggtgctctccctcttcccctagggatgtggcttcctgagagccaaactgcagtgagtgttatttctctttcagatctagccacccagtggagctcccgggccctgggctggtactggagagtgtctgcagagagttctgtgatgtgaaccatcttcaggtctctcagccatggataccagcagctgctccagtgaaggtggcaggggagtgaagtggactctgtgagggtccttagttgtagttttgtttattgtgctcgttttgtgttggttggcctgcagcccggagttggcactgtcaagagcatatcagctgcagtagtacaaggaggatcaggtggtggatggtgccctggagcacccaaaagattatgtcctttgtctttggctaccagggcaggtagagaaagaccatcaggtgggacagggttaggcatgtctgagctcagactctccttgggcagggcttgctgcggctgctgtaggggatggaagtgttgttctcaggccaatggagttatgttcccagggggattatggctgcctctgctgcatcatacaggttaccagagaagtggtggaaaatcggcagttacaggcctcacgcagctcctgtgcagcccagaagttcagtttagctcactccatgccccgccaacagcactgagtatttttccaggcagcaggtgaacagggctgagaacttgcctcaggcaaccagcctcccaactgaggaggcaagcagggatttcaggttttgcacctccctacctgccaaggcttctgtactgtgtttgcactcctgattcaccccctcccccaggttctgtctaggaaacaatgagtcagttgaaattgttacaaagttcagctggaattttccttctctctgtggtcttttccaagttcctctggcagccctccccagggacccctgtgagacagtcagaaaaggcttccccagggaccgagagtgcccacaggctcttcctgctgctttttctaccctgtatttcactcaactctaaatttgtctcagctgtaggtaatgtcaaatccttctcctgtgatctggaccttcaggttccgcagtgagggtgtgtgttcaggggtggacgatcccccttttcacactttgggtactcacagttttttggctgtcttctgggggccctgaagcagcaattcatttccttcaaagggtctgtggattctgttggctttccttgtatgttcctgtggtggttcttggagcaaaagttcacaatgtgaatctcctcatgctgttccgcagagtgggagctgcaagttagtcctgcctcctgttcctttacttctctttagttattttgtgtgtgttattttgtctccttacatacattgtaaattcctagaggaagttatgatgctgtcatcagggatgaatagatatatttgtctacatgcttatatgtttacctatataatggttacatagatacacatgtgcagaagtttatatgcacatacattatcacttaaacataaatgtgtattctacagtgctgcctggtttctgtgtctagtctatgtccattatgttatatagtctttggcatacaagtgttgacattttatgcaacgcattggtgtctttcaagtaaaaattcttttgagaatttttatgggaggttattattattctattttcatgcatctatagttgtcaatgacaacactgttgcttctttatgggttaaactgtcttttttctctggcagtttttcaaacattcttataagctttggtgtgcagtaatttccctgctatattactaggtgtgttgaaatatagtctgctaaatcttgcttgattcttagcacacacattcaatctgcaaactcatctttttttcatactagaaatgtacatccattatttatttgactacttcttttctattcttgttatgtgatcttttgcatttgtcttaggattttctgtcttggctagttatgacttcagatgtcccatggcttgtctctgcctttgtattcacagggccttctccctttctctctgtatgtctcttataacaacacttgtcattggattttgggcccacctagataatctcatctcaagatccttaacttaattatatcttcagtgaccctttttctgaattaaggttacatttataatttcctggtattagggcatgagcatattttttggggggctactattcaatccactacagaaagccattgaagtgtttgaacaagggagtgaaattaccaaaagagtatcttgagattagtttggtcacagggagcttaaaagatcaaggagacagagagtgaaagagagaaaaagagactgaagggaagaaggcaaaggaggcagagagggaggagtgggaaggaaagagaaagagagagaagtagagagagaggggccacaagattaaatggcaaaaggccagatttgtgtggctgattgatatcaaagaagaggaagcagttaaaaatgttcttaaagataaaagaaaattaagaaatagaaaataaaaataaacaggaatagcatatttactagaaggtaactctcttagaagacaaatagtgatcttagttctggatatgttttattgaggatgaagcaaacaaatggcaatgctcaaaacagctaacgacggagaccagatgtttgggtaatggtcttgataggagatatggagctgcaaaatagttatacctgactttttcccatattttcccccaactgctcttgtatagcttccttctttccctcatacacagttttcttttgttgctgttcttgtgtgtgggtcttatgtgtgtgcatgtatttccttgtggtataatgcttcatgaaccactacctggctaccatctatgtttgctcaaggccctgggtctctacagtcagcacgtagtgaagcctgccaggcttgtgtccttccctcagggcagcaagttcccccagtccctgggttggtctagagatgccatctgggagccagggactatagccaaaaaccctggaaatcggccaggtgtggtggctcacacctgtaatcgcagtactttgggaggccaaggtgggtggattacctgaggtcaggagttagagaccagcctggccaacatggtgaatccccttctctactaaaaatacaaaaattagccaggcgtggtggcacaagcctgtaataccagctactcaggaggctaaggcaggagaatcacttgaacctaggaggcagaggttgcagtgagccgagatcacgccattgccctccagcctgggcaacaagagtgaaactctgtctcaaaaaacaaaaacaaacaaacaaacaaataaacaaaaaaccttggaaatctacctgttgttccattctactgtggcttagcaggcactcaaaccatgagacgcaggccttcccactcttccccccacttttcactggcagaggagcctcacctctggccactattactacaagtccccagggagtactgctagcaactgctgatgttcatctaaggcccaagggctcttcagtcatcttgtggtgaatgccaccaggtctgggactcgcccttcatggtagtggactcccctctgactcagagcatgtccagaaatgtcatccaagagctgaggcccagaactggggacccctcagaaccatcctggtgctctatccatctgtggccgagctagcatcgaacatacattgaacatacaggacaaagtctcctttacttttccctctgtttttctcaagcagaaggaatctctcaccatagtcaccacaactgcaaatgtgctaggtttcacctgaagccagcatgtcttaggatctatcttaggatctcatccaagtcccatggattactgcctggatatcactgctggttattcagggcccaagatctcttagtcagcaggtgatggatcctgccaggactaggtttttcccttcaaggcagtgggttcccttctggctcagggtgtgtctaacaatgtcatctgggagctactttctgaataggggcctcacaactctggtgccctgtcctactgtggctaagctggtatccaagatgtaagacagaatcctctttactcttccctctcctctcctcaagtggaaggaagggatctctttttggagccacgagctgtgctgcctgggcttgtgggaagggtagtgcaaggactcccgtagccaccccagctgttgctcaccagcttgtgtgccctccaagtgcatggcttccaatcccagctcatcactaggacttgcttaggagttgcagtccttgcagcctagactgcctttcatgtctatttagggctcagagcagtttagtccgcagttgggaggctcgccagaactcgagttccaactgctgggatgggcggttcccctctggttagggctggtctaaatcctccctccatgggtaggtgtcagctgagttcagttcggttttgctttccactgtgacagggcagcactgagttcaatgcaaagtctcatagttactgtgctctccctctcccaagtacacagattctttctcctgctaaggaacaggcgaggggaggtactgacaatgtaagactgtctttcctacctccttcagtgcctctttcagtgatatgaagtccccagggagtactgcagggactgctgatgttcacttaaggcctaagggctctccagtcatcttgtggtgaatgcaccaggactgagactcaccctttatggtagtgggctcccttctaaaaccaggtactgtgagtgctcatctgattttggttcttagaaaggtgcttttttttggtgtaaatgttaaatttggtgttcctgcttgggggaggataggtagagccttctgttcagacatcttgctctgcccctcctaatgtcacatatggcatttctacctgcaaagaaaccatttcctatccttttctctgaggaggtcttgattggttttagttctaaatttagttaactactgctgcaaatcttaaagatgtggtcatgaatatatttacagagaaatctctaagtacgcttctctccacctccccatgtccgtacacatggggaaatgtacaaatgtacacatacttagattttgctaaccatgcccgttcaacttcatagccttatagtgccataagccttagcagtggtggaacaaaaatcaagagaaaaaaactcatcatacctcttattgccttccagtgtttctcaagctaccttttactcttgtttgaataactgaactatattgacttctacagcatcagtggacaggaatggttttattccatcttactagaaatcaaacatttttaccagcaaattaatttttatccaggaataagatttttaaagccagggcaataagcttacctttctctttcctcctacctttttccgagggtcctattctgggtctttttaaagcaattttctttcctgtcttattctccaatggtgttagaaactacagtcattcattcgattaaaatgcttaagaacagtgaatacagagaaactcttgttctgccagttatcagaggtggaataacaccggtaaatgacaatgaaagattcttttggtttttggatttgaatggggttgcccgttttgctcagtgtgttcttctgtggggtgtttttttttttttttttttttccactgcttctcaaattttactgcttatgaatcacctgggatcttgttaaaatgcagatactgattcaggaggtctgggatgagccctgaaagtttgcattgctaacaagctcccaggtgatactgatgctgctggtctgagaccacactgctagcagcaaggttttagagaacaaatgcattttggtcagatttgattatacattcaacctcagaattaagcacttctccaagttattaacctatcacagaataatatgacctagtgatttcccatgaccagttttaaatctcatggatttcccagagaagaaatagctgttcatgattccactttgcgttgaaaatcagaaacattcctctgccagctaatttccctgaactcatctatctgtacagactttctttctttccttttgtaaagttagagtcgctgcttcctgtggtgtgttccactgtacacaaatgtgagggatgactgtgtgtgaatgaagcaggaatcattgtcttgttctcatttatcttctctaactgctatggaagctcaaaccaaccttctcccctttgttgagctaccattatttgaaagctggatgaggaatacgtttccaaaagccaatctttgctaacttttttctctctcagattccttgaaatggtggttaaagagaatcggaagtttaaaacaggaatttatttatattattggaaattaaattataaacaaaattttcacttctcaaattaaataaaattgtatccagctcctggttaattaaagatatggcagcttagattttttttctccttttatttttgtggcatcatattgaacttctgttggtcataagtttttgcccaaggtataaattatataatataaacacacaaaaaagataatgcaaaaatatgtatccatgtcaatacttttttttttaaggaaccgcggcatttgcagtttttcagcgaatttggcaatagtgatatttatgtgtcactggcaggcaaaaaaaaacatggagcaccgactaactatggattctgctttaaggtacaggcttaatattttgatagatgaataaagcaagcctcagccttttaggtaagcttgagtttcctttaattgcttttgaaaagagacagctttctcttatatataggagaattttagtggcttttatttcaacaggtgttaccttcaagatatgcattaacgataaacaatgtgctgtggccttctagcctaacaaagcgggagggccccgagacctgaaaatgctctgtgcagaagaagagcagagtaggacgtgctgggtgaccgcgattagattgcttaaggtaatctcgccggaggcatgaatttctattaactgctgtgagtaccataaaagttagaaaatatctgtatttcagaacgtgaagtctcactgggtggctacatgagaaagaagaaaaataaccaccaaatgtgtatgtttttaaaattctaaatgataaacattttcggagtagagtggaataacctaatacatttctgttttgtgtgtggagtaagtattccatttctagaaatgttctgattttcacttttgtgaaggtattacatagccagtgtaactgaatgaaatgtctcctatacatgactaagtctgcactcttaaaacgttgccaacaatccaaggtaaagtgtattttaaaatgtgcccacccttgagatatttaatgtaactgttttgtgttcgattcgtgttttataaattgctttctagtttaataagcatgactcaaattattgtacaattttactatgaatatattttttaaacatctactctcgtgctaagtagaaattacaacttccgtaagcataatttgttgctgctgagcaattttgaaatgagtaacaatattctaaaggtagactctcataggaaataaaagcagaactgatgtcttccagaatgtatagaaagcatatttattttcaaaaactgtttgccagaaaattgagcaaaacttaaactgtatacttatcaactatttccttttaaagatactgatttggtagtcacagttagggaggaaattacaaaattttgttgttgaaaagatacaatccagggaaagtgcccgtccacattagttagtattgctgctgctgaagccaacaaaatacataatttattgttattattaaatttttggtttaaaataagagcattaacattttctaaggtactctttataatttatgcctaggcactaatataatttgccaatatattgattatgcatattatatgtgtattagatatatataatccttttcttaccacaggaagatttagattattaacaatgcgtgtactaaaactagcttttcaatatagttagaaatgaaaatcagagaagctggagcactgtgaagtccttaggttcccccatttcatttaccctgaagaaggggatgaagtaaacttttcaattgatttgcagtttgtatattttccaggtgtactttttttcttctgcctttgccatttttacctcttctgctctctgttgactttttcctagcatccaacttaagagatatcagggtaaagaaggacagaatagtaataatcagaatcattatcataccaggtttagaagaaagttttattttgtattcttacaatttttaaattgaggtaaaattcacaaaatataaaattaatcaaactattgttaatgtgaataattcagtggcgtttagtgcattcagttccaagacattttaatcacctcaaaagcaaactccatacccattaagcagctactcccacaccctagcaatcaccaatttgcctctgtctgtgtggatttacctattgtaggtatttcatataaatggaatcatacagtatgtgaccttttgtttctgacttttacttagcatagtgttttgtggttcaccaacattgaagcatatgttagctctttattcctttttatggctgtgtactattccattgtatatatagctctctatatctatctatatgttggataaacacagtttatccattttttcactgatggacatttaggttgtttctacctttggctattgtgaatagtgctgctatgaatatgtgtatatgtatttgtttgagtacaggttttcgattttgggggaatacatgttgtaatgaaattgcttattgtatggtaattgtacatttaattttttgagaaattgccaaaatgtttttccacagtggctgaaccattttgcattcctaccagtaatgcatgagagttccaatttcttcatatatttgtcaatacttgttatttactttttttggttcttgttcttgtcaattatggtcattctagtggatgtgaagtggtattggaagaaagttttaacaaatgatttaaatgaagctttttgtttaactgaaatttacattcttttgctgttttggcagatagccaccatgtttacttctttatgagaggtttgcttgtttttcaaatattctgctgttaaagtcacctgagaagctttctgaatttacatgtggtccccgccccatccttaaggattctgaataagaactactaactttgtccagccctccagttttacagataaagaggctggtactctttggaaggctctactccatcaagagttatggtagagaaaatttcttgtggtttttggttttctctgtttttcaaaactggaaatcaggctaggctgcaaagaggatgttcttcaaccttgttaacccatcttcctcccttctaacttgggcttaaagtttgacacccaaaacagaagcaggtggtaagcccacttcctttaatcagcatttcacttaatctaagaagccattggtttttaccaggagacatcactatttttattagcattaaaaggaaaaaaaatgatgccaataaaatgatgatatgatgctttcatatcacttacaatttttgttttatttattcagatagttttgttaggtttatttgaacctagatttttgtaatttaatcacttttgtttgtatacactcagatgtatatacatatggacataaatgtattttacacatacacatatatatgcattaagtatatacacacataaatataaaataaaatatataagtagaatacattaattgaggtatctttaaaacttcttcttattctaagcctggcttttctgaatcattttcatctcagagtcacagatacctgtattttccacaggatatggcatggggctgtgttccactgatattgcgtgtgcaaggtttgatgctggtgatttcttgatcccaccaaaggtttcgggcaatgacaaatcactgggtccatagtgaatgtaagatgttatagattataggatgcagttgaatttatagatgttaaatttcgaaatgcacatctaaaaatgggtgaaatacactaaaagctttctttaattcttccatttcaatgaggcttattttctggaataatgttcccttctcactattttttctcatcttactgttcttaaggcatctttcaatcagattcccagttcaaagatgcgtcattgtgttggttttctatgactgctgtaacaaattaccaccagggtagtgacttaaagcaacataaatttattgttctttagttcagaagcctgaaatgagtcttactggattaagtcaaggtgttggcagagctgcatttcttactgaaggctctagaggagaatccagttaccttgccttttggcagcctttaaaatccacccagacgtcttgtctgggggccctttcaacatcttcaaagccaacactgtcacagcaagtatttctcacactgccatctccctggtactgcctcttctgcctctcccttccacttattaaggccccttgtgattacagtgggcccacatggataatccaggaccatcaccccaccttacaatcagctgattgacaaccttaattccctttttccatgtagcttaacataggctctggagatgaggatgtggacatctttgggggaccattattctacctaccacatccatgtttcctgttcatttcaataatggcgaagcttttccagatgaggctgaagagggaaggaggcatctgtgaggccctttatctggaacctgtgagaacccaaacaggaaagagacatgatatgatctcttttacactgtaaaatacccagatcacaggaagccagggcttgctccaggtctcacaacacagacacgcttgtggcattctaatggtggagtgagttggcttccctggcaacttcttgtcagcagggctcctcctgttggatccccctggctggtgcagctgggatcacctgatggtagaagtgtctttaacacctactttgttttcttttgttgtctactgtgttatttccagcgtttaccattgtacttagcgggaatgaacaaggagatattatcttggctaaaccgagagtgccctcttttttcatcacacaccacttgttagaaacagcctcccaccaagaatttggccacttgttttattcttacgtccttttcttttatatatatgtaaagtcttcatatggatcagatggagactctctttttctctttggataaattctaattacatatagaattatagaatatctgagacttagaaaatgggagattttctcacatgtaatgtcctagttacatgttgtctcttttccttcccttcaattagaactctgcaaggtcctctctaacatattttggtcccttatctgcccctccataggatggggaaatgttaaggtgacccccgccctacctcttgtccagagttaaatgcctactaaagaccttcagaagcacagaggcaactacctaacactgcaggtaccagggacaatatatctttgaagaaaacagacttattagtaggcagctggcttttcaatgcagattaataaaaggtggccaaacagcatgtttcttgtgaaagtgttggtttgaggttattatatattctccaaaatgaatttgactaggaattaagctcctttgccttctttttaaagctattgtaggcttagagttgatttgaaataaatttcattaggtcccattaatgtcaatcaaaccttaaattaaaaaataatttttagaagttgggaaataattggataagaagtcaacacagagaattttaaatgaatgtgggtttgcattcatgttaaaagcaaaatcttgaaaacagtgactcctttagacctcctctgattttttttttttttttttttttttttttttttttgcctaattaccaaatatacccattgtgctagaattgcttttaagggaatgactatttttctttagtagaaaaacagctctgctggaatgtttaaatagaatttatccttcaggtaagatttgattccatggtgtctatttaatctcttttatataaaacctaacttttaagttcattatggctctatgaaatggacagaattgcagaatctaggggaaaaaaggctgtttattccattgttttatttttcttttcttttttttttttttttttaacaaagtagcttaaacctaaaggaggttagcttccaaattcagatgtggaaacctccaggacaagtttggttttggcagttggcattcttactgtttttcaaactaataatccagttataatccagaccggttttccaattctgtcctgccagctcaatccatatgatgctgcctcctgaaagtgaagacactgaaattcttatcttctaccacttatattgtaccttgaaagctttcatttgaaatcagcttgattcctcactattttggtttccaggaatttgaagtaaaaaattaataatggcattaatagttttgatataaggatgctatattgtcaataattttcaacataggcccatgtttatggatttaccagagggaaagtaaatcattagtcattcatcagagaggtacaataaattttgcacagtgttgcttaggatgtgtgtgaagtttttggaatctttgtaccagaaagcacatcgcccttcccaagtgagtttttttttttttatcatgaggcagtgtactactccagatagttgtggtacaatttggtgctaagaataatgagtagatatgtcagctcctgaagtctgtactggtgagctggaccttaagttgtaggtctaagtaaaagacttcaattgtctttttaaatgtattgttgcagggcactaaaagttcatctttcaaaattttggttgctttacttgtttgctttaattgtttttatatttatattgtataattgatgaaagtgttgattttcatagattatcagagtagtaaaagtggtgggaatgtgttttatttatttattctgcagtatggcatgcagctgtaccagaattatatgcatccatatcaaggtagaagtggctgcagttcacagagcatatcacctatggtaaggaccaaatttttgagcctgtgttttattttacattcacattatattaatttaaattacactacataacagtatcttataataatttatgttattttctgttggtaaagtaactctttggcaccattctagtataatgttacattgaattttttatttttggattttatttgcttgcaatctatgtgataaaatcatatcattatacataaagtatttaataaaatatataatagtatatgttaaagttttaaatatttgaaacaattatgtgtctttctgtgtcattacaacatttgaagattagatcttaaaaatataatttatagaacatattccttggcattgtagattgtgttttgttaattattggttttgattgtggtttcatattttattttaataccgattctgggattgtcacaatctagtataaagatgccagtgatttgaattttaaaagctacagtatacacatgtgagctcttttgcattctggctaacaataatttttttaagttccaggtcctttaaaagcagactgctttccaggaaacccaaaaactgcaagccaaaatataggtcgtgtgttacattaactctagcactgcttttcagacttatactaaatgtaacttggatatttatttgcagacacacacagacacatctttttccttctttaggatctaattttaattttgtgtgcattaacataagaaatgtatttctgaacttaagatttatgttctgctatttttgctgcactccttaagatagggtatattaggaattcagatgtatgcacatgtgttacaaatcagttaatgtgcatttttttaatctacattttcacttaggttaaaaatatgctcttcatgtatgtgaccagggaaggtgcatttatcccacatgtaatgtagtagatgaaatgctcagttctaggaatgaagcatgaaataatgttgattatgaaacctgatagactatatagaaaaagaactccaattttgtagttacgtcactttaacttatggaagaataactttccatctttgtatggtattacttttaagccctaaaataagaaactaaggggcacagtgaatttttataaaagcaatcatgttaagatgaatgtttttacattttttcagcttactcttatctttcaattcatatgtatataaaaataataatgaattttattatattaatcctttcctaaactcctccaaatttcttttagagtccaaaattattaggatgaacatgttaatagcagccaaatatttggaggcaattatttaatgtcctcttaatcataggaaaaatggttataaatgaagttcttcctattctcatcactgtcagcatacatgtatggtattacccttgtctttttccattgaaggtgatgctgctattgatctagatgtggataacagtttagtgtagctttccttgttcagtgccaggtaaaggaagagatactccttgagtgagtttggttgggaatagcagttggaggatgcaggtgcctgtgtggtaaagaaccatcctgtctagcacttgtcctaatcagatacagtagtatgtgagaattacatctttaatattattaatttacatgaaggaaacttagaatctgttttgggaagtagttgtgttgactttggtgtctctataaaatctcacttttccagattatttgggaagaatcaggggcctaaaagatgccagtactctttaccagcctttgttgcttttcatccggggactattttcagcgattaacatataagtttttagtatatattgtagtataaaactttagttatatttttaaaggaacaatattattttctttcttttcctaacttttccaggtatacattttgagaaaggaaatgagaaaaaaaattctcaaaccataatgaacatcttagctatataaaggatgtaacagccaccccatcagcctttgaagtgagaatcaatcagcagcagacatttcaggaagccaaatatatttggtcctttttagggaaaacaaaggattcatttaaaggagcatttatcaatattgccctggctggagtgaggggacggagggttggggaaggcgagtctactcaagctctttttatgcttcacttttgacctgaggatagacattctaaactgcaattcctccactgtatttcccactctatggaacataaaagaaccctacaacagacatatctgttactgcttttaccataagctgcctgtgtgactttggtcaagtcactggtatcctgcagtgtaaaatgagggtgatggttgtataatctagaaaccattacatttctgatgtctgtagctttgtataaagcaaatgagagaaaaatatctgaagaaattgtgtgcccttttgctaatgatggcactgtaagtttatctaaatccttcaaatgggatgatactggttgtcacctagccaaacttcctgaaaaaccattttatgtgcagcctcactaagaattagtagatgtgatctcaaagtatgggctggataatccagggtatacccagacctattttttttcttaaaaagaaagaaagtcatgccattaaaatcatggaccccttttttagggccttctctgttcatctcctaagaaggaagagctagaaaaggggagaagtgttggagaaatataaccaattctgaatgttatcaacattgcttttctatgtgaaagaaattgatctgaaaatgaccttttgagtttgtcagactctgctttacttccatttttttgtccaccaatggtaaactattaattttctatctaccacctgccattcagtagaagacatttgctatagtcctgtgttttccgttaatctagttaatgtagcaaatgaaaacgttccttatttgtagtgtcgtcttcttatgtatgtcaagtaaatagggaacacaggatcttgttttatttcctggcctgctatactagagggagaaaaataggacagctgattatttttttcttaatataatggtatttttatgttgccagggagttgagattacagaacctaccttggcatgtaaacggagagatattataaggataaagctattatgattgaggaagcttactctgtggtttgggcaggtggatgcttttcattaatgtcagcaaagcacaagtatatctgactggtctacagacctgcacagaagatcacggggtgagaagggcaaactaaggtgtgacagcaaatagagattacagagacagcatctgtgtggaaagagcagctgtcagttataaaggctcctgtaacaaatgaaagattgcatgccagatctttagaaatatagatgaaccataataagattgtaggccactacagcatagtttgaagagaaaattacaaatgctaataaagtgggatatgttgaagcagtgataaaggagtcctatagttatctgtggataaggttttgtttgaagcctacatttgactatagtctatgcaaccaagccaggtatagctgaatctacataaagagagataaaatgcttttaagccagggggccccagatgcaggctggctagtagtttactattataacaccactttgggttttgctcttctattaattagtagaaaataactgttattttccatgggtgttttaaaatttttcttttggagaattttaattccttcttgatgttgtatgaacttatgaactgagtgggattcttgactagagattttgacaatggtctttcttaggattcatgacttgttgtggggtggcatatttgttaaaagatggttgtaaagtagagccccaaacaaacaaaaaagaaaaagaagatcgggttttgcatattttactttcaactcaaagaatataaatacaagaagtagttagcaaaaacaatgactttatcatttgtttaaactaagtttctttaaagttgccttctatcagttcttattcaggcttatttttgcagccctcatgtggccaagtgtattctcacaagatgaaaatgtattcatatgttaaatcatggaaattttaaggttatggaattatcaggattattctttcactaaattttattttctaagtaagatgaaagttgatgtgataaacttttaaaatacatattctagtttgctccattataaaactcattaaaaataatgagtattatttctcaagagatatatgtcaatctaagttataacttttgggtatcttgaatcttaaaaactagttgcttcataagtagatggatttgacatttaattgatgactgacggatctcaaagcttaatggagacatcaattcagaaacaatgtatctttttaaccagaggaagagctattcctttctaaatggaagttttcccattttactagagaacgtgaaaagataagtttgttttagaagaaagacatactttaaaagcttttaatctgtttattcaactcttcaattaccttaacaaattactatttagcttttttaacaaaaatatttttagcacctttatatcttgaatatgtattttcactttaaatattctgctagccccttcaggcaccaccttctagaatggaaatgtactgccagaaaaacactgagagaaaaacactgaaattgaaaaacactttcaatttatttgaaagataactttcaaagaaattttcataactcaaatgtgtttcttttttccagagaagtatatcagagaattccctggtagcaatggacttctcaggccagaaaagcagagttatagaaaatcccactgaagccctttcagttgcggttgaagaaggactcgcttggagggtacaagtagcttcacatgcttcaaaatatttatgatttcagtttgtttcacctaaaaacttgagatttgttttctccttccttgctcagaaaaaaggatgtttacgcctgggcactcacggtagccccactgcctcttcacagagctctgccacaaacatgggtatgtctgttcatagtcattgccactgagtagacggatagacatggaaaggacatgtaatgaaattgcagtcatctcaaacaaagctttgcattcatccatcctatttctttagctatccaccggtcccagccatggtttcaccacaaaatttctagagatgaggctcagcgattgattattcagcaaggacttgtggatgg

SEQ ID NO: 15607 - DNA, 59822 bp, Homo sapiens
agttgtttcattgcactgagccctgagattcccaaggagtaaccataaaagatttcttttattttgtccatgacctacgagacaggatcattctaagaagagcaggcatgagtttgagtgcaagaagagtcactctgcctgcaataacgccaataattctacagaaaagggtatgtgacttctttatcctttttttctttaatttttcttgctgctttttttcccctgttactgtgtgtttattaatacataggaagctttacttacatacccttgaaagagcctataattcattaaagttgtaggtaaaattaaaggacatattattggaattgaactaggaaaaataatactgcgctaggacatcgctatagttaaaaactttcacctaaaagaagtttgatctcgatttcaggtcactgtgatttagagactgtattgaaacttttccttttttttctttctactgtaacttcaagcctctttgtttttagctcagtaggaaatctgctgttatgtcttatatttgtttactaaggaatagtttctttgtttcaccataattcataatatatcaatctcttcattgttgaatagactatacaattattttactgtttaaacatgtgttaccagtttattctcaggtttctacccatttctattgagcttctgcgtatttgcttaagaaaaactttccattaaattcccctgtgaaagggctttctgttaattattaatgcagtcaatcctgtgtatgaaaatattttatttattagttttttgtaaagattatttttatgtctcacttacagcattgcattttacaaggtggtatatgcaaccatgtcatgtagtcatagtaaacttttcttgtaactctccaaaataagaacattgcactggacttcttaaagaatcaaatctgtcgcattgagaaggaaggcactaaaactcagttttggcaatatgcttaccaaatggttttggtgacactagaaactgtagtgtttatttttgaactcaacttttaatagttaactgttaactatcagtgcattccattaagtcaaaggtcatgttgcaatttatttgaaacatggcaaatctaacagttaaagtggctatagtttttaaaaacgaagtgcctctttactatttttaatttttagattttcagcttattttcttatccagtcaaccatttatttactgagaatattttatttggcattggaacagctatatgataattttgccaacatgagttctttatctttcttgaggccttttgctaattgtaagcaaatttaattaaaaatattttgctttgggttttaacttttatttggaattggacttagcagtgcattaataatgacaatataggttcctggactcactgaggatgtgaaaaggcatattaacatttatcaagtctatgttctcatgtttgaattcttctttatccggttaatattgcagtttagattgactaagaaacttctatcatatggtttgtttttgatgacatgttggtatgatggaaaatgtactatctggactctccatttactagccctgtgactttgggcaaatccagtaaactcttggagtctttacttcctcatctgtataacaaactgaggagttttcagtaaataatatcttcagtcttatttgtgtctataattctgtgaaccaaatattttatattttcatggttatagtaaaatatgtaaattatttttattattttagaattattataaaacattaggaaagaatgctgtaattttcaaggagtttgaacaattagcctaggggaaattggttatgggaaaacttggctagaaaaataacttctagcactgtttgccaagtaggaaaacaagattactctggaaagcggtggttattattgatgttacatctgagctgccaatggtcacctcattgtgatttatcgtggtattttaataataagcttcttgtcaagtttctgttataatatttataaaagtcaaaattccctagactcaagtctatgctatttttttcagtgagtgcacatattttggtgtttatataatttagcacaccattatgtgcttctcctgatattttaactctgaaaatacccatttgattgttctgaagatcttaatgtcttttattttaggagttgggtattttctgatttaaaaatcatccatctgccctggtcacaccatgattaattttttcttccaatataagaagttatttcatacttgtaattaatttattttccatatatgccataattttaaatgatcttataaatcagtacaagcatttctcagagaatttggggagcaacttattttcccatgaaggcaggtgctttttccacaggtttggtgtaaagttcactcatcctgaatgagtggcccttgacaaataatttatcaaatggaatcctaatcatttaaaaggctgagagcattctgaaaatgctccgtagcaatagggagtaattttcttatcaggtagtgtgtctgatccaagtggctgtaagtgtctctggtagtgcttaggaacttgaattttaaacatggcccttcatgtggtatagatctattttgtagcagagaaagtacgccttgatctttgagaagaaaggtattttggtagattctctatcaagtaaattggaaagaaaatgttcacttccaaattctattaggatctgatttctctgatttaagtgaattaaggttctggtgaagaacgttcctcatgtgcttcagaaacgatcacatcctcagcaaacattgtgaatgaatcttttacctcatcgcatttttctcagatcatcactaggttgtagctttttactttttcaaatgagaagactgagtctcttgggtgttgagtgacttatgcaaggtcacccagaaggtcagtggcagagctagaaatagaatctagatcttgtgacttccagtatgcttctcctagatacgtgttacctcctgaaattaatatggaaatgaaattgccttatggtgggtataattgccattcaagtctggaattagcttaggcaaatcctttcatcttcctctgcacctccaccaactcccttatgctctagcatagaaaacattttattcagaaagcaattgtaagcagccaagtgtgtgtgtgtgtgtgtgtgtgtgagtgtgtgatagaaagacagtttatacctggaactccagattggcacattacataaagaaaacattttaaggtcccggagagttaacataaggctcaagtattgtaaagtataaactaagtataatataaaattcacattcttttatggaaacactaccaggtcagaaggccttacatccatatcctgattcggtgggtcaggcatatttcatgtctctatcagattaacattttttgtttgtttgtttatttgtttgttttttgagattgagtcttgctctgtcacccaggctggagtgcagtggcgccatcttggctcactgcaacctctgcctcctgggttcgaacgattctcctgcctcagcctcctcagtagctgggactacaggcgtgtgccaccacacctagctaaatttttgtatttttactagagaaggggtttcaccatgttagccatgatggtctccatctcctgaccttgtgatctgcccacctcggcctcccaaagtgctgggattacagacatgagccaccgtgcccagccaacattgtttttaagttatgtttgcaaacatttttgcattcttcatccatgctacaattacaggagatgttcataagcacacaagatcctgaagtatcttctgaaatctcagagaaaaaaagggatacttttaatgacatatatttttttaagattcaaatccttttgaaaattgtaaattcatgagtgtaatacggagcaatgccatttatgagaagatctaattccccattcatataagagaatagttcatgttataatcatttctttcctcatacaattagactaattgctatgattttctaaaagtgatttagtggaggaaagaacacatcatcacatcactatttttcccagaatcttttaaacatgcacaaaatcagtccaggcttccttagcatttgccatgctccagggcctgcctggccctcagcctgcccagcttcccttgaagccttcactgcagcatatcgtttgcctccttgggcttcaaacggcttttaaaatctgtatatctgcacttctgctcccagaattgtgctctgcagcctatagacaacaccaggctcatttgctttcccaaatgctgtctattgcctaagtgtcggctcaggctgtgttctcatcctaaagccttctaagactcttttgcttcacctttatcttcaaggtgccttgatttagtatcagtggacccacctttattactcatttgtcaattcaaccactacagccctgtaacatcaattttattattaccttttaaataatatttaagtcatattgccgtccataggtgtgtacaatatgactttcagttgctctatcttgtttatttttgtatatcttggaccaccatttggtttccaaaagttgtcttttgatttttggtcttacaactagatcttagtattttaaaggaagaaatctttaaaatgttttgtcatttatgggcagaatgtaatttcatgtaaccaaaaaacacaaaggactgtggattaaggaggaaaagagatttatttttctttcactttacaaggataagtccaaagctaatgttgcagccccacaatgtcctcaggcaactgaactccttctcgctttctattatttcttctctagtgtgggtcctttttccttttatggaaagataaatgtaaatttccagtcatcctgtttacagtctttgcacagagaatgtgaaggaccaagaacaggctcgtgagttttataccagttaacgtgccattgtggagtaaccaggagtttctgcttacatcttgttggccaactctggatacaagaggagtcaggaaatgcgggcctggagtgtagcacactgccctcctcaccagaatcaggattcatcaggaaggaagagaggaagggtggatattggtgggtaactcgccatctcctctacaagtgccttggacatattagacatttagtaaatatttgtctgggatttttgttattctggtgccagatatgaaatgtagctatgctttttgagcaaataatattctattacttgtatagggattgtaggtatggtaataagtggggagagagcagatttcctgtgcagaagagggtcgtggaaggccatggatggtggtcttagtttagatggtggacttgcttggaaggtgatagtgaagtggtagtgggcattgttactgctttttatccagagttctcattcttgctaaaccttgatatttctcctgccctttttacttttgtacagagtaacttagttgcatactcaaccaggaagggtgtcacacagatgaatggtatttgcattttagtgaaatgtttcttttcctgagaagtgagtttttaggaagtgtgttgtagcagattatatgtatgctttagagccaggaaacccagagtttgagttcagcttcatcactctccagtgccctggctttgggagcattctttcaaaaccctctgagaatcagtttctctatcttggggatgatgatgcttcctcacagaacagttgtgaggattcaacagaataaatatttagaagcatttcacacatagtagaagtctaacaaatatgaatttccctttttccccacctgtgaaatggcatgttttactagtttcataaacagtttaaatttccctgtgactgagaatttaaactttccgtgccctattctcctaaagtggttatccaaagatttcatagtagaaagtgagtcaaacaaaaagtggtttttcttcatagatttcagccagggagagaaagacaatatatctttcaaatgcttgctcccactgctttcctttctgtaactttagaaggtctctaatttgaattaaaaaaaatgaatccaactatatacgctgatgaatatattttttaaaatctttgggaacgtagatttaaatacaagataggtggttaattactcctcctttcagtgtcctaaggagtattagacggggacttctgggttgtatatttgaaagggataaaagtaggtctagtattaagacgttgcttcagtaggcaagtggtgttactattaatagaaccttagctgtatgatggtgagaacttgttacttttgatcatcattgaaccccaatgcccagcacatagaaggcacaaagttggtatctaattaccaattagttggataaaaacaatttttgtaaaggcaagattgagctctttagatactgacctgctatttccttcctaatatttgtctctgttgcttttctttaatttttgccaagtttctcatcttttgggatgaaaagctgtaatgctcaggccttttcattacctttatctagctccaacttgctgcagtgggcaatttggtatacccttcacacagagtattgcccttcacaaagaacaataaaaaatagcagctacaacatgttcagcattgattacacattcactttaaccctcataagaaccctaaaagcttggtggccaaacccatttttggatgaggaaaattggcttagagagttaagtgtcttggccaaagcacctcgctcataaatgacagaggtgggacagaggtccgggcctctgctccacctagcacaggaggctgtccctcagaattgcctgggcacatgtactgcatagctactcatcaccgtgtagctgcagtaatttgtcctctcacctgtagtcttttcatgggacgaatctcaccttttctgccaatctgccttttgctctcctagttacttttccttgctgtgcactcagttttgcctcaaagacatagtgattcaaccatcaggtcagagtttcttagagctcaacaggactgtaggggtctcttgggacttattcagaaatgccttattttgctttcaaaattttataataataattgctaacattagttgagtgctatcagtttgccagcattttgcccattttacagtatgaggagtctaaaactcatggctaataataagtttggggtctgagatctgatcacagcagattccaggatcccctgtccactgtgaacacctgggctgaacccccatgagtacagttgctgggcatcatgattttgcacactgtactgcatgttccacatttggcagtgaaggctgattaaaaatagctgggctaatgaacggtctcagactactgcttggggcggtctgtagggctggctctcatggctgtgccccagaactctaagccaaatattaaaaataataatctcttttttggcaggaaaaaaaagaagcaagacttttggtaatttcagattctaaacccctagaaaggataaggattttctacccctgtaggatattaataatgcttgctattatgataattctcaaagaggaattcaaaatttgttttggcaagaacagcattgtcagaaagcctcctaatcagacatgcatatttgaacgtatacattcaggctttgtttgggaaaataccaggaattattattttgcagtttgaaaactgaaattatcttgggtagttttatcaatatttgaagaaaaaatttgatataactgttcgaaatcccagcgaaaactccaagtttgagttccaggaaaggttcctggtgaggtgacacatatgtatatatacatatgcccccccaatccttcttattaatgtttaatatgtagaaatcatttatcttaaaaattcaaatatttactaattctgaaaaaatagatattaactttgtcacaagcttgtgattgtatcaaacagaaaccccatagttttaacaaggttgcagttttcgaaacatgatattttctctatttgcacaaactgagaaataaagactccctctgctggctacttcagtatttgcaattattctggcgagaagctatgaaaagtgaaaaaacaaaacaaaatgaagaaaaatagtctttttttgacactcaaaaagctaggtgctttgggatatatgtatgtatacatctaattatgttctagtgtttatttatctaatacttttatccaagatgtcatgtagaagcagcagcttaaagcagcctaaatactggacgaacagaatggtaagaatacagcatcaggtgggagccagaaatggggttctgtggctggctcagctggtgaccatttggaggtccttgagcaggtcaagactccagcttcagctttttcatttgtgaaatgggaggatttcagtggatgttctccaggaacccttctaacctttagtattttatgattctaaacagtatagattccatttcttttacaacactgtgctctatgcatgtctttcactgatgtaaaataaatatttagaaaaatgtaaactagtacaaccactatggaaaacagtatggagattcctttaataactaaaagtagaactaccatttgacccagcaatcccacttctgggtatctacccagaggaaaataagtcattatacgaaaagatacttgcacattcatgtttacagcagcacaatccacaatggcaaaatcgtgtaaccaacccaaatgcccatcagtcaacgagtgggtaaacaaactggtatatttatatgatggaatactactcagccataaagaggaatgcagtaatggcatttgtagcaacctggatgaaattggagactattattctaagtgaagtgactcgggaataaaaaatcaaacatcatatgttctcactaatatgtgagagctaagctatgaagatgcaaaggcataagaatgatacaatggacttcggggacttggggggaaagagggagcaggcaagggataaaagactacaaatggtgcagtatatgctgctcaggtgacgggtgcaccaaaatctcacaaatcaccactaaggaacttattcatgtaaccaaataccacctgtaccccaataactcatggaaaaataaaataaaataagaaaagtaaataaataaatatttagaaaaatgaaggaaaagtaaaattacaaaatgggtatacatcagttgttcccagtgtttgttactgcatgggaatgttaggatctagaaagtgatgttttgtacactattataagtttatgaaataatacccccaaatgtcctgggaaggttgaacatagcatattttattgattgtatggcactttaagttgtaagaagcatcattattttatatacttccaataaaactataacataccattaagggtaagttacatccaggtttcagagaagttaaatgtgaaaaaaatgtgcttttaaaaaatcaaggaaataaggtagttcctaaaagggcttcaattgatgccagacaactcaataattgcaataaagtctgatgtgtcttgggctctagcaaacagtatctttctccacctcacgttttccctctcttctaaacacttattccacctctgccctactacttgttcttctttctcactgtgtgaatcaatttttaactttttcacttagacatgtcttatggctgttctgggaataaactattgcttaaaaactgaaatgagatcctgaaataacattgtgtccaacataagcatggccagtggtattctgctttaaatatgaattagcattagcacttgcagaggttttcttgtttcaaagatgaattagccctggcatcttagcaggaattgcatgagtattaaaaacactgaaacttcagagaacacagctttgatgaaatcatcggaaactttagtgtgggatttgtgatttgaacctctttattattcatattggatttaggtcttaacatgtgtgtctgtgtgtgtgtgtctgtatgtgataacttaggatattttctaacttagttgttaatgtttgctttcttttataatgaaattggagcagtttcttttatctttttttctgccacataacagagccaactgaaagggcttgaatttctctttgtcaaattgaacccccacttgagttggagtccttctttctacctaataggaagaaaggaggcccaaagaatgagtactcttcatggctcttggcctgagacaaggagagcagaaaaggtaaataatagagtaggaggataaaggtgaatggaggggctttaaggagatgtcctgagcctcttcttgcctgcaggctttttttctcttggttggaaccctagatgcggcatgctgctgcagtgtcagtgccccaggctatctggtgtgacagtgctaacttcccttctgtgccaagtttagggcatttccagtagtgagaccactactctttagcctgttgctggatgggaaattaatgcatcataaaacatcatctgtggattttgaattcatatccaggactcctggaagctctctgtggatccccaggaacacaaattctctatttctgaatctctttagccaggcatgaccctataatttactgcagaaatgtaatatcatacaaatctataccagggctgggtttttacagagctggtgtggagatgatccatcttgcgaccttaatgataagagctatacctcaaagattgtgaaaggacagaaagagccttggtcaggggtgacttgatggaactgcctcaccaaatcctgagctgcctgccctggtttcaaatgtgagaaggaagtcaacctcaatctggctaacccattgtaggtaggaatgactttctgttattgtagctgaaccctttcctaagtgattaagtcatcatgtggatatttatcctgattctcttaccactttgtaatcatattcatgtaaaactgtcatttttattattaaataacatttaatttttaagaattatttctacgttgccaactttttaaaaagctacccatcacttgtgtatcttgaaaagcatttcctattgtggtggcccctggctagtttgcactgatggaaaccagtgtaccacagtaccgggtgaaggcaccccctcctcaggctgcctggcacccatgcttactccctgtcctcataacttagcccttctgctctccatttagtgtggtctggttattctttcctgagtattgttcactcctttcttcctcagtatgtttgctcatgtttgtcccacacaggtgttttcttaccttctttccttattctttcagaatcccagatatgaaatggctctcagcagtcacctaagccacctttgttcagtccataagtttcatgaaaatttgcctaaattttctctttggttcacatgtgtcttttctcccatagaggttttcaaactccgtgaggtgtcaacactaccattttggaattcactaatactgtctcatacaggggtgtacatgatggtttctttcatcactgaaggaatcgttttgactgtcgctgtgtgccccacattttgctcactgctggggatataaagaggagaaaacagtggtccctgatgtcatacatcgttcttatggtgaagggcaacacgtagtaattatagttgcacacttgcatgcttgcaacaaagggcctggacctaagctggagggtctttggaagcttcctcccagaaataatggtttatcctaagatatgagggagcagaaaaagtagagggtagggaaaccgtgttctaagcacaagcagtagcatgtgcaagggccctgtgttgagaaggagcatgactttttcaagaaacagaaaaaaatgtaggattggagtcagaggacaggattgtagggaataaagtgaaagggggtacaaggatgtggaataaacctgtttgtgtcaatccttgtaattctgatattggtgacagtatctgttttaagtaatgtcttataactaatttaacatgtactgttcatgctcaaggaaaatgtgtttttgactatccctcgcaagtggagaggattggaggcttttcttgcaacctgatttctcaaaactatatactgtttttctcttagtaaatatttgacagctagcaaaataatacaggatagcaataagaaagcagtggatattcttgagctgttagggtcttttggagcagtctttatttttaaaatgcaaaattttaaaaacacaattagagatttggaataagtaataatgactacattgcttcccattccttttctttcaagggaactactgagttgcttaattcaagatatctaaaaatgtctcttgttatcttaggacactgtgtttcttatttataagaatgtaaaaattcaggactactctgaccctgatataaaaatatttctcatgaaatattagtacattgcctatctattagtacattgcctatctattaaaaataataaagaaaaatattgaaacattataagctcttttataattttactgtggttagatgataaactttcaaagagctgtagaaataagcttagctttaggacacagttcagagcaaattcctgtgagccttgtttcttttatcttgtattaactatatgttaactatacatatataattaatagatacaatacataaattaatgaatttatatttctgtttaaaaattatatatgtctcatcatgctaaggtcatatttaaatatgatatttaaaataaatttaaaataaatataatatttaaattattttaaattgaagactaattaattaatagtaatttagttaggtttaactattgaatttaaaatttcctaaaatagaaactttgacacagaagataaccatagataactatgcccaaatatctttttctttcacttttgctcttttttttctttctcttgcttcatcttatggattcttactcattgttttatgtttaatccatgctcattattttacctgctgaatgatgatttctcttctctctattcttgaagaaacaaagaataagtggggcaaacctatggcataattaatgactttccagtcatggcagatccaaagccctcttctgctccgtgacattctcaaacgaccattgacaatgctgaattcatttcaaatattctagaatgaattcacattgaaaaggatctggctatcccatgccatcccattccttggagtcagcaaggaggaggagaaaggctgactgcttagcctttgctcacttttttccttagttatagctttccaaatatgttcttagaatttcaggtgatgcagagaaatactaagtatgctttgggagcaaggtgatacatactgacttgactttattttgtttatttatttttagaaatggcctttgactttcattttaaatattttgtcgcttttagtctagaggctttaaaaggcctcaagtttttttttctgaaaagttaccatttcttcttgtgctttaacattgttgcatctagtattctaaaaatgggttgtgttagtttttttaatctctttcctccacttactttttatgaagagcagtctaggggaggagttgatgtgtaaagtgtataaacatgccttgatagaatgtcagccaaaacagagatttgcttcacccacattccagcatatccctgcaagggctgcagtgactacgtattaaatttgcattgctaggtgccatgtgctcctagggcagtttttgaagctgtaaactactccaaaggccaaggttgttgtgattgtcaggattagagtgacacagaagggctttccaacacaggcagtgtgtacaatcttggccttctttggacgctctgtttatgctggtgggttgttatagataaacattatcagtgctatgtttcttttgctagtcaactttcaatcctttgatggaacaaaatttcttcctattcttctttagggtccaggaagaatttcttcctgttggcatccaatttcaaaagatcttgtaaataaattgatatgaataatatactcctcactctaaagcaagctatgaatttgggccactgcactggaaatgtataatatccttttattaaagaaatgtataatatccctttattaaatagcatgattatataatgtttaaatttttttttaccttttagtatgtataggaaatagaatactaatattttgcttcagtggttcttaagaacagctctgctatttgttttttacatgatcacaaaagtctttaacttagttttaacccatatagtcatgcagtttttgtgatgagttgaattcttcttaaataggaaggtttagtgtagtaattctttgggcaagaggcatattcaactctactagagagttaaggcttcagttgtcttttccttttatatatatatatattctttattgagtcagagtgttgctcttgttgcccaggctggagtgcagtggcgcgatcttggctcaccgcaacctccgcctcctgggttcaagcgattctcctgcctcagcctcctgagtagctgggattacagccactcctggctaatattgtatttttagtagagatggggtttctccatgttggtcaagctggtctcgaactcctgacctcaggtgatctgcccgccttggcctcccaaagtgctgggattacaggtgtgagccaccgcactggccctttcatttattttaaggaggaataaatagaaattaaatgagactttttaacaaaggcatcccattcatcgtataaggaattttgataattacagactatatctaagagatgacagagatttactgcgtggaatatcaacctaaatataattccgttattcatagatgaacgtgtattttggataagtgtgagcattaaataggatttttaaaaaataagggcttgaaatggatttcaaacaaaaatattaaatttttctctcagcaggttttattcattctaacaatgaaatatatgcacttattccagaaattcaagttggcctaagcccctctaaatttgtgcatctcaattcttgtcaacttatgtctaaatttgcagtgacatagtctgaagaaaatagtggcatatcctgattatttagtcactttctcattttatccaactttacctcttgctcttttctagcccttttttaaaaaaaattggtttagccttcagaatgtctctagtttttcattttcttagcttctctgaaataagagatagaacatgcaaaataagaggcatacttctgttaccccaggtgatgagagcttactgtaggaaaacatatgggggtagtcaggaggtgcagagaacattttcagcaacccctagatcattcttcaggccccccatttcttggcatggaatgtgcagcagggaacagaaacagtgatgttattgctgcatatgaaagagcagtcccagagttggttcctcttgttctctcaggagtggtcatcttcacatcatctttggcagaagcacccacgagtgtttagtccaggcagttgtaagcacagcagcatgcctcagaattccatcagttttctagtatagatgcacatactgaagatatatccttaagagcagtggcctaccaagatgcaaacatgagaaacactgagactccaaatagaccttgacatcatagggcatgacatgtattcaccaaaatttgaatgaagtgaaaattcagagagaatagcatctgattttgacagtgtgtttttatgacctttttcatatgacttagtatcagcctcaatgacttcaaaaactcagaactgccatattgagtcagttcctacctaggaatttgtatgatgagaaagtatttgtctcttactcattgagaatatttttaattttctgagcataaaaatgggaattaattatatactcaaaggcagaaaatacttttctattaaaatttgccattatatagagtacctaccatttacaatgcactgtgataggctttgtaagtggtacaaagttccctcgctccacatatctgtattaagtcatgtatcaccctggggtaggttcctgtgatacaatgataaattatgaataaagagagacttttcttaaaagagtttttgctaggagggtgatacagtttggatatttgtcctctccaaatctcatgttgaaatttgatcgccaatgttggaggtggagcttagcaggaggtgtttgggtcatggggacagattcctcatgaatgtcctggtgctatattcatgggattgagtgagttttcactcttagctcccaagagatctgtttgttaaaaagcatcttacaccgccctcccctccctcttgctttctctcttgccatgtgacacccctgctcccgctttgtcttctgacatgactgtaagcatcctgagctccttaccagaagcagatgccagcaccatccttcttttccagcctgcagaaccatgagccgaataaacctcttttctttataaattacccagcctcagatattccttaatatcagcacaaaacagtctaagacacatagctggggagaaagacatgcaaacaaaaagttacaaaatgagagcacataaaagaggcgcattatgaacccttggacagtcagggaaggctttctggagcaagtgtgattggaaccagggccaaatttaggtggaagtttgccagagaaagcatgttgtttgtgagcggagcactgaaatttcttccaggtagaaggaatcacacgtgcaactaagaaagaatggtttgcaagtgtttgtcttatttggtttgggtcacatagtgatctattccataggacactaatcctatttataggggccccacctgcataatgtaattacctcccaaaggccccacttccagatatcatcatctgggactagggattcaacatgtgaattttggagggtacaaacattcagtctattgcattatgacttactctgtgtgggccccatttgcccacagttgttcttttagtaacagtagcagctccagcctacattttcccaggcttaggtccagtagaaaaggaagtgtgtgccaaggttatgtgaacatatatctaaattggctctaactgcttctgattaagtcacatgctcatctgttaaataatcactgttgtctgggtactgattagtcaatatagaaaacatcttccaccctggagctgaggcgatggtgcactgataaactggctctaaaaataaaaattttaaaaagaccttatatgtaaaatttactggtttctatcatataaatacttccatcatggctgattttaagatgcctggcttttagagctcctgaatatttaataatcagctcttgcaagccagttccagcagctccagcaaactgtcactgagctgaaggtggagctaccagagcaccaagtctgctggtgagggagggagtggtactctaaaaggaaatgtatctatctatcagaagaggagtaggcgactggtagacaaagccaagtaattttgcacgtaccactgaagaatttttaagtgctcttatatcattttcttgaataacatttttagggaccatataatattccattctgtgaaaatactgtagtttgcatttttttttttattgttggatgtttaggtcaatagaatgacacataatgctttgctggacatgtaatgcctaaagccattttccatatttagttcagatgtttaaagtagtttgcttaagaaaaattgctgggtcaaaggaatagaccatttaatacttctggtaaatattctccaatagatgtacaaaatagttttaccactttatatcattgtaagagagagcaactatttcattgcactgtcattaagtataatttttaaaagataggacagaattgatatatcattttaatttataacattagctgctgtaatagataaatcctaattcacagtgagttaacagaatagaagtttatttcttgctcatgtcagagtcttatatgggttttcatagttaggcgtcttctatgtggttatttaggaacaaaggctcattctgtcttatggctttcctttcctctaggcctttgtagtcattctgttcagtgggagaatggcaaaaagcaatggaggacaatatgtaggagattttcatgggccaggaagtgtaacattctatatgcttacattccattgactaaaattcaattctttggccacaactaattgcaggggagaaaagagaaaggattgggtgaacatctggccaatttttactgaaatattcatacctgagatggagaaatcttttcataaagtctgattctattccctccttgtactacttgagtatatctgcaataaatcacccatgttactagggttatttacggaatttaaatatagaatatgaaattttattttattttattttattttattttattttattttattttattttattttattttattttattttatttttagatggagtctcactctgtcacctaggctggagtgcagtggcacgatcctggctcactgcaacctccgcctcccaggttcaagtgattcttgtgcctcagcctcccaagtagctggaattacaggcatgtaccaccatgcccagctaattttttatatttttagtggagatggggttttgccatgttggccaggctggtcttgaactcctgacctcatgtgatccgcctgcctaaacctcccaaagtgctgagattacagatgtgagccactgtgcccagctataatattgataagagatacatagctttttcatagaccaaagtggtggggaagtaatactaaatagttattgaatgacctttagtttagacactgaagagaatgaaagttgtcggacaaagtagctttggcacataaacaagtcttggatagataacattcattcagtgtataagaaaattaaatgtagaagacactgtataaggaattataactgattaatctttgctgacttaccagaatgatattttaataaaatattttaataaaaaggctacctgtggattgggaaaaagtatttgcaaaccacatgtaattataagggttaatatccaaaatttataaataactcatacaactcaatatcagaaaaacaattaacccaattaaaaatgagcgaaggactgggtgtggtggttcatacctgtaaccctagcactttgggagggtgaggaaggcagatcacctgaggtcagagttcgagaccagcctgactaacgtggcgaaagcccgtctctactaaaaaaaaatacaaaattagctgggtgtggtggcgcatgcctgtaatcccagctactcaggaggctgagagaggagaatcatttgaacctgggaggtggaggctacagtgagccgaaatcgcaccattgcactccagcctgtgcaacatgagtgaaagaatgaaactccttcaaaaaaaataaaaaaagcaaagggcctgaatagacataaaaatggctaacaggtatatgaaaaggtggtcaacatcaccaatcatcaggtaaatgcaaatcaaaaccactatgagatattacctcatacccattaggatggctgttatcaaaaagacaagagataacaagtattggtgaaagtgtagaaaaaagggaatgctagtacactgttggtgagaatgtggattgatacggtcattctgaaaaacagtatggatatttgtaaagaaattaaaaatagaactgccatatatgacccagcaatccctctcttggatatatacccaaaggagtttaagtcagcatgtcacagagatgcctgcactcccatgttcattgcagcattatttacaatagctaagatatggaaacaacttaagtaccatgtcccactgatgggtgtatattggagcatatatacataatttattttatatttgcattacacacacacacacacatacagatacacacaatgaaatactattcagccttaaaaaataatatgctgccatttgctacaacatggatgaacccagaggacattaagcttagtgaaataagtccttctttcttttctaacagaaggaaaaatattgcatgatctcagatgtgctgtctaaaaataagtcaaatatgcagagatagagaacaaaacagtggttaccaaggacagtggtggggtggagggaaatgaggagatgtagatcaaggatacaaagtagcagatgtgtgggatgaacacatctagagctctaatgcacaacatgagaactatggttcataatagtgtattgaatttggaattttgagaaatgagtagattttagctgcctttgccacacttgcaagaaaatgggtagctatgtgaggtgatagacatgttaatttgttttactatataaccattttgctatttatttatatatatctcataatatcgtgttgtatactttaaatatatacaataaaatttattaaaaacacaaacaggaatattttaggtctttttcttgtttctacctacacaggtgattaaagtatacagtgaagatgaaaccagcagggctttagatgtacccagtgacataacggctcgagatgtttgtcagctgttgatcctgaagaatcattacattgatgaccacagctggaccctttttgagcacctgcctcacataggtgtaggtaaggatacggagttattgtctcacatcattgcttttctatttcttgttcagctccctcttgaacaccaataattcttagatttggtgttttgagataattttctatatcttgtaggtgatcccagttccttttcattcttttttctttttttccttctgatcatgtattttcagatagccaactcattgatgttttcctctgcttgatccattctgctgttgagagcctctaatgaatttttcagttcagaaaatgtagttctcaggttcacaatttgttgtattttttaaaaaattcaatctcattgttaaatttatcttataaatatctgaattgattttatcagtttcatcctggcagtcactgaatttccttaaaggtgctattttaaattcttggtcagagctcacatatcgctgtcttgctggggtcactaactggttccttgtgtctgtttagagagatcaaggttccctgttcgctgttgtttttgtggatgtgtgtctgtatcttggcactgaaggattagttatttattcgagccttctttacctggcttcttttgttctttattggatatattccttagaggtttttgcccataggtcattgccttctttttggctctaggtggtgccttaaacctaggttcgccttggctctagtgaaggtcagagcactgcactttccaaatgggagaggttcccaaaggggatatcccaacagtttgggacagctggctagggacccatggccaggggacctgtgggatgaacctcctatcgtgtggtgctgctgaacagccactctgatttggtgtctcctttggctgggttgcagagcagagtttctggggctgggaatggttgtcctgcccccttttatgtctctgcctgtcctcagggatatttctcccatcaggcaatcacgatgcttcctatgattaagacagaggcagatcttctgccagggaacccaagatggggtaagaggttgtctaccttaatctcactttttctggtgtaaacacagtgagttgggggaaagtttttcacaagcttgtgggaggggcatcgtggtggatatggaagtttgattctcttaccatctggagcttttctttactttcctgtcgcccgtggaactgcctcatcttcatatttgagttctgggatacttctggggaaaatctcagtgctatttatttggttttggttttctgttggggagagtgaagccagtggcttctttgccattatttttcaggaagtcctgcttttctgtttattttagtatagatcctatggtgaagattttcttccgaggtacaaaaatagaaaagaattatgaataatcatttctttattcttttattttttgttatttgtagtcacaagagaaagaaagtagcgcaaagtagaaacaagcctagaaatttttataatttacccacccctcttcatttaaagatctatgggaattttagacctaaaacagctcaaattgatggaagaatacatttcataataattttattagcacaatgcaaagtgtttgatttatttaaaaaagtaagctgtcatttggaccacattttgagtcaattgtagcacagacaggtacaaatatccatagcagtggttctctttatggtagtgtagaccctaaatttttcttgaagaaataagtaagtccttcacatttttaagacataaacacaaggagtagcctcttaaaatgttttatttggaaatgcatctctattgtgaagtgtgaagggcttaaaaatattcttttagtatgttctaaagaattcgttctactagagtgagacaggatttggcaacaattttgtcccctgatttcttatttttatagatttgttttcaaaacatgtttacatataagtagataagacaggaaggagttcgttatggcagtgtcattcgattctttgaactccttattagtttcctgtggttgctgttccaaattaccacaaactcgtcttaaagcaacagaaatttattctcacattttggaggccagaagactgaaatccatatcactggagtgaaatcaaggtgtcgtcagggatgtgtgtcctctggaagctctaatttcttgcctcttccagctctggtggctgccagcatttgttggcttgtggctgcatcacctaatctctgccactgtggtcatattgctttctgctcttctgtctgtgtcaagtctccctctttcttataaaagcggtaacatttcgggcccacccagataattcaggataatctccatttcaagatccttaatttaatactgtctgcaaaattttttttccacgtgacattcacaggttctaggaattaagatgtggttatctttcgggggctatagttcagcctgccacaaacttcattgcattatatgtttaacaacttttagtaagaaatcatcaaaatcattttaaataatttatcagtgacagctccattagttgcttcaatttgttcagacttgtgaaagaattttatacatagtcattagagtcatttactttctagcatagctgccaatatacaaaatcgtccctttgtttgatgcattcaagagtttatgcctcagagcaatgtgccaatgaaaggttctgttcaaatgaacatcctttctcttatgaaatggaattaaaaatgattttggcagaaaaggtgtgttcttagaaggattcattttttaaagatttgggaagtggtttttttgaacactacatgcattccctgaaccatttagaaaatgtttgtacttctgatttgacaactggtgtcctaggacatgtcagaacctcgtgaaggggatagagtaaggcctgtggagaggaagctagaattgttccacggtatcctcagctgatagctgatgagctacaatagtgcaactgactttgacagctcagcctagatagttatcaacctgccaaggacgcttgcttctaaaggtatgtcatactggccaatatgacttgttgcctcatcttctaggacagaagaggctcaacatatattttcttcattgccacttgtgactagtttaacttctatacatgataattaatctcctagaagtatggtgttaattctcaatagatatctgccctattccaagctatttcatttagctcctaattagcataatatattattacagtattttatattcttaaatttttctttcggggggacttaaatttttttttgttatagtcactaccatttatctctaacaaatagctttgcagttcagtaataaaaatctgctctgtaaatcaagaagtgtttttccctgagaacactgcaaattatttgtattaaggaataaaacacacaggtcttttaatgcaaaagctgaaagtggaacactgggaattaatttgatccacatactaaatttaaacttttaggcatcaagtagcaatagaagtttatttctttattactgtattttctggaaactgctgaaataaaatcaaagatatgagcatattctcatgacttcatcaaccatgcattagaccaaagctcataagaaagaattttatttccagagccttcttgtgtttttgttttcctttggtttttcactcagattatatgtttaaacagaacaattgaaaacattaatgctaccccaaaactaacatgtattagatttaatagcttccagttctttaccgatgtaagaggagagtaatcactattgaggtactgtcatcttcctcagcacaaaatataaacagttttgtctttaaaatgttttttgttttagttttgcctttttgcttagtttattataatcttgcaatatctattcagtctaattgtggtaggaagtaaaatgttcaatttaatttgcatatttaaatgaatggaaagaactacagtggtttttttctccttaaatgtgatatgcagctacagatactctttgttaacagaataaaccgctgacatctttactgcaagtcttctgtgagtgctactgatgtaaagaaccaaaggatgaactattttccagaactttagtgatcagctagtcggctctgcatattgtttaagaaccattcttgcactctttttgtccaaaatgatgaattttcaataaataaaattatatttggttttctgttcctgtgttaacttgcttaggataatgcccttattgaatagggagtccagcatccatgatggctgtaggagtgtggctttatttctttttatgcaggacatgatttcattcttttttttatggcttcatagtattccatgatttatatgtaccacttttttttttttcttttctgagacagagtcttggtctgtctcccatgctggagtgcagtggcgcgatcttagctcactgcaacctccgtctcccgggctcaagctattcttgtgcatcagccttcagagtagctgggattacaggcacatggcaccacagccagctattttttttttaattttatttttagtagagatggggtttcaccatgttggccaggcttgaattcaactcctgaggtcaggtgatccacccaccttgacctcccaaagtgctaggattacaggtgtgagccaccatgcctggcctatatgtactgcattttctttatccagtccactgttagtgattctgtgtctttgctattgtgaatagtgctgcaatgaatgtaagagtgcaggtgtctttttatttattttggatgtatgcccagtaatgggattgccgggttggatgatagttcttttttaaattttttgagaaatctccaaactactttccacagtggctgaactaatttacattccaccagcagtgtataagcattcccttttctctgcagccttgccaatatctgctgttttttttacttttgatgatagccattctgactgatgggagatggtatctcattgtggttttgatttgcattcctctgatgattagtgatgtggaggaatttttcatgtttgttggctacttgtatgtcttctttcaagaagtgttgattcgtgtccttcaccactttataatggggttgttttttgtttgttgaattaggttcattatagattctagatattagacctttgttggatgcatagtttgcaaatattttctcccattctgtaggttgtctgtttaatctgttgatagtttcctttgctgttcagaagctctttagtttaattaggttccacttgtctatttttgtttttgttgcaattgcttttgaggacatagtcataaattcttcctcaaggctgttgtccagaatggtgtttcctaggttttaatcttttaaatctttaatccgtcctgagctaatttttgtatgtggtgcaaggtaggggtccactttcattcttctgtatttggctagccagttttcccaataccatttattgaatagggagtcccctcctcattgattatttttgtcaactttgtcaaagctcagatggctgtaggagtatggctttatttctgggttctctgttgtgttccattggtcaatatgtctgtttttgtacaagtatcatgctgttttgattactgtaggattataatatggtttgaagtggggtaatgtgacccctccagctttgtttctttgctcaggattactttgactacttggtctctttttgggttccgtattaagtgggagctaaacattggatactcatggacatagagatggcaacaatagacactgggggctactaggggaggaagaggtgggaggaagggttgaaaaactaactgtcgagtactgtgctcactttctgggtgacgggtgcgattgtatccagacctcagcatcacacagtatacccatgttaaaaacttgcatatatatatatgtgtgtgtgtttcttgaattgaaataaaagttgaaattataaaaaataaataaatagaattgtaaagggaagggcatagtatctatttatttaaatttaaattatttatttaattttttttagagatagggtctcttttgcctgaggtggagtgcagtggtggagtcatggctcactgcagcctcagattcctggactcaaacaatcctccagcctcagcctctgttattattattattatttattattattattttttggagacggagtttcactcttgacacccaggctggagtgcaatggcgcaatcttggctcactgcacccttcgcctcccaagttcaagtgattctcctgcctcagcctcccaagtagctgagattacaggcacccaccaccacgcccagctaatttttgtattttttaaactagagtcagggtttcaccatgctggccaggctggtctcgaactcctgacctaaggtgaaccaccccacctcggcctcccaaagtgctgggattacaggcgagagccaccacgactggcctattattttaaaaaatattttaaatacaaaaataatctatctcattgtaaatacctcaaaaatcatgaagtaaacaaaattattcataatttcaagaccgagataactaatgttaacattttttaaaactctttaatcagtttctctactttaacatagttgctatatgtattaactcttatagactaccttctttttcttttttcttttgtgcacttaaaatatatcttgagtatttgtagttttttacttgtcattttacagattccacaaaaatcagtaactcctcttgccttctctggctgcgttacccaaacagtttagcaaatatttattgacaattttgtaccaagcctatattttgctgtagattctggggatgcagtatgagcaaaacagacaaaaagtattgcccttgtgagtttgcattttcactgggagagagacaggaaacaaggcctaatatttgttatcccgtagaggatgataagctctggggagggaaagcaggaggaaagagggagagtgagtgctagagcagaagggagatgtgctttattttttatttatttatttagagaccgagtctcactctgctccccaggctggagtgcagaggtgtaatctcagctcactgcaacctccaccccccaggttcaagtgattctcctgcttcagcctcccaagtagctgggattacaggagcctgacaccacacccagctaatttttgtatttttagtagagacagggtttcactatcttggccaggctggtcttgaactcctgacctcatgatccacccgcctcggactcccaaagtgctgggattacaggtgtgagccaccacaaccagctgggagatgcactttaaagaggcatcagagaaagcctccctgacggagtgatgtttgagtagagaaatgaagcacgtagcaggcaggctgtgcaattaagtggaagattgttctagacagagggaacagcaagtggaaaggcctggacgtggcagtgtgcttgtgttcaggaagcagcctaggggccattgcacctggagtggagtcaataaggtggaaggtaatgggagaggacatcacagagttgccccaggaccagatcgtgtagggtctcataggccaagaagtgggcctggcatttacactgagtgagagaaaaagcaaggggaggtctttgagtcagagaagaatatgatgtgatttagttttaaaagtatactactaaggagaccagaatgcaagatttgaccttttattttgcttttccatcagactacctgtggctccctggaatgatccccacctatctgtcatttctactagctgtacatgcagccattgtaccatcttcacacgtggtctgtttatgagatttagtgtttgtgagatcctgaggcctcataggtaaggatattttgacttataggatagatgagagttgagggttttctgcactttagctcacttttagtgaccaagataagcttaggccagtttcagagacattccgagttgtgaatacatatgctactatcgttgcttctcatctgtctaaaccatatcacaagctactaaaagcagaagggggaatacttgaaattcaaaatgtggtaagttcctgaacctgaagtctaatttcagagttaaattttctgtggcaaaggaaacttcaatcttattagtattttttttttccgagatggagtcgccgtctgtcgcccagggtggagtacagtatgtgatactggctcactgcctcctccgcctcccagctgcaagtgattcttgcgcctcagactcctgagtagctgggatttcaggcgtgcaccatcacgcctggctaatttttgtatttttagtagagatggggtttcactatgttggctaggctggtcttgaactcctgacctcaagtgatccatctgccttggcctcccaaagtgctgggattacaggcgtgagccaccacgcccgaccgttattagtatttttaatataaatgcatatgtgtgatagctactactagtgtgcatagagtatgtattttaatatccatttacatgcaggaatacaaagatctagattccattagattctgtaatctgcattttccactgaagcaagttggtttcttcccaccacaatatttcaagcaaatgttcctgagattctgcggtcggtttgcctctgtctcactctacatctctctcaggaatgctataatttaaattgcaaaccaccaggaaaactttcgtataaacgttcctaacccaggtggtaatgaaattactgagattgaactgagccaacccagttcaccttatagcagagccagatatttattttggctgagcgagagagaatcatgctaaaagttacctgtttttgaatttgtacaaaacatgaattgtataataatactatgtttggaactttgaatgcaatgtccatgtttcatatcctctacctgtaattattaatatatggctgctgagaattttaataggcagagtcagtcatggaagacaactaaatatcttgattttgttatgaatctctgaatggcctgattttggatcatattattatatggttctacttgtacacacactttgacagacattgaatttaaaatgtcagcacatcaacaaatatttctcctttcatgatgtagtaaaccaggttttgcaactggtgtggtttgcttcacagccactggatgtcactatagttccccagatagaatcctctgtgctgttataatcaatgtaagagtagggtgggggaaaaactttagcttcaagtcctctgaaacttaatgggatccatgtttgtcttgctcccattctgattcctaattgaagccatggtatgaagcagtggcaattaacacaatacctcaagcgcatacctacagactcctcgggaagaggaattaattgtattttagtatcattgctagggacagctgagatttccattgtgaatatcattgtggagtggctttaataagcaaaatgaatgactggaggcttttaatgaaaccattttaatgtgtgcagctatgcccacgtgatcgccttaagacagaagcgatgcacagtgacagtgagggaatggttcacagcctcctgcttggaagctgctccttcgctcttttttttttttaacaaaggaagtacaagtgtttttcctcttctggagctgacatgtagttggacttcctgtgcagtttataacataccagccatcagagttgtgaccaccctcatcacagcagaaatcattgtgaagcctttgggacatgtggcactgtgcttccttccataaagagaaccatgtgccctgaccctctgggctttcaggagacatggtgtcctggtggcacgcacagaccggaaatgggcaatatgtaactagcaaagatagtaagtgcccacaactaaatctgcttctgattcagctgattttttcttctacatattcttatagcctcggctacatgaattcaggtccgagcatctctcccctcaggtattatgttagcctcacaactggtcctcctgcctctggtagtaccaacattatccatctgaatgcagacctgattctttttgcatttggatccaaggtcctctgtggggcttgtagcatcttgtgacctgtctgcccttcatagctgcagtcttaatgtctcacccctccctccttttagtttatacattagagaactgcctgcagatgcctgcatatactacagtttctactcagttttcttgtttgtgatgttaagagtcacaggaaaccccttcctgtccatctttacttggctaactgctatgtatcttccagggcttagttattttagttaaaaatgtcaggaaagtaaaaccccagccttttcttaaaaatacttatggcaataaagatgaaaactctgagctgtccaagctgactgataggtaacgtagtgccactgtccagggagagtggagagagaaaagcagttggaggcatcccatgctcagccttgtgaagtagaatcaccctttccatctatctgacagcaggccgggagacacacctgcctcttacacttgcctgactgcatggcgcaaactgctgctgctgctccagggctgttccttgagatgatcaggatgcttgctgccaccgtccgtactcatacaccccttgggcaattgcaaatcctgaaaacagcagagagctgcaggaggcactaagagtgttagtgatgaattgtgtcctgggaggtgatgcttccacaggacatactatataggtgggtgtgagaaacaagccgtgtggacaagatttagatacaaggttgttcaaagtagattgtttataatatcaattaactagacaagtaaaacctcagtataaaaggagaatgttataaattatagtacatccataggttgtaatgttatgcagcttttgatcatgcttttattcttcctttgaagactgatgtgggtaaatgtaaggttgtggtgacgattgaataaaatcagtgcataaacatatgatgttttctaatattataaaaagtatatacacatacactcatatagagcaagagaaaacgacaagaaaggaatatactgaaaggttaggtgcttattcctgattgacaggtttaaagatgtattgtgattgtaagttatctgtatttgtaaaatttcctttaatggaatgtattattttaataatcagaaaaaagaaataaacacaattttaaaaacttttaaagagatttttaaagccttagctcagacatctttctgaagccccaagttggacaaaatacacatcttctttgctgctgtaacagtttctacaactatcttaacagtgatcaaattattaaaattagacagtaattccatggagctgggactctctgtacactgcatctttgtaacccagggtctaagacaaataaatgtgtttggaactaagtcatactaaactgtaaggcatttatatcaaaaaattaaaaggatggattacaaagtacatagaaggaataggcttggaaaagaagccaaagaaatcacatgctgtgctcagatagaatttactcttgagtcctcaaagaatgctgtgagaaccttcgaattaatggaagctgtctgtaagctcttcagatatttacccagtcaactcgagatcatatatatgcaggcatttttgtggaaaaataaggctgcctctgaatataagttccaatggttgggtcggagttaattggagactatttcccctcgcagaagaatgaactgcagggctttatagccatcaagctgaagtgtcacaattttcctattattgcacttggggagttgaatgtgtctgatggcaattttctgagggatcctgctggtattaagtagtattcttaggttaaggaaccttttagaaattgagctgtgttttattctttgcttctccagtttttgttttgcttggccagaggctgttcatttttatctgaaaataagattgacaaaatgtatgtagtttctacccagcatagagaagtacaaggaccatttgtctcctggagtttcctgtaaaaaaggtattcaaaaaattgttttctgagcgaattagaggtaaaagccacttttgtttcttctcttatcaagtgagagaagagtagggactcaggtttctatttgagctccacgctgtacttggcagtagattcagcaaagaaatccaggcagaaggtcacaggtgagcactctccattcttggaggattgaggtttttaaaaagactttgatgttaaatcaacagtttcagaagaaacttcttgctttcttcttcttttttcttttctttttctttttttaaagaaagagtttctgaaaattcaaaaacagaattacatgtagttatcattatttggtaatatttctttttattaccataagacctcactgacctattagaaacaaaaaacacaacttaaggcaataggaaatttttgtttttgttttgaaaaagcctttaaaatgcttttgaagcttttctttttccatcttcttgattgctatgttgaagtaatttaagagggcttccctcctatttttctacctacatatgagtggtagttgacaattgtaatttactttccaatgcccgaaaaataacgtcagaaagttttattttaaatagacttgtatctgtgaagttttaataacatgttttattatagtattttagatggattttataaagttttaaaaataaagtctaaaataataattttgaattcatgtgattcctacctgtggtcacttctcaaatggtaattcaaaaagtacctgagttcattctgggttttgaacatagcagcaaagagcccctagttgtagaattcatattgttcctttttgatatttgaaataaatgataaataacttagtaggattacttacttggttaaaatttgcttggtaggagaaaggtccaagaaagtttattaaaggccttttgttttagtgttttgttttgttttcccttttcttaggtcttggtgatggtgttttttggctagaccaaggcaagagaaagttggtcttcagcaacatttcacctccttttgcagcgtttttattttcttctcaaagtagtccatctagtcatcttgtatattcctgttgaattttctgtctactagggcctgtatttagtcagatatctgcattgaaaaaagaaatgctaattttatgtgagatgtgattaactgatattcaattatgcctcccagggttatttggattattgtaacattaatcctttaacataatgagattggttgggggaaggtacaattcatgcaaattgggatggtgatatataaatttaaaaagaatatgtaatataatttctaaaaatcagtttctacaataagaaaattatatcttcattaccaggctagtatataaggtaaaaaactatagctgcattcaatccacttgacttttattagcttccttaatatgttatctgaatttttgatagaatagtactagaaatcttttttcgaaggaatggaatgtatgtctttggctttctcacatactctatttcttgatggctttttaaaagatgtatttttcttaagattaccagattattttcctagtgctagtaattgcagtatgtaaatactcagttttatagttctgtgacattttctgcaaatcttttatcctttattttattttttcaagattggtattctggtttttatttgcatgtagtcaacaaaacccctgactagattccacttcttggtaaccatacacattacgctagttcttttttatattcagactcctgagtagctgggattatgggcatgagccaccgaacctgcttagttctttagttacacatttgtcatagctgttcaaatgtagtttgatttttcaaccttttttgttttattttcttttttgatgcagtccaaattcaaatgatttgtactttgaagattgacataatttgaaatcttgcccattactgttttgtcccttacacttaaaatgtgatttactttcagttaattagcaaatatttattgaatacctttcaaaataaaagaattggggccgggcgcggtggctcacgcctgtaatcccagcactttgggaggccgaggcgggcggatcacgaggtcaagagatcaagaccatggtgaaaccccgtctctactaaaaataggaaaaattagccgggcgcagtggcgggtgcctgtagtcccagctactcgggaggctgaggcaggagaatggcgtgaacccgggaggcggagcttgcagtgagccgagattgcgccactgcactccaccatgggcgacagagcaagactccatctcaaaaaaaaaaaaaaaaaaaaaaaaaagaattggaaacaactaaggtagagaacggcaggagcatgaaagagcaattttagttgatatagacagaatgtgcaggatgtaaatagatccagcagaggcgctagggaatgtcccttgggtgagaacttccatgaagttgaagcaatgtgtgcagggaaaagaacatcaacttgggctcagacatgtggttgtcattcaacctgggcacttgggacctacaagagggggcacttgggacctacaccatccaattaccatccagctccctcacagtctccactccaccagtttccttcaataactctttaactctgcctcgtttcccagagggcagagggtgggtccatatacatggctattctgaacctctgtttctatctgtaaaatggaactataacttgcttattacattattatattgatttcctaaggcttatgtaacaaattacaaatttggtggcttaaaaaatagaaatgtattctttcacagttctggagagtcacattctttccaagaaccttagggagattccaccccttgcccgttaacagcttctcttggctactagcattccttggcttgtgatgatttcacttgaacctctgcttccctgatcacattgcttttcctcttctgtctgtgttaaatcacctgcctctgtcttaaaaggatatatgtgattggatttaggtcctaccttaatccaggatattccccccatttcaacatccttaatttaatgacatctgcagaggctttaccacataaggcaacatttacaggttctagagattaggacctgatatctttagggccattatttagcttactataggtattataagaattaaatacaataatgaaacagctgtcagactcagacatgcagaaattactgtattttgaattagtttctgatactgagtaacctggcttaagaacagacaggttattcttctattatttgtttgttctctggattgttcttagtctttttggggaaaataatcaatgcagtttttatcaatgagttccatacacgtttgaaatgtgttcagttgaaggtttagacctaccttcactcctccagcactctgttgggacatgtaaatccccagagggatatctgtctaacttttatccaactgttgtcttcatgttgtagaaactcctgctttttaagcttattgcttatatcatgatgacccttaggttcatggtcttcctttagtccttccacatttcttctcaggaatgtggcactacaatactcttgccccgtactgggatgctgtggacttgacattgtacttagctattgcttctctgtcatgcttggtgaagggcttctatttaagggcagggtatagactttcctaagtctatgctctgatttgagccacataccactgttaaacctatccggagtcttacaactcatagagggttctgttcaggaaggaggcaggatatggggtcacttgggacctacaccatccagttaccatctagttccctcacagtctccatccactccaccagtttccttcaataaccctttaactctgcctcctttctcagagggcagagggtgggtccccacaagtgacaatggaggattgactaggcatgcttcttcctaaataattatatttgtcaaaaattgataaagtctactgtgacactcaaaaaaacaacaaaatgcctctttgctattttttcctttctttatagtgtagtatgagggcagaattcatactattttcttagaggtagaggaaggtaatgggtccaaggaaacacaggttggcaaagcaaacaaacaaacaagcatctttgttgatatcttgaaattgtctcccactgcagttgcaaagaatacagataccgtgcttagcacatagtgcatttaataatgtgtacctgtgtttcataatcttgaaaataccagctgagtttgtgtgaaaagtaaacagaagtaaggacagatttttaaggatgcaacttcccccttggtagctcagtgatcactggatgtccctccagtttgtcttgcagtttttctagcttattactggtaacacatccttccaagtgctaaggctgagaaccttgatgtcttcctcaagtactttctttttcactccatatccaatttgtcagtgaattctgttgtccctaccttcaaaatacatcaagattctgtgtattttttttaaccacatcaactgctaccatgctaatgtaagctgcatcatctctcctggggttagttccaatagcctaccaaatggtctttgtgctttcagccttttaaaatcagttttctgctccacagtgtgatcctattgaaacttgttagttcatgttattcctgtgttcaaaatgacttcccatctaacacagaggaaaagcctagcccttactatagactgcagggctttctacaacccactatctcatccccattatttccttaacttcttctcctgggataaccccttttccttgttcagcattagccacactaacctcctggctgtatttcaaacataccagcctttctctcacctcaagggtttttttttcttgcttctcctctctatctgcttggctcctgtcctcttctcctttaggtctctgtttaaacattaccttctcaatgaggccttcttgataagctgatggaaatggattcctatcccctgtcctcagcactttctctctcttcgctgctctatttttccctgtaaggtttatcaccactattatggtttaaatatatgcccctccaaatttcatgttgaaatgtgatccccagtgttggaggtgggcctagtgggaggtgtttgggtcatgagggcaggtctcttgtgaatgacttggtgccatccttgtggtaatgagtgaattctcactctatttgttcacacaaaagctggttgttcaaaaaagcctggcatgtctattgctgtctcttgccgtgtgacacgcctgctccccctttaccttcctgcatgattgtaagcttcctgagacctcaccagaagcaggtgctgctaccatgcttcctgtatagccatgagccaaataaacccctttcctatataaattacccaacctcaggtatttcttgacagcaacaaaaaatggattaagaccactactttttatgattcacattttatttattgtccatgtattcccattagaatgaaagcttcatgagggcagttattttgttactgtcttctccactacaaaatttttagccctaagatgagtttttgacatactgtgaaccttcaacaaatatttgttgaatggatgaacaaatgactaagttataactaactgccagactatatgcatttatctataacaggcagaagcagacaagctttttgggcagggttcacattcatacacatgttttaggaggtttgctatgctatcggtgtccacgttggattagaagaatgagaaagtagaggcttgaagattagttaggctgaacaacaaaaggcaaaggtctaaattgaaatggtgacagtgggacctggtgtgggggttgtttgttgtgtaagagacactcagagaaagaatccctgctatctgagaatttcaggagtagaagatattggagcagacgtagagaaagttgcaaaggtgagttgtagtctactttttttgacggaatgtggtaaaaatgacagtaatggagacgggataatttaggaagaaaaagtcatttgaaagggaaaaatgtagatgactttgtttcgtttttaagtttaaaaagttttttggtaccatttgaaattttgtatgtgtacagttcagtggcgttatatgaattcacattgttgtgcaaccatcacgactggccatcaatctctgaaatattttaattttctcatactgaaactctgcatcaattaaacaacaaccctttattccctactccctcctacccctggcagccaccattctactttctatctctatgaatttgactattctaggtaccttgtataagtggaatcatacagcatttgttcttttgtatttgtcttatttcacttagcaaaatagcttcaaggttcatctatgttgtagcatgtgtcagaattacattcctttttaaagctgaatattccattgtaggtactgcgtataccacatttgttatctattcattgttcatggacatggacattaggtttccaccttttggctattgtgaatgatgttgctatgaacattggtatacaaatttctgtttgagtccctgctttcgcttcttttgagtaaacagccagaagtgaaattgctgatcctatggtaattttatgtgtaatattttgactttggttttagacatactgtatttgaggtggtgcacagtatagtagttaggacaggagcatgggtgagaacaattatagccagagatttcacttcagaaaacctgacaaattagatggttgaagaggtgagaatggattaatttatagggggagaaagaaaagagttgaaccaagattgtaggaggagaaggagctagtggagccagtcgatgggatagaaaaggagcaatcagagttaggaatagaaccccaagtgttgatatatacttagctcaaactcatccatattcattgaacactcttaactgaacttcttttttggatgaataaatgtctatttaagaatgatattactttcaagagtttgggtgttgtaggtcacaaatcactactgaatgttgaatttctgagacataaatgctttttaaaaacatcctagaaacagtaaaacagcagagagtttccatattccttatttggttgttctccatttcctattttgcattggtaatttccagtttcttttcttttctccaccttttattgaagtatggcatacattaagaaaagtgtacaaaccaagtgtgcacaactcaatggactctcagatattacatatactggagtaaccaaccccaagatcaagaaacagtattgtactcaccccagtgattccgttcatgcccccacttacttaatgtctccaaaaccctttctagcactgtagattaattttgctgttttgaaccttatgtaagtagaatcatgcagtatatactatctgtgtctggattctttaattaaatattgtgttcatgaaatgcagtatttatccatactgttgtgggttgttgtagtatattttcactgtgtgcttttacacaatttacttgttcattctcatgtcagtgggcatttgggtagtttcaagtttggggctattatgaataatactactgtcaacatcctcacagtttcttataaaaataggaatttcgcatgttatagtcacctctttaaaactgcctttgcttacttcatttaagtgccttttctgccaagtgccttcccacccacttaattatcttcattgttaatacaaaatatattttccttggtattagctttgaaagtataaagtgccccaaggaattgggcttcttaaaaaaaacctgtatcttcttgtattaaaattttcctttaaagcatttattttaattcttctcagctatccagattagtctggacagtcttaaatgcacatgaacctgtcaaaattcttcatctcttaatgaggtgaattgtccaaccttgaaataaatactttagttttggcaccatgatgagtcagagaaaaaaatagttcccatatacttaatgcagatgtgttatcaaacttatattatttacacagtaataaaaggaaattgagataacaaaaagtacattatgatattttatacatttttttctttctagacaacagtctgctttggtataaaaatgaacattagtaattgaaaattgatgacaaattttatcaatctggctatctcataattaagttgaaatctgctatgtttaacaaagatgcgtaatacattttatatgtttgtatgtgtctgtgtgtgtatatatatatatatatatatatatatatatatatatatatatatttgtctatctgtcaacatactcattgaaacattctttacagaaagaacaatagaagaccacgaactggtgattgaagtgctatccaactgggggatagaagaagaaaacaaactatactttagaaaaaattatgccaaatatgagttctttaaaaacccaatggtaagtgaaatccctcctaatagttacggaaaataaatgaacccgttaaattttatgtgaagaagatagtcactgtaaataaaatacagtcctattcggtaaattgtagatgaagactctggtcctttgaaattatacccatatttcttatgctaacaatgattagtgaacattatacacagaagttcagatacacaggtgcaaaactttttaaagccgtattggtaaagtctgaattgagatgaatttggtttatttaatttaaaagtattaggaaacctagttttgccttttgtgaaaaggtaacaattatacatttgatgtgggaaatgaatttctataggttctcacccagattaggaacaagtgttaagcaaaatattatatcttaacactttctatagaatttaggaaatttaaatagctttctaaagtaaaagcagactaatgattgttgagagtattataacttagccagaaattaagattgacatgaatcttgctattccaaattattttgttttcggtgcagtaatttttgaactaagtagaaatgagataaagaccagtgcattatctagtaaatactactttcattgtagttctctttaaaagaaaataaatgtgtgtcacattctaatgaagactagggatctagaaaagtcagaatagcctctgggctcattattttaaattgtttttgtctctgcagctgaagcatatttttacactaagttttggatgataattggattgaaatgattctttatgaaaaatatatgatacacaccataatagaatattttcaaaccctgaaagacctctcacgttgtcttttatcttaacctattaatagaaacataatgggatgatctttggcaaagaaaattagtcataataaaaattaaataaattcaactgtgaagagaaagtgtttctttttgttgtgagtccttattaaagacaagaatttaaaaagatatatttaaagaaatattgttcaatgcttgttttttatttattttttatttaaacaaggctggacatttgttttgtagacctattgcagtggttcttaactgggaggtgattggacaatgtctggacacatttttggttgtcacaactggcagtagaggggagggctgctagtgagcagaggataggaatactctaaacatctataatatgcaggagtgccccccctcaacacagaattattagaccaaaatgttagtagaactactgttgaaaaaccctgtcctagaggaaatatagtagaatatattttcccaaacttgtctaatcataaaatttactgaggggagagtgcttattaaaaacatagaatccaggacttgcccggatctactgaatcagaaactccaggaatgaggcctgggaattcctattttaaacaactgccctgggtgaattttatgattaaaaagtttggaaaaatggtaggtagaaagaactggacttttagctcccagcccagtttaagtcctgacctccactgtgctgtgggctatgaccttgggcataccctaaactctgtacttctgtgagcctgttccttgtaaaatgtcatggatagtccttttgacctgataggctggttgcgggactcaggaataagatgtgggagcaagcacattgtcaacttcagggcagtgttttataactccagatacttgaatccatccacatcagcattatctgggggcatttgctaatctttgtgcccaactccagacattctcattaaggtacctatgagtagagtctaaggacgggcattttcaaaagcacttttgggtgaattttagtcacaccagtttaaagaacttttgcttttgattactatattggtcataattgaatcttttctagcatgaattttgtgataatttaactgtgtctttttgacagtatttttttccagagcatatggtatcttttgcaactgaaaccaatggtgaaatatcccccacacagattttgcaggtaaaatatatttttattaacatatataaataatagcataatgaaggaaaacttttaagtccttttttatacatgcccagattttgaaaagttatgctttgaattattattaatattttttgctggaggtaaaactaaaaaaaaaatgcacccaggcaaagaatgtcctaaatcaataaagctctttaacaatattcttcttcccagttttagccaattgtcaaaggattttacatatttaaaaatgtgtgtcttaaaaggaaacttgcaattttgttctgtgatgtgtgtaaatattatgttagtctttagaaaaatcagaattctttgtaaaatacagatatcttaccaatagatactcagtatcagctttcataataaacaccctcaatcctatttgtaataaaatgtttagcaaataaatgaaaggagataaaagatacaggatgcaaatgtattcactagcgtttgtaatagctgttatggaaatccttgcatagaattgtgaaatattcttagctgaattaagaatactagttatctaattaaaaatctccttatttttgtgtctattggactcatttcttccaaactggcagtggcttgaaatggttattttcaaagacattgtcattacaataaatgaataatttcagttattttctttaattttcgatagatttgtagattttacatcagaagctctacagttgttttttacaggttaatgttgagcaatgtctttataatggttgccgtttgagctcagccccatgcatccccaaacccactcagtatcccctgatctttaatgaagacaacttttaatatttccagtattgtttgaccttaaaaatattaggttggcagagctatcatggatttttctgtgggctttttaataggttatatttcatttttgtgcttcagaatatttttgaaacatgattagtccccagagatttttctaaaagctgcttctgtgctcctgggtttttacagagacaccctgtcaaaatgttaggtaaatggcagcagcagctgtgccccaggactttcagatctcagccctctgaatgcttcaccactgtattacaacacagtggtgggatggagtttttattccgcctccttttgcaagtcttcctgtagcacagttatgttgctttaatgttaaattataaaaacaagaaaaatcacaggctttggaatcagatagtcctgcatgtgcccctgacctcttctctccactgaggcaatgtttcccctttttaaaaggtttcttctttttctagtgtgacctctatgactctctttttaaaatttaattggtttggtttaataacttggaaagcactcaaactaaaaaacctacttgcctgttttgcatgtcaattaattaatatctgtggctcattaaattaaatttcttttagtaatttactttaaaaaacataaatatctactgtcagcatttcctttagtagccttttaaaatgtgttacactattttagttaataaattcccttatttcaaattttttccatttgtttattcagagggatttctattttctttttttttttaaatgagacactaatgcatttccactgtcttattaaggatgctgagcacaaacgctcagttgagctattccttttcattctcattttcttgaccaacacatgcccactgtctcaattaattattaccatgtaacaaactattccaagcctttgtggtttaaagtatccatttacattttgccaacaatttgtgggacaggcatctgggaagagtttagctgggtgggtcatctctgaggcacgttgactcagtgctggggattgaaggtccccttctaagagagttttttgactgcatgtcgtttgatactccttggtgtctctgtctctctcccctgtttccccccacttactgtctctctctgtctgtctcatggtgtctcatcctgcagggcttttccagttgcattggactttttacctgtgatggtctcagagtagtcacatttcttatgtgacagctggattccaagggccaagtcacgaaaatcaccaggctagttaagggccacacctagaattggcaaagggtcacttccacatattgtatgggtcaaagcaatgacaggcttgctcgcattcaagggagtggagaaagactccacctttttgtgattcagtggcaagatgacattacagaagagcatgtgggatggaagacattgttgctgtcctctttggaaaacatgacctgccacatccacccacaactgagaaccacagatgacaaagaagagatagttttgtttgctttacccgcctcaaggaggtgaacttggctcaacttcctgcttcacaattgaagtcaggattgtggtcttacttataccataatgaagttaataggtaaacctgtaatctcagggaaaaccatggaaaacgatgaaaagcatatcaggacttaacgcaatagatgacgtccaactttttgaatggacattcaattagctgataattttggtagttagataactatgtactatcacttagaatgtatattttgtgaactcattttcatttgaaacatcttaggtttttggaagactgatttattttctgtgtgtgtatgtgtgtgtgtatacacacacggagatagaaagagagacagaggagagagatataccaaggactatcaaagcaatgcagtatacacaaacacatagttaattaccataatgttatatgttatgatcttgtgtgatttttacatgtttatatttggaatcttaatatgattagtataaggctaccatatcattgatttaatcatagtttgaaaatatataaattttctttcagatgtttctgagttcaagcacatatcctgaaattcatggtttcttacatgcgaaagaacagggaaagaagtcttggaaaaaaatttacttttttctaagaagatctggtttatatttttctactaaaggaacatcaaaggtaaattgaagtatccatgatgtgttatgactgacatattaagctgtaagttaaaacacgttgactttgttgtatttattactttattacttgatgtcaaaggttggtctttgattttcttgatttaaaacgtttgccttgattatttaaacactactcagctttacttcacactggtttcaaagtgtagtatctttgatggagtctggatactcttatttcagtacaacgtatgttactcctttgtcctcactctgaattcactcctttctcctcatccttggcttcagagtttgaagcctgatgtagtgtataccttttctttttaccccaggtcatactgctgatcttgtctacttctgaatctctgttgatcaacatcaacagaacagttaataatagaacagttaataaaatgtctcttctgagtcatttattgctcttttattattgattgatggatttatttcaataggtttttaaggaacaggtagtgtttgattacctgagtaagttctttagtggtgatttctgagagtttggtgcacgcatcaacaggcagaatacactctactcattgtatagtcttttatccttcaccccctcccaccttttccctgagtccccaaagtccattgtatcattcttattcctttgcattctcatagcttagctcccacttatgggtgagaacatacaatttttggttttacattcctgagttacttcgcgtaggataatgatctccagttccatccaggcagctgggaatgccattatttcattcctttttatggttccgtggtctgtctgtctatctatctgtctgtctatctcacaatttctttatccactcgttgattgatggggatttgcgctggttccatatttttgcaattgtgaattgcgctgctataaacttgcatgtgcaagtatctttttcatataatgacttcctctgggaagatacccagtagtgggattgctggatcaaaatgtagttctacttttagttctttaaggaatctccacactgttttccaaagtggttgtactagtttacattcccaccaacagcacaaaagcattcccttttcaccacatccacaccaacatctactgttatttgatttttttgattatggccattcttgcaggagtaaggtggcatcacattgtgattttgatttgcattcccttgatctttggtgatgttgagtatttttttcatatgtttgttggccatttgtatatcttcttttgagagttttttattgatgtcttcagcgtactttttgatgggattctttgttttttttcttgctgatttgtttgagttccttgtagattctggatattagtcctttgtcagatgtagaaattgcaaatattttctcctgctctgtgagttgtctgtttactctgatgagtgtttcttttgctgtgcagaagcttttagtttaattaagtcctatctatttatctttatttttgtttcatttgattttgggttcttagtcgggaagtctttccctaagccaatatctagaagggtttttctgatgttatcttctagaaacttttgtggcttcaggtcttagatttaagcctttgatccatcttgagttgatttttgtataaggtcagagataaggatccactttcattcttctacatgtgacttgccaattatcccagcaccatttgttgactagagtgtcctttttcccacttttttttgtttgctttgtcaaagaccagttggctgttaagtatctggctttatttctgtattctgttccattcgtctatgtgcctatttttataccagtactttactgtttgggtgactatggccttgtagtatagtttgaagtcgggtaatgtgatgcctccaggtttgttctttctgcttagtcttgctttggttatgcaggctcttttttggttccatacaaattttaggatttttttttctagttctgtgaagaacgatgatggtattttgatgagaattgcattgaatttctagattgcttttggcagtatggtcattttcaaaatattgattctgcccatccatgagcatgggctgtgtttccatttgtttgtgtcatctatgttttctttcagcaatgttttgtagttttccttgtagagttctttcaccttcttggttaggtatattcctaagtattttattttattttttttacagcttttgcaaaagggattgagatcttgatttgattctcagcttggtcactattggtgtataacagagctatttatttctgtatgttaattttgtatgctgaaactttgcttaattcatttatcagttctaggagtttttgggggaatctttagggttttctaggtatacgatcatatcatctgtaaacgatgacagtttgacttcctctttaccagtttagatgccctttatttctttttcttgtctgattgctctggctaggactttcagtactatgttgaatagaaccggtgagagtgagcatccatttcttgttccagttctcagggggaatgctttcaacctttcctcattcagtataatgttggctgtgggtttgccatagatggcttcgattactttaaggtatgtccttctatgccaattttgctgaagttttttatcataaagtgttgctggattttgactaacgctattgagatgaacatgtgatttttgttctaaattctgtttatgtgttgtatcacatttattgacttgcatatgttaaattatccctccatctctgatatataacccacttgatcatggtggattatcttttcaatatgctgttggattcggttggctagtattttgttaaggatttttgcatctatgttcatcagggatattggtctgtagttttcttcttttgttgtgtcctttcctggttttggtattggggtgatactggcttcatagaatgatataggggtgattccctctttttctgtcttgtggaatagtgtcaatgggattggtaccaattcttctttgaatgtctgatagaattcagctgtgaatccatctggtcctggacctttttttttgttgatcatttcttttattaccattttaatctcactgcttgttattggtctgctcagcgtttttatgtcttcctggcttaatctaggagggttatctttccagaaatttatccatgttctctaggttttttagtttatatgcataaaggtgttcatagtagccttgaatgatcttttgtatttctctggtattggttgtaatatctcctgtttcatttctaattgaccttatttgggtcttctctcttcttttcttggttaatcttggctaatggtctatcaattttatttatctttacaaagaaccagcttttgtttcatttatcttttgtattgttttatttgtttcaattttatttagttcttctctgatctttgttatttcttttcttctgctgtgtttgggtttggtttattcttgtttctctagttccttgaggtatgaccttaggtttcctatttgtgctcttttagactttttgatgtaggcatttaaggctatgaactttcctcttagcactacctttgctgtatcccagatgttttgataggttgtgtcactatcattgttcagttcagagaaatttttcatttctatcttgatttcattattgacctaacaatcattcaggagcaggttatttaatttccatgtatttgcatgattttgaggtttccttttggagttgatttccaatttattacactgtgttctgagagagtacttgaaataatttcaatttttaaaaatgtattaagacttgttttgtggcgtatcatatggtctaccttggagaatgttctgtgtgctgatgaatagaatgtatattctgcagttgttgggtagaatgttctgtaaatatctgttaagtccatttgttttaagatatggtttaaatccactgtttctttgttgaccttctgtcttaatgacctgtctagtgcagttagtggagtattaaaatcccccactgttattgtgttgctgtctatctcatttctttacgtctagtagaaattgttttataaatttgggtgccttaggattaggtgcatatatatatttaggattgtgattttttcctactggacaatttcctttatcattatataatatccctctttgtcttttttaactgctgttgctttaaagtctgttttgtctgatataagaatagctattcctgctctcttttggtgtccatttgcatggaatgttttttccacccctttaccttaagtttatgtgagtccctatgtgttatgtgagtctcttgaagacagcaaatacttggttggtgaattcttatttattcttccattctgtatcttttaagtggaacatttaggccatttacagtcaatgttagtattgagatgtgaggtactgaggtactattctattcattgtgctatttgttgcctgaataccttgtttcttttttcatcatgtttttgttttataggtcttgtgagctgtgagctttattctttttttgtaagatggtgatatggtttggctgtgtccccaaccaaatctcatcttgaattgtactgtcataattcccatgtgctgtgtgtgggacttggcgggagataattgaatcatgggagcaggtcattcccatgctattctcgtgatagtgaataagtctcacaagatctgatggttttataaaggggagtttccctgcacaagttctcttgtctactgccatgtgagatgtgcctttcaccttctgctgtgattgtgaggcctccccagccatgaagaactgtgagtcccttaaacctttttcttttgtaaattgcccagtctcatgctgataaagtatatctttatcagcagcatgaaaacaggctaatacagatggagtcttgctctgtcacccaggctggattgcaggggcaccatctcggctcatgcaacctccacctcctgggttcaagtgattcttctgcctcagcctcccagatagctgggattacaggcaaggaccaccatgccagggtaatttatgtatttttagtagagacagggtttcaccatgttagccaggctggtctcgaaattctgccctcaagtgatccacccacctcggcatcccaaaatgctgagatttattctttaaagaggttctattttggtgtattttgaggatttgtttcaagatttagagctccttttagcagctcttgtagtgctggcttggtagtggcgaattttttcagcacttgtttgtctggaaaagactgcttagtttcgctggatacaaaatttttggctgataattattttgtttaaggagactaaagatagggccccaatcccttctagcctgtagtgtttctgctgagagatccactgttaatctggtaggttttctttttttttttttctttttctttgagtatccctctgttgccaggcagaagtgcagtggcatgatctcagctcactgcaacctctgcctcccaggttcaagtgattctcctgccttagcctctcaagtagctgggattacaggcgcacgccaccatggtaggttttcttttataggttacctgatgcttatgcctcatagctcttaagatttttttcctttgactaggctttggataacctgatgactatttccctaggtgatgatttttgtgattaatttcccaggtgttctttgagcttcttgtatttggatgtctagatctctagcaggctggggaagttttctttgatgattccctcaaatatgttttccaaactttcagatttcttttcttcctcgggaacaccagttcttcttaggtttggtcatttaacataatccgaaacttcttggaggctttgttcatcttttaaattattttttttttgtctttgttggattaagttgaaagccttgactttgagttctgaagtcctttcttctacttgtttgattctattgttgaaactttccagagcattttgcatttcttttagtgtgttctttatttctaaaagttgtaattgttttttattcatgctatctatttcactgaagatttttcccttcatatcttgtatcatggctttttttttttttctcactaagttgaacttcacctttctctggtgccttcatgatgagcttaataatcaatcttctaaattctttttctgacaattcatagatttcttcttggtttggatccattgctggtgagctagtgtcatcttttaggggtaagaagtaacttgttttgtcatattaccagtattgtttctctggttccttctcattttgggtaactatgtcaaaaggaagatttgtggctgaagggctgccgttcagattcttttgtcccacagggtgctcccttaatatggtgctctccctcttcccctagggatgtggcttcctgagagccaaactgcagtgagtgttatttctctttcagatctagccacccagtggagctcccgggccctgggctggtactggagagtgtctgcagagagttctgtgatgtgaaccatcttcaggtctctcagccatggataccagcagctgctccagtgaaggtggcaggggagtgaagtggactctgtgagggtccttagttgtagttttgtttattgtgctcgttttgtgttggttggcctgcagcccggagttggcactgtcaagagcatatcagctgcagtagtacaaggaggatcaggtggtggatggtgccctggagcacccaaaagattatgtcctttgtctttggctaccagggcaggtagagaaagaccatcaggtgggacagggttaggcatgtctgagctcagactctccttgggcagggcttgctgcggctgctgtaggggatggaagtgttgttctcaggccaatggagttatgttcccagggggattatggctgcctctgctgcatcatacaggttaccagagaagtggtggaaaatcggcagttacaggcctcacgcagctcctgtgcagcccagaagttcagtttagctcactccatgccccgccaacagcactgagtatttttccaggcagcaggtgaacagggctgagaacttgcctcaggcaaccagcctcccaactgaggaggcaagcagggatttcaggttttgcacctccctacctgccaaggcttctgtactgtgtttgcactcctgattcaccccctcccccaggttctgtctaggaaacaatgagtcagttgaaattgttacaaagttcagctggaattttccttctctctgtggtcttttccaagttcctctggcagccctccccagggacccctgtgagacagtcagaaaaggcttccccagggaccgagagtgcccacaggctcttcctgctgctttttctaccctgtatttcactcaactctaaatttgtctcagctgtaggtaatgtcaaatccttctcctgtgatctggaccttcaggttccgcagtgagggtgtgtgttcaggggtggacgatcccccttttcacactttgggtactcacagttttttggctgtcttctgggggccctgaagcagcaattcatttccttcaaagggtctgtggattctgttggctttccttgtatgttcctgtggtggttcttggagcaaaagttcacaatgtgaatctcctcatgctgttccgcagagtgggagctgcaagttagtcctgcctcctgttcctttacttctctttagttattttgtgtgtgttattttgtctccttacatacattgtaaattcctagaggaagttatgatgctgtcatcagggatgaatagatatatttgtctacatgcttatatgtttacctatataatggttacatagatacacatgtgcagaagtttatatgcacatacattatcacttaaacataaatgtgtattctacagtgctgcctggtttctgtgtctagtctatgtccattatgttatatagtctttggcatacaagtgttgacattttatgcaacgcattggtgtctttcaagtaaaaattcttttgagaatttttatgggaggttattattattctattttcatgcatctatagttgtcaatgacaacactgttgcttctttatgggttaaactgtcttttttctctggcagtttttcaaacattcttataagctttggtgtgcagtaatttccctgctatattactaggtgtgttgaaatatagtctgctaaatcttgcttgattcttagcacacacattcaatctgcaaactcatctttttttcatactagaaatgtacatccattatttatttgactacttcttttctattcttgttatgtgatcttttgcatttgtcttaggattttctgtcttggctagttatgacttcagatgtcccatggcttgtctctgcctttgtattcacagggccttctccctttctctctgtatgtctcttataacaacacttgtcattggattttgggcccacctagataatctcatctcaagatccttaacttaattatatcttcagtgaccctttttctgaattaaggttacatttataatttcctggtattagggcatgagcatattttttggggggctactattcaatccactacagaaagccattgaagtgtttgaacaagggagtgaaattaccaaaagagtatcttgagattagtttggtcacagggagcttaaaagatcaaggagacagagagtgaaagagagaaaaagagactgaagggaagaaggcaaaggaggcagagagggaggagtgggaaggaaagagaaagagagagaagtagagagagaggggccacaagattaaatggcaaaaggccagatttgtgtggctgattgatatcaaagaagaggaagcagttaaaaatgttcttaaagataaaagaaaattaagaaatagaaaataaaaataaacaggaatagcatatttactagaaggtaactctcttagaagacaaatagtgatcttagttctggatatgttttattgaggatgaagcaaacaaatggcaatgctcaaaacagctaacgacggagaccagatgtttgggtaatggtcttgataggagatatggagctgcaaaatagttatacctgactttttcccatattttcccccaactgctcttgtatagcttccttctttccctcatacacagttttcttttgttgctgttcttgtgtgtgggtcttatgtgtgtgcatgtatttccttgtggtataatgcttcatgaaccactacctggctaccatctatgtttgctcaaggccctgggtctctacagtcagcacgtagtgaagcctgccaggcttgtgtccttccctcagggcagcaagttcccccagtccctgggttggtctagagatgccatctgggagccagggactatagccaaaaaccctggaaatcggccaggtgtggtggctcacacctgtaatcgcagtactttgggaggccaaggtgggtggattacctgaggtcaggagttagagaccagcctggccaacatggtgaatccccttctctactaaaaatacaaaaattagccaggcgtggtggcacaagcctgtaataccagctactcaggaggctaaggcaggagaatcacttgaacctaggaggcagaggttgcagtgagccgagatcacgccattgccctccagcctgggcaacaagagtgaaactctgtctcaaaaaacaaaaacaaacaaacaaacaaataaacaaaaaaccttggaaatctacctgttgttccattctactgtggcttagcaggcactcaaaccatgagacgcaggccttcccactcttccccccacttttcactggcagaggagcctcacctctggccactattactacaagtccccagggagtactgctagcaactgctgatgttcatctaaggcccaagggctcttcagtcatcttgtggtgaatgccaccaggtctgggactcgcccttcatggtagtggactcccctctgactcagagcatgtccagaaatgtcatccaagagctgaggcccagaactggggacccctcagaaccatcctggtgctctatccatctgtggccgagctagcatcgaacatacattgaacatacaggacaaagtctcctttacttttccctctgtttttctcaagcagaaggaatctctcaccatagtcaccacaactgcaaatgtgctaggtttcacctgaagccagcatgtcttaggatctatcttaggatctcatccaagtcccatggattactgcctggatatcactgctggttattcagggcccaagatctcttagtcagcaggtgatggatcctgccaggactaggtttttcccttcaaggcagtgggttcccttctggctcagggtgtgtctaacaatgtcatctgggagctactttctgaataggggcctcacaactctggtgccctgtcctactgtggctaagctggtatccaagatgtaagacagaatcctctttactcttccctctcctctcctcaagtggaaggaagggatctctttttggagccacgagctgtgctgcctgggcttgtgggaagggtagtgcaaggactcccgtagccaccccagctgttgctcaccagcttgtgtgccctccaagtgcatggcttccaatcccagctcatcactaggacttgcttaggagttgcagtccttgcagcctagactgcctttcatgtctatttagggctcagagcagtttagtccgcagttgggaggctcgccagaactcgagttccaactgctgggatgggcggttcccctctggttagggctggtctaaatcctccctccatgggtaggtgtcagctgagttcagttcggttttgctttccactgtgacagggcagcactgagttcaatgcaaagtctcatagttactgtgctctccctctcccaagtacacagattctttctcctgctaaggaacaggcgaggggaggtactgacaatgtaagactgtctttcctacctccttcagtgcctctttcagtgatatgaagtccccagggagtactgcagggactgctgatgttcacttaaggcctaagggctctccagtcatcttgtggtgaatgcaccaggactgagactcaccctttatggtagtgggctcccttctaaaaccaggtactgtgagtgctcatctgattttggttcttagaaaggtgcttttttttggtgtaaatgttaaatttggtgttcctgcttgggggaggataggtagagccttctgttcagacatcttgctctgcccctcctaatgtcacatatggcatttctacctgcaaagaaaccatttcctatccttttctctgaggaggtcttgattggttttagttctaaatttagttaactactgctgcaaatcttaaagatgtggtcatgaatatatttacagagaaatctctaagtacgcttctctccacctccccatgtccgtacacatggggaaatgtacaaatgtacacatacttagattttgctaaccatgcccgttcaacttcatagccttatagtgccataagccttagcagtggtggaacaaaaatcaagagaaaaaaactcatcatacctcttattgccttccagtgtttctcaagctaccttttactcttgtttgaataactgaactatattgacttctacagcatcagtggacaggaatggttttattccatcttactagaaatcaaacatttttaccagcaaattaatttttatccaggaataagatttttaaagccagggcaataagcttacctttctctttcctcctacctttttccgagggtcctattctgggtctttttaaagcaattttctttcctgtcttattctccaatggtgttagaaactacagtcattcattcgattaaaatgcttaagaacagtgaatacagagaaactcttgttctgccagttatcagaggtggaataacaccggtaaatgacaatgaaagattcttttggtttttggatttgaatggggttgcccgttttgctcagtgtgttcttctgtggggtgtttttttttttttttttttttccactgcttctcaaattttactgcttatgaatcacctgggatcttgttaaaatgcagatactgattcaggaggtctgggatgagccctgaaagtttgcattgctaacaagctcccaggtgatactgatgctgctggtctgagaccacactgctagcagcaaggttttagagaacaaatgcattttggtcagatttgattatacattcaacctcagaattaagcacttctccaagttattaacctatcacagaataatatgacctagtgatttcccatgaccagttttaaatctcatggatttcccagagaagaaatagctgttcatgattccactttgcgttgaaaatcagaaacattcctctgccagctaatttccctgaactcatctatctgtacagactttctttctttccttttgtaaagttagagtcgctgcttcctgtggtgtgttccactgtacacaaatgtgagggatgactgtgtgtgaatgaagcaggaatcattgtcttgttctcatttatcttctctaactgctatggaagctcaaaccaaccttctcccctttgttgagctaccattatttgaaagctggatgaggaatacgtttccaaaagccaatctttgctaacttttttctctctcagattccttgaaatggtggttaaagagaatcggaagtttaaaacaggaatttatttatattattggaaattaaattataaacaaaattttcacttctcaaattaaataaaattgtatccagctcctggttaattaaagatatggcagcttagattttttttctccttttatttttgtggcatcatattgaacttctgttggtcataagtttttgcccaaggtataaattatataatataaacacacaaaaaagataatgcaaaaatatgtatccatgtcaatacttttttttttaaggaaccgcggcatttgcagtttttcagcgaatttggcaatagtgatatttatgtgtcactggcaggcaaaaaaaaacatggagcaccgactaactatggattctgctttaaggtacaggcttaatattttgatagatgaataaagcaagcctcagccttttaggtaagcttgagtttcctttaattgcttt

SEQ ID NO: 15608 - DNA, 128581 bp, Homo sapiens
cggcacctcgcctcccgccgcgcaaaccccttctccccacgcgccgagtctcccatgacgcccgagccccccggccggcgacaatgaccacttccctgcaagatgggcagagcgccgcgagcagggcggctgcccgggattcgccgctggccgcccaggtgtgtggcgctgcccaggggaggggcgacgcccacgacctggcgccggccccctggctgcacgcgcgagcgctcctgccccttccggacgggacccgcggctgtgctgcagacaggtaggcaaccctggagggcgcgggggagtgtcctggctgggcagccggcgagggggtgaggaggcggtcctagggggtgagccatgtgcccagagctgggccaagtttgtaaaagtctctgaagacaatcccctttgagctggctcctaccggatcagcaggacattgcgatctcacagcgccttataaatagcatcaccgtttcattgagagctctcatctctctcgcctctgcccatcggtggtgaaactaggagctcaggctgcaggctgatcaccttctgttccttcgtggccatgcattttcacaaagtaaactctattttattttatatattttaaaaaaatcgtagcataaatgtattcacctcccacatagagtcttacagcgaccctgtagaagcaaagcatggattgacattcgagcagtcttgctgttcggcaggaaagaatagaggctttaaagggtttcccaatctccatagcattcagcactaagtgcctttagagttgcacatactttcggaaagaaaaagggttacagcaatacaaaaatctatagtcctttatattcatacatttaaatgttactttttttttcctgattttcaaagcgctccaacttcagtgaagttaaaattactctccagtggactatagtacatttatactagcaagttctattaacttaccgcctcaaaacactgccttgctgtttaatatctataagcgcttgaaaaatcaacagactgtgtgtgggcaacattgtgaatgaaatttgaagtgagatgaaccacagctataattaataaatcataacttccaaaagtgattagtaaaatatcataaggatgaatgcactaaatgcaacttagagactgtcaatatcatggatgcataacaatgtatgacttctcaggtgatgtttggattagtaattgtatagtctatttttctgtttcaggaaaattatcaaaagtgatggagtttctatgcctggtgatttaaaggcaagagagagagaaggcggtgggggggggaggggtggtgggaggggagagagagagagagagagagagacagaaagagaggaactataggagatttgtttgtatctaattaacatactgtattttgacccatagaaagtacatcacagaccttttctatatactttatataatatgagccttgtcacagagtggtacatgttcgccttagcacactttttattcctgacagcaattatattttacattctgttttatgtaaattacatcctatgttctcttactgtaggagaaaaaagaaagatcttgatgttccggaaatgccatctattccaaacccttttcctgagctatgctgttctccatttacatctgtgttgtcagcagacctatttcccaaagcaaattcaaggaaaaaacaggtatgcatttttaaattttaaatttcaaaaatcttaggagttctgaatccatacagtctttaaggtgttccgtaatttacagtattaacaaaggattagcatgggctctgttaaataactctgttgactgacatggtcctttggcattattttccatttagggccttattcttctaagccgtataatgggaatgttaaaacctacctccgagggtcttgggatggattaaaacagagaatatatataaagtgcagtggttgagaacaataatcattcaccagataggtagaagagatgatcatttttaagccaggaattgggcagaggctgggacggggtgggcagtagtagtggggtgagaaggggattgactgattcctttaatactttctttaatttttcacattttcaacccaagccaacctcatttacctaaggaaagtgatatagtgatgctgtggcaaaaggtatttagaatttagggtcaacatgtcttcatttcagtggattcctcagtttggaggctctggctgcagaagatagatgactcgtagtgataattagaagactaaggaccatatctttatgattttctccttttctagtttgggattgacttaagcaaattagattttaaggaccaagcaactaacagaaaatacatcatggctgtacatttggaggggaaaaaaatagtgtatcatagaataattcatctcttgtcatatactttctcccagttttgacccagcaaaacaaagagaagcctcactagacaaaatgcaccttattcttacaagggtggaaacaatacattgaaatagccaggtacttgaaatgggagaaggataatgaacagcgaggacaagacagttggccatttttccgcgtctattgctctctttcttatttctgcacctttattgcttctaatgggttcaactatgtgtgtttatatttttaggaatggaggaaataccttaggaagcagatgaattattgatcatatacagaaatgatagagacagtaggaaatatgtttgatggaagccctgtgtatatatttttggggggaggggcttgaagtcacttggtacacaggtttttgggtaaggattggagaaaatgggaataaatttttctagaagcagaactatgttctgaattggcatctttgaaagggggaataaacccttaagtgggtgggactgtaactttgtttggggagacaaagaggagactctcttgagacctttattatcaggatgaggtttaaagtcagatcccaaggaaaaaacagccctagtgaaacttccaagctctttgagagttgactttttggtttggatagaaaatggaagtaaggataatagatttgactgtgtgccatggtagtggaaaaaaaaaaaagaggccgggtgcggtggctcacgcctgtaatcccagtaatcccagcactttgggaggctgaggcgggcagatcacgaagtctgaagattgagaccatcctgtccaacatggtaaaaccccgtctccactaaaaatacaaaaattagctgggtgtggtggcctgcacctgtagtcccagctactcgggaggcggaggcaggagaatcgcttgaacccaggaggcggaggctgcagtgagctgagattgtgcccctgcactccactctgaacgacagagcgagaatctgtcccccgctgacactacccccccccccccaaaaaaaagattctggcttgtccttgagccagagtaagaaaaggaaatgtctgatgatgacataatggtcatctggaagaatttaataggtagttcccaaattactaagggcctgctatgtttctcacaaatcctaggcagtaaggaccctagctaagcaacaataccatgcaagatatatttaaaagatggggctttgatttggggttgtggtagcgggtggagcctgaaccagaaggaaagtaaagggaaggatatctgggctgactcactttaatgctatgaatggacacttgcagaatgcctgtgtctgagagatttgttgatgatgcagggtttgttttgaatagaaagtgagaagaggtgttggtatgcttatgttagtataggggacaaaagagaaagaatgggtaaagtgccagggttaaggcaggatgtgccctaagtgtggatagtcatcagactagagtaagacgtcttagagattgatgacatttcctcagatcaggtttaaactggaaaatgggcaaaaaaaaaatagcaaactggaaatggggaaaaggtgatattgttattgaccccaataggtttcctgctctggccttgtatcctgtgtccacaatgaccttctcaaagaacactgtacccacacacacacctgtactgttccctgagcagagagtccccgcctgatttttaaagatccatcccagagggctgtccctacctttgaagggcccttcttgctgatctcttccttggcccaatggttgagatctctatgaagacaagggtaccccaaagttgaggaggagggaggctgctttttactttattttatgcttcctttttcccccacctagactttgcatttagaactgatccttttgctttagtttctttatacacactcagttctttgaaatgaggaaggttttgagaatagatgactctatgtaagtgagtcccccaactcagtagctttgcaacacatattacccttttacaagatgctgtttttggcccagtttatctgtaaccttcagttgagatgatgtaagtgactatgcgatatgttctactgagtattatttatggttgaaatattataggagaagatgtctctttactttatattctctctcatttgtcctgtttaaccattccagtcattttagtgattcttttctctccacagaaaaagtgaagaaaataattgtacttgttatttacaaatcaatgaccagaaaatttgagagaatccagactaaaaatgttaaatttcatctggcctttcaaaatcacagtcaaaaaccatcttacaagtcataaattttgtttactatttgagatgcctacataatgcatgagtggtaaagtgcattgaagccacaaatgggatatgttttatcactttttgcaaataaaatgtcccaaagtgtacaatactgtaggctttcagtaccattatttttaaatgaaagctagagtgagagagaatccatattctttttttttttttttttttttttttgagacggagtctcgctctgtcgcccaggctggagtgcagtggcacaatctcggcttactgcaagctctgcctcctgggttcatgccattctcctgcctcagcctcccgagtagctgggactagaggtgcctgccaccacgcccagctaattttttttgtatttttagtagagacagggttttaccgtgttagccaggatgatctccatctcctgacctcatgatccacccgccttggcctcccaaagtgctgggattacaggcatgagcccctgtgccccgcgagaattcatattctttattccctttccctctttttataatgatggccagatttcctaggcatctttctttgtgtttactaataaagcaaatttaaagtataccttcccttacatacatggtccagaaaagttacttatattaaaagtgacttccattatgaacttaatctcttttttctaatttatgatttaaatttataaggaaatcatctgttagtaatgaaccctaaacacctattgtttgaaggaaagcaaagagttagaaatctttatttagctcttgcagcagaatcagttcttgtcttttttgttgacccctaggtaatttttgtgcttggacatagcctgtgtagtagctctggttaattgcttcccaggactatgttgtacaactaagtaagaataaagcctctgaaggctttagagatttaaaaaatgctatgaaaaccagtgtcatgaaatgtttgagttggatgggatttttcagatcttctattccaatattcttctttagtgatacgtaaattgagtttaaggaatgctatgtggcacagccagcacctgaaatctggatttcttgaggctttgacagtccctttttaggaaggtacaatttctaaagaaagcaaggactgtaaataagagtagtataataatacatgtgtaccagtgttgttagttacaactctcctcataacacaagaagaacaggggagacaaacgccatttgttaatattcatctaaggacctggaattcctctttttatttcttcccgaaatgtaactacgttttttcttctagctttcttctccatcttctccctaaaattggtctgagaaatctatcaaatatttgattttattatcaaataagatttattagtattattaataaccagcttttgtgtgtggtttacggtccacaggatattatttcatgggaacacaagaaaatgagtatgtcacctgcattttaagattacaaaaagagtatgcaaaaactggaagggatttgcccatgcttccacagtttaaataaagggagatcaaaaagagtatcatgtctcaatgtgtcctgtcccttaccacactgtttctagtgtattctttattaaattaagcctttttttgtatgtctcagaaaaataaaaatttatctcaaataattaaaaaattagttttccatatgctcggccttttatttcttttttctctaccatgtcacggactttcaaaggataagcagatctctgtccccaaattaaagggcctcttatatcattcctttgtgatgccagtaattaccccactttggacatgctgaacttgtatgtgtggtcctataggaatcttgtgtggctgctacattaactgaaatttcatatacttatttttctagtatacatagaagtaaaagaagagaaacccatgtacatattgtagtttttccagactcagcaattatcaagattttgcctcatttactccatctatttcttttttaaaaattttattttctttgctaaagtattttgaagtatatcctggacaccccatcattgcatctctacgtagttttgtattcatctctgaaaaatgaattttcttttatatcccaaatgccattattccctaacataaataacagcaattccttgatatcgtctaaaaccattcataattgaattttctcagttggaatggctcatgaaattctcaaattacaaactgcttagctttcaaatgtctgaaaattagctctttggaagtttaaattcatttttagatggaaacaacatcataaattgtatttaggccctctgagctattttacaaaatcccatttaattggaaacaaaacatatatgcagaaagaatgatagaaacaatactctctcctattagggtttcaaacaaatctatctttccaacggcaatttgctacttttgagtgctgtcacttgatgaatataattttttgggagaatttgaaagcgtgcagatctttgtagcagtgttgaagcaggctttacagctgcgcttctcaaagtgtggtcattaaatcaccttcttcagaatcagcagggatgcttattaaaaatatggatacttggacctcttgcaaaacccactgaataggaatgttctgggggaggttataggaatttgattttttatatttttttctctttgatatgtatacaaatcagtgctactcttaatctctaccattttcaaactggggcaattggacctttcaaaactgaggacagttgtgttttgttgacaaaggtgagtatgttacaaatggcctttagttggtattttagccaggtattgattgttcagacaaaacagagcctcaaatgaaccagcctgaaaggctgtgttgtagtacctgaaggccaaaaggtcactggtctcatgagaggctgaaattgggagcaagaaagtcagcaaaaatcaagtcaaccactttctctattctctctcttttgttctcccacaaacataccacatagtctctgcctctccttgcaaattcacatcatttttgagatttctttgcagtgttgcttgccctgatttcatgtcagtgccagcggcctcaagtggctgctcccaagttttccacctattagtggttcagtacttggtaactgactgggaactgtatctggagaggtatgttagtccagtgtgtccagatcctattcaatcagatgtggccaaggggacagtgggccctggaccactgttcagtctgcaagggtgtggtaacatgtgagaaagaggtacaggtttagtaggtatggcatatggaggcactatgtcctaggggcagctagtgtcctaggggaaaaaaaagatctcaaacaggacacaaaaactaattctaatcatatttgtatgatatatgatgatccaccaattggtttatttgacttaacgtacccagttcagagtgttcagctcctttgtctcaattcacttaatgtacgtgaagcatacttattgggcagttgtttcagttgatgtcacccttcagggatgctcagcttccttgtccattttcctgagcttacgtcttactgaggtcccttaacccctgatgacaggaattaccaactcaggttccttcccaccttatgctagttaccttcattgtaggagaagttagctttcttttcctattttaaaacttaaatcccctagcagatcttctatttgtcaaggttttatttctagtttgaaggttgcctttaatttttggttaatttgcagggtacatttgcagtccaagctttatctacaatatgggttttctttttaacgttattgaaatctcagcttctggtttgtttttccctggggcatataatatgttctgtcaagagaaagaaaattggagtcatcatggttcaatataagtgtggattttaattaatataaaaaagatttctgcagtcttatggatattgctttgaaaaaacgtcagcttatgtcaaatagtaataaactctattgtataagtatatgcttatgtgtatttcaatggtggtaagcagacctgagaattgtccttttgacattacagataaaggtcagctcaagggagaccccagagaatggccacaagtctttgccaaggcaagggagtagaaagaaagggttcaggattaatttagaagagaaatggcaggactgacatagggagaccatcctttaattcttgtccttttctttggcccactcatttaacattttttcaaagccacagaaaaaataaacacaaataggaggtttaatattcttaaccagcttacaaatgcttgtattccagaagatctttaataaattggccatttattcacatacatttttccatagacgtattgttacatgcagtggttaggtggtcaggccaaagccttaaaatccataatggctccaaagtatagtgctcttacaacattgcgtgtaccgtttttaaaattgcttctgtggaaagatgtgtcaatatgatgtgactgaaagatattggaacaggaatcagcaaacctagtttttaatacagtcctactacagatgaggggtgttatatcagcccattgctcaccctttctgtacctgagagctctacaattttattgtattcctagagcaagtgattctgatggctccagaagcagtaatggctcctgtgcagcagatacaggagtcgtggaaagcagggtttcttttgttccactagccctagaagctccctcttagcctctgttcaggtattcccatatagtgaccacacttttttgtgataaagagtatgtttggggtgtcataggacaaagagcacaggagtcacattcatggaaataattggggcagaagggtctggttaaactagaaactgcagcaaagtcatagttcaaatattagaagaagaatcagaaaaggaatcacatctagtaggagccagctcaagtggtgaagttaaagtacaggaccaagcatctaaacttagaaataaggatacgagataagatgtgaccacttgaggccggcataggtccaatacacatttggctctacttggtttaataggtacggggtggtcgtaacctctgaattctctaaatttatctttctccaccctcaaatcatttatttgattacttaagccaaaatttaaggagtccactttctgttcttgttaagtactgcttcatctttcatcaaagtaggcttgaatctatatacatctccccatctctgctgccaccatcctaatttagccattgtcttctcacctacaggagccccataaatggcctcctttcttctgtgttagcttatcttggttcattctacatacacttgttatagggaactttcagaaaggtaaatcgcggcatgtaatttcctggtttaaaaaattttaataccttagaatgaaatccacatttcttcctttgacaggactctccatggctttgtccctggctacctcttaaacctcatgtacattctaccctttgttcattagactccagccacagtcctatctatttgtgaacttagcaaacttttttttctatctccaaggctttatcgtagctgttttctgagtctggaacctatttccctggctcctgacatacctgattcctctttattctctagatttcagtataaggtcatctcatccaggagatttttttttttttttgaccagcctaaatgtagcctgttttttttttttttttaatttttttttcccatcacatttctcagtttgtttccttggctgcacttaccataatccgaattgtctcatttatctatttggtctagttgttttattctttttccctctatgtgaattatcttggctttattgttcttgggttatttcatggaaagaatgaatgagtaaatggattattgaagatacatagttaaaactaatttaacaaattatattttgacatgtttattctaatcattttcagtcatcttcattaaattagaataaaattaaatttgattaacagactctatttaccaaaataaattatatttttattttttaaaattttttcttgacaattatttctttgtaatgcaaaaataaaattgaatctagatcctggactaagtggattttaaaagtacgtatcttttgctttcatttaacacgtatgaaaatttgatccgtgtaatcaagatatttctgattttatacattattttttatatagtataattataagtgagtgcccagtgaactgctatactttctttaagtttactgtgtgttcataagatccacagctttagaaaagattaagtggaaatattagttaggtttatagtatgagtctctcagagcaagaggtatatgctagcaaatgttttaattattaagaattaatatcagtggtgaattatttaggtcagtgttcatcagatggaagtggggagacatataccctttgaaaatacatgaagactttccaagggttgtcaaacatagatttaagagaatcagttttcacttcctgagaacccacctgtgctcccagtaagctcctcttggtgcattaccctggggcgtgtaaacatccagggcatcacacacagggaaagcttcctttagtgattaatcaaagcatcacaaataagaaggagttcctttttaatgtcttaagcctctttctgttaagggtgaatcatggtggaaatgaggattttgaccagtgttgaaatattttgaattcagatagatgatggtgtgatgaagtaatcacaattttcatttttcagtttttgacttcagttcttccatgtcctgactgttgtcaaagaatatataataacccttgagggataacttcttaagagcaaagcaaggagtgcatcagtgagaaatattgattgctgaaatggccttttgtcatatatttaaatgtactatctgctattctggatacatatgtataggatgctgaaagaaatactataaaagcactgaatttatgtaatttatataataaatatgtatttataaatgcaaagaaatcctataaaagctgaaagaaaatgcacgtacaaacacctgatatgatataggttagtgctgctggtgaagttacctgggaagtagacttggagcacaggtttgccttcaggaagtttgctggggagagcccgtggaaacaatacttgtaggaatggacacagggagaagttgggctgcagcacagccacagcaaaggtccagttgatcccgtaggagagctctggagctggattggccctacagaattgttcagaattagggcacaggtgctgggctgtctaggaaatgtcagaacttgggcatggcagctttctttagcatagtgcaatggcagtcaaggaggccttagccacaagtcttagtggctgatactctaacagctgggagaatgagtgcttcagtcttgaaggaggtgggtttggatgttgtgccacagtatctgccatagttagtaactgatcttttaaaatgttaatagaaatcattttggggactaccaaagttttcaagataaattggttaaaactcaagaataaaacatatacatgatttctttcaaattttgtgtgtgttattcaatattgtacttactattttggcaaatcatacgataaactctttattccaattccagtcaattcccatcctattttatcataaaatattttaatattttctaatacctaaaaaatgatatgccagctactggactatttattttttaatgtgcatgtaccgtttgcattcctgaaaaacataagaaatatttgtcatggtgactactacatttaatagaactatttctaattttatacttgatttttatttagttatatccaaaagctgaaacccaatggtgaaaatgtacagtaacacaattgccaaaggaattctatgtacttcctagcacttcatcatactccccagaactcttagtcctgtattaatttaactttttttcttttttctttttttccatttgtccaaggcatgaacgaggcattggctactgggatatataaggggttactttgctttgttcctagttgatatgagataggcaccatcaatgtattactttaattttgactgctttcagctatttctcttctaagatacaattcataatttatttttcagtgttttaaatttttttttctcaaaatttaactttgtttgctttttttttagagggagtctcgctcttttgcccaggctggggtgcagtgggtgatctcagctcactacgacctccacctcctgggttcaagcgattctcctgcctcagcctcctgagtagctgggattatgggcactcgccgccacacctggctaatttttgcatttttagtagagatggtgtttcatcatgttggccaggctggtcttgaactcctgacctcagttgatctgcccgcctcggcctcccaaagtactgggattacaggtgtgagccactgtgcctggccaaaatgtaactaatttgaattgaaaagtaaagttgggctttatttgataaaatataagtctgatttggccaattgcttttgagagtgaggattaactttccaattatatggctgacatttttctttagaaactaaatctgaagccttaaacttttgatgaacatatatataagacacattataagacaaaagcatcttaggaaaaaaattggaaagcaatcatgcagaagcctcgtacttttggtttggccaaggtatgataaaattaacacattttccgagtgtattaatttgaacaaagtacatttaagttgaagggtaaaaaatcattaatggctaatggtaaagctttgttgatggtaaagctttgttgaaactatccagaaattgataaaatgaatgaatctgggtgacaaatctttatcaagtcagatggtttctaatttgtcattttcagttgtattatatgaggtccttaactgatttgctggttaacagattattaaagattattttagctctgatggagttcaaagattaacattgccttccaccacctgtgtgcttcctcttctccctcgctcagattaatttttctaactagcatttattattatctgacatgtgttatgttcacatatatatggattcatctactgccttttcccagtagaacataagctctgtgaagacaggaactatttgttaattgagtaagctttatttattcaatctctagcatgtagaattatgcctagcacttcacaggccctcagtaaatttttgctgaatgaaagaataaataaatggagaaatgaatggataaagagctgggaagtcattgttattaagggagagaatatttggaaacgtactgatattttaatataaatgatatcaaatgtgtaaagaaactttgaaaagtgaaatttagtttattttccaggaagagtctgatattgtttgatgttaaaaaagagcctggtcaggataaatgtttgagtattgatttaccactataagcacattctaaatttggattacccttggtcagaatgggttctgttctttgtctctttggttcccttgtaagcattttcagtcttagcagcccatgtatgccagttaaaaagcatgcatactttatagggctgagtccagtaaaagcttttcaatcaacccacattcacagtggaagattactttcattcctgggaagggtgacatatgcgtgtgaaacacagtattcagatgaaagggctactttggtattatttaactgtgtattggcaagactctagccagtatctagtttctctttagagctattttgcattatattacagtagtcttactgtgctgtgccaaggaaattaagatcagctggaacactctgtaggtcattggcttggaatcttagggcactgggaacttgatgttttgttttaatgacctcatttaggcgaaatctgcctttgtcccagaagcctaaggggccctttacaaaaccatgcctgcaccttgggaaagatatagaagaggttcagagaaaaatgactaaatatttaaaggtattgggtcaacctccatgtataaagtactttataaattaattgactctttagtcaagaaagacaaagaggagtcgtaatgaaagtctcttcaatacagatttacccgccaagttccatgatatctgaaacatacttttaaagttgaaggatgtaattttaagaaaaattgaaagaagaaatgattacacatcatgtaggggcttatgggtattgtgtcgtggcaaatgatttctaaaagggatttctaggggcaatcactcttgtggaatgatggacctcctccatatttctcaaagtgggagtataagatgcatatatgcatatgggatgtgtggggattgtgggagggccatatgggaagttgcatgataaacatggaacacctttttggaacgttaactttaattgaaaatatgggaaaaacattcttatattaaaataaacactcctgtatttatgagtagaatacataatgtgcatgaatttttaagaacaaattatacgcctcagatattcttaccctgagatggcaaaggctgtacaattactttcttttgcatgttgggtatctctggtggaaacatttgagaagtgctagtgtagttttcatttctgtgggaagtggctccttgtgactctcatgagggttggatatctctttattctttagccatagtcctttctagagcttctctgattttattggtatctatatcactaccagtaaagatattgggttttaaacatttgaactattttcctactttacttttctgcagcttggcaggaaatagctctcaactaaagtctctgaagaccaccttattcctgaagacctacttttgagtctttgtgttgatgtctgagcagttttagacattttgactactttttccttcttgaaatactttcttgacttctgcctcttaaaggttctgttgtaggatttgagtgttggtattccttagggttttgtcctagaacttcttgttttcattttactgccaggatgatctcatctacctccacggcctcaattgcagtgtgcatgtaagtctaggctagatctgtatactgggctgcctgttggatatcttcatttatacggtccatagacatctcaaactcagcagattccaaaacaagtgaatactcttcctcttaaacttgcttcttctctcatgttttccttccctggaaatagaatatactcttcctgtactagaaaataagatatcttagctcttctttggctcctctttatttctctctcctcatccagttgggtaccaagtcctttgggaagaacaactcttggatttatccacttttcaaaacttctctgctattgcaacagctcaggtcaaatcatctcttacataattactttgagactctcctcactggtactctatttttagtagttttctactcctagaggtgttgtatgcttacatgtttttattaaggagataaaattcattaagcataaaattagccattcccaaatctacaatttactggcatttacaatttactgacataagtgcatccacagtgttgtaccaccatctcctttgtctagtttcaaaacattttcattgcccccaaagaaaattctatacccattgaatagacattctccattctcttctccgtctcggcccctcgcaaccacaaatctgcattctgtttgtatggatttacctattatggatatttcattaaaatggaatcatatagtatgtgaccttttgcatctggtttctttcactcagcctgttttggaagtttatccatgttgttgaatgtaatactaggattctcaccgtgaagtaattccaaacagttagagaactaactttttttttttttaagaaagaagagattgttcatacatgattgcttctgctttgtgtctttgttctcaatcccattttatttcccctttttcctgctgtgagggaaacactgttctgaggttggtgagtatcctttctttccatgtttttatgcctttacacatataatactataatgtgtcctaatgatttatttaaaaatatattgtatgtctatctctgcaacttgttttcgtttgacatttttgattaatccatatgaataaatataaatcacttattttaattttatttcattgtatgcatgtaccacaattttttgtttacccattgaagaaaactgagaatttctcaatttccatcattaaagaccacactataatatacattcttgtgcctgtgtgcaagggtttctctattgtatgtatttagaagtagaattgcttggctgtagacaggtgcatgttcagttctactaggtattgccaaattgctctccaaagtggttgtgcccaccagcactatatgcgtctccatttccacactttctcatcaacagctggtattttcagaatttaaagtttttgccaatgtggtgagtgtaatgagatttaattactgtgttcatttgcattaccttgattatttgtaaggttgagcatctttttatttgcttctgtccattcttacttcttctttgtgaattacctgtattattctgttgcattgtttgcattttttaaaatgacttgtaagaatcctttatatggtattgatagctatctttttgcaactgtaaacattgcaattatcttttctcagtaattgtgacttgctttaactttgtttatagtgtttcttatgatacagaatatttttgttttaatttagttaaatctagttttgtacttttgtgtgtcttatttaagaatttttccctctctgtcctgaatattttttcgtcgagttaatatatatatattttttttttgaggtggtgtctcactctgtcacccaggttagattgcagtggctcgaccttggctcactgcaacctctgcctccaggttcaagtgactctcctgcctcagactccagagtagctgggattacaggtgcccaccaccacacccagctaatttttgtatttttagcagagacggggtttcactatgttggccaggctggtctcgaactcctgacctcaggtgatcctcctgcctcagcctcctaaagtgctaggattactggtgtgagccaccgcacccggcctcatgtagtcatttttatgttttactttacacacttgggtttttgacatagcacaatttatttttttaggataggaatttgattttttatccaatgaccatccattcatactagcaccacttattaatcatcttttcttttcccaaagctttttaacattttttcatcatgtattaagttccccttttcataggtggaagcaataatgctaaatggctaatcaaattatcttactcctaaaaccattccatgaatacccctcactcttcagatactgatttaaatgggaccctgaggtactatacagctggaccacctctctaatcatgcctctaatcctttccatctcatactctgtgctttgaccacacttaatttttttttagttttgtacaatgtctttctttttcttacctgactttggtctttacatgagatagatgttcaatcttcctgcatatctcttttccttaatctttaaatagctagcttcaaataacatatctttgaagactcagctgcaagagtcttctcttcccataatagatatatgttaggtgccctgcttagggataatctaccaggtcaattacattacattattagtgttccacaatccaggaatctctgggggcaatagggatcagttggcttggattctggattctagccttgtgccgggcacatactaagtcttctgtatatacttgctgaatgaactgaagtttcagataacactctcacctagagtaggattcatttttaaaatctttgttagatgatcatctgtataatctcctcttgagcattttcaatgatagtgagctcattagcttataatcaataaaatccttttataatgctttcttatgaagtacgtgtaaaccaagtttgtctgtaattgtaaggaaaaaaataattgcacatttttttcaggatattgtctccatccctatgtaaatctcaattttgacctattattccagcatgtcaagatattattgaattttggtaatttcagtaatcatctctctcatcatttccttatatgttcataggtatagaagatgttagtgtcttcattcaagagttaaaagaaagactgtattacttgattaaaattacagagataggaagtggcagaggcaaggtttgcagactcctaatctcccttcccctcccctcccttcccttcccttcccttctcttcccttctcttcccttccctcctttcctttttttttttttaaatttaaaaatacatttggagacacacaaaaagtgttttgttttataaataggccaggcctatactatggataatattgcagagtagaattccaaaggtgggcgtctctgatacattactcttacatggtataaccagtgtgcctgaagggagcagaaccggttttagatttatataaagtttcctttcactgaatgttaccttggacttgattagtttatttctagatatgtaaaattataataattaaacaaaatttaaatataaaaatattttttacttctttgggaaaaacagttcttcaaaactgttaagattgtatcctgaattgtgaaggtctgcagttgtaaagtagtgtgatttattttctctttcactggcttataagggtgcatatatcgtacctttatattaatgatgacacagtttctaagataatttcaaatatgttatttttattcttttaatatctgaatgtaataaatggaatccttagttttgtcctagttttgcagatggaaaaacacagggtcaaagatcaagggttaaatatacagattatgcctgagagagccaggacttgaacccagattttcagatttcaatcccagccctgcctatctaacacaaaattcacaggtagaattctatttagaaactacgttcaaaataccttctctgtgctttcagtattgtagatgtttatatagtgaaaacaataaaaagagttgtcctttacaccacccatgaaaccaaccttaatatgttctgatctccctctacctccatagtgtttttcttatggtatcggtatactgcctttatgaaatatcaaaaatcctttgtattattgtttcagaaaatgtcagaaatcattgtcgttattattattattattattttcaatttataagattttgaatgactttcagaaactgctagggaaattggatcattctaagatcaggatgtattcttactgaaagagtttagctgtactctggggtgttaaaattaactttcattgacagatccttgtctgggatttaactgagatttaagtcagtaaaaattctgccctgtggcctagagaacaattggacaaagtagatgaagtggagaggaatgtattttctcaaccttttttttttccattggaaagaacccaggtcacttgcagagacggtagagatttggcaatggactggtcctgctgttgtgtggtcactattagcaagccaaatactcatcattataataaatgtggggctataaatatcagtgcagagaatactgggtcttaaaagcatggaatcaaaaatgatttaagtatttagagattgaattaaattccatttaaaaaaagaaattaataaatctttattttacttgtcaatataattatccttccatcttagaaaagttgttttacatgtaatgctttaggatggcaattctcaaaccccagtgggcatatcacatgcttagagtatttgatacaagtgcagatccctgggtctcatccttggacactctatttccataggctgaaacattaaaacctttaacaagtacctgccgggagattcttataattctggggcagcttgactctataccacttttgaagaaaccctgatataatctgattgaatcagggtttgaaataatgacatttctcctacagaaggagtggtcaatcaatacaggaggagctattactcatacatccacatgctttatatatgtgaagttctataattttttaaaggataaccattgtctacatctgtttgcttcatctcaaaggtattagaaattgcttgaattttaaattgcattgcttttaaaattaaagtatatttattgtttaacaaacaacctctatggcaacgggaattgccctttctctatgactcctaaagtggttgctgaagtagatcacacaggggggcgctgtttaaatatgttttgtctgtggatagttccaaatccatacagcagagggtgcatgctttaaatgacacaaggaacctgtgacctgattgttttagtttgaattattctaggttgcattatcaatttaatttagactattaaagaaatatgacttgctgaaacttatttaagtaaggatcatgtgaagtttttataagttaataatttagacatgtattcaaattattctggtttcttcgtgttttcgcattacattataaacagtggctctaagtagcatctcttctatgttgggtcttttcttttttagtcataagaattaagattctgatatgcaaaagtgctagttgattataaatctacaacagacagatatcttctacagatgatttgttgtgtaatattttatagtgttttgcctgagaattgaagatatatgtcattcacatcataatatgctatttttcctccttccttccagacttagtgcatatgcaaatactttctttaaaacttgttctttttaggtagcattttcccatatatgcttctatcaattctctattagttacagtagaataaataaacttgagcttggttaatcagaaaagcactgcctactttgtcattctttttgtcaaactgtgaagttttctgaaggtagcgactgttccttattcttttttatctcttcagtttctgctatgaaacattggatagagtaatgagtgtcactgctggtgtcagttcctagatatagtctgtggtggattaaagatggttgtaaattctttactacatttctcattgagagaggaaatctatgtcctatcctcttggaaggctctgattattttacccatacgatactttggcagtgatagtgtgaccatttctggtccaaggctttgattggctttgattccatttcctgtttcttagaatactctctttgggaaccctgagctaccttatctgagccctctctgactatatcgaggcaccgtgctggagaagccatgtgtagattcagctgctcccatcttttcagccatctctgccaaggttttagacacgatggtaaagcaaggttggatggtctagactagctcctacaccagctgcgtgccttttagggaaagtgaccttcactgacaccatgtagaacagaagaattgcctagataaacccttctctccaattccacaaagtcatgagatgtaacgtaagcgttattgttttaagacactgttttggagcagtttgttagtgtgataataagagatccataacacaggctaagttctggagagaaaagtagatggtggcaactggaaggaaacttggagaacatcttatttaaccacatccatttatagggaaaaactgttttccagagagatgaagtggcatgctcaaggtcatctagatggctatggtcactgttaggactcttatctgactttgttgcccttgcctttagaacatcctgtaagatcgttgaattttttactttaaaactagtaagcgaagaccaataaatatagcctagagacacctgaagacctcctaccatgccagaaagaactttgcagtctcaaaaataccaggttccaggaataccctgcccaacaattttgtcctatgtaaacgattataaaaagttacattccagtgtaattgtacatttaatttaacattcaaatatagtaaaagatactagaaaaataatcatgtgcacagatgtatgctatcatatgtaaacaatcacaacatttaggcaatttgtatgccaaaaattctgtggtaaatttgggagcttggaatgcattttcccatagaaacaatgctattcaaaattcaatttaatacctaacatacctaaagtatagtacttgaagttatcaccataattatcagatttctttgaggaaatgctttctgaatgccaacttgttatctacggacccatcagtccaacccttccctttatttggctttggcagaaggacttcctgtttgttgagcaatggaggatagcaccgtatatcttgctctcaggaccagcttgcagaagatgtcttcttaggcttcaggatgaagggagagaaggttctagggtctcaatgcagtgagagaatgtcctctgcttggtgaagaaacagcatggttcaggacttcttgttggttaaatttcttagttcaagtcagctcttggtgattcccctccgctccctattttaagtatcctagggactggtttacttgctttcctttctatctgcccaacagcttcctctttccaaggtatcaattttgaaactcattagagaacaggatgaagtatttccatttttccctatgttcctgtttctaaaactaagaaagtgtttttattttttgcttctctttccttgtctcctcccacttctcctcctccttcttcctctctctcactcctttcttccttctgtctccctctcctcctcctcctgtccttgcatccctccctccattctttttctccctgcctttcttcttctctacccattgtcttatttttcttaaaatcaacccagcttctttaatggttcgagaattgttagctagtatagttaattaaattcctcagtttatttttagatttagggaaagtgagtggcattgctctgtatctttgttgcttgtataaataagacaaattgtaagtgttcctactagattataggcatttgaaaggaggggctacatctaatttttctttataatccctatcacataattttgaaatgcttagcagtatttattgtgcaaattaaatattatagctacagcttctttttattaatatatatctgcactatgaaagagggtgaaatgcactgaaaattattttgacatcctgtaaatccttgcacattgcctgtgtttctagtttgtatattgtatatggtaagtgtatgtgaggttataaagtcaaattttgctgttgattttctcttttagctttatttttcacttttactgatcgtgtttcactgaattcactttcactgatattcatgatgctgaggaattttcttcttgggatacaaccaaacagtggaactgtgtaatgttatggattgatgtggtcaattaactagtcataaataggatatctgacatttaatccttccgttccttagagttagattaaataaatgaaggttttgtagattatttcaaggattaaagactagatctaggaatcattttttttttaaagctggttttttgatgacaaatgaactatagttctttactcaaacagaatcatttgcacagtgagtgacggttccagctttccccaaggataagacaaaaattgtggtgaaaaagttcaaggtaatgtttgagtttattgtttgcttgagcctgatttgaagtgtaaaaataagatgctaacaagtcccaagttgaagaacatattattccacaaaatgttttctttgtgtatttatcagtattttactgtagccattctaaactatttgctatttttatcttcttagaccaaatgtactttaagtaattcctcaagtcatcaagagggaaaacacagctatgagagaatcctacatagtaattttaaaataagattagaataacatgtaaggaaactttttaaaaaggactttggtttttagtcctttctctctctgtcctttatttttgagaaagctggcatcttaatgacttgagggataattacttgtttctcatgttagggttcaggattgctctgattttccttggtgcacaaatattttaggaacaatatttcaaaagacaaaacaacccttactgctttattgatgcttggttcatttctgttacgtatttaaaaagtagctggttatgttacttctatcactgtatggtcacttgtgtttgggaaagacttatttgtgattgtatgttaagcagaatgcctacagtatattctaagttgggggttcacgtttaagtacaaatatagaattcagtctgtgtttctatctctttgtttttgacggagtctccctctgtcatcaggctggagtgcagcggtgcaatctcggttcgctgcaacctctgcctcctgggttcaagcgattctcctgcctcagccttccgagtggctgggactacaggcgcatgccaccaagcacagctagtttttgtatttttagtagagacagggtttcaccatgttggccaggatggtctcgatctcctgatcttgtcattcgcccgccttggcctcccaaagtgctgggattacaggcttgagcctctgggtctggtcccattgagcaaattctaattagattcatgatcttatttctgcactattgcaatagtctctaagtgccaccaactgttctgccagatcatacccgtctcttcttcttctgttattgctagagtgctgtctataaaaactcaaatctgaacctgatattcatctatgaaagtcatagctgagggacatcttaatgacattaattcttgaatggctccccactgcctgtagaatagaacctaagctctttactgtttcttacaaaaccctctgtgatctgactcctgatagccttcccctggcctctgtttcatcctactccacatcttacttccccgtcaggcttagtttgctgtcccagagtgaattaccccttttcctagatagcatttcctaatgtcctcaagaaaaacaaatcacatactccttaggcctcactgtgtccattgtgtttgtttgttttcatagcatgtataacatctgtgccccaatagttttttatatctgcttttgtctgccactagacactcagattgttgagaatagggattgtgtcttacccattgttagcgctgagcctttggcacagtaaacctttaaaaagttggatgaaagcatgagtaggcttaccaaactgaaaattcttaatgtccatttgactacataaacattggtttattgcaaaatcctttgcatgctctcaagtatttgatcatctggattattttattcttcctttgatttatctaataaacacatgttttcttccctctaaatacagatactgagctgggcactggtgaatgaaacagacatggacctattaatgggtctaatattgtctgatttaaagggcaaaaccagggtctaatattgtctgttaaagggcaaaaccattttcatgaagaacctttagctgagttatggcagaaacagactttgatgtttactgtaaagtctgaccttgaagaactacagggatacacttttctttgcctcttcttgaaatgctgtttttatttttgtcaatttccttttgttataaaagtttaaaggaaaatatttagtgggtaagttaaaatgtgtacacgatacttatggtaaaaaatgtctagccatagaatcacttatgaagaggtttaggaagaaatggattacatctttctgctcttaaatgtggcgacttccattaacaccctggagcttgtcaagttatgggtgagtccaaagttctctgtgcacctgtggtagataatgagcattatttaaaaatttctgagtaaataattacatacaacctctgtactttataagacagaatataggggaaagcatcctggaggaagaggccagaaacgtaactctacgcatggctttgacagtcatcaacagacactttacatgtttcttcatcagtaatatacatatgatagccattccatttatctcacagagtatcatgaagattaaatatgaaaatagccatgtggatgcatcaaattattttgtttcaaaataatgcttgcttaagtagtccagaaataagtcttataaaaatgagggaaagcctcttttgtcttcctgcatccagggcaaatactgccaaaggaggtaacccttttttttgttgagcagagggttttcatcaatattcatctactgtgttgtgagtcagcacaagatagactttttttttttattagacagactgtaacaggatactttagatgctatctactgatggaagctgaagatttttagtttttgaatagactccccttctcccctactgacaatatggtcacatcaaaattttttgttaattctgttaatatgactatgtaaatatcattcagtactgcataatgtgttatgattatgctcttttgttgtgaaaacattctgtttttcctgtagttaataattgctttgttgttccatttgcttcattttctttgattctatttccaaatttattctcctctcccaagaaacgtaaaacagtcttaacataaacttccaagtggccaactgtgcagggactctgttagttctgtccttcacctgaaggcatccctcctggaaatttccattcttctgcctctgttctgcccctgccgagagacgttgctctctagggctgccacggtactgtcctcaccttgggattttgctttgcctttgttctgggaattccttttttctctctcctgtattggattccctgtttccagggtctcatgatttcttccttttcctctttttgtggtggtgtacctaactgggggaaggaggagtaatttttctgagtctttattggtctgaaaatgcctttatattaagtttacaactcagaaatacttttgctgaatatagaattctagtcattttttgctcaaggcattttaaaattgtcttttatttatatactgttaagagttccaattcattctcaattccagcttgccatcttgaatctttaaatcctatgaaaacatattcattcatttatttacttgattttatttttttagtagtcagaatgtatatatagtttaataatatttaaaatacattaaaattattcactgaaaagtcttgctcctgttctcatatttatcagcacgtgtcacctccctcaatacctacagggatttgcctccattaatgtcttttatacatccccatgtacttacttatgtaaatataaataattgtagttataggtttattataagcatattctatttgctttgccttttggcttaatggtttcttggtgcctttacaggaaagcactttaagaagtacagaccgctatgtaacataaagtaatttgtattaactcataatttaggatgggtttttgcacacttgcaactacatgttgattaaacaaaaggcttatcatggggaatgacaaagatgggaataactgatcagaaaggtaagggcatggaggcagagttgaaatgctttgagaaaagcagagcaatattaaaaggaaataagagacatggaggtggttatgtagaacaactttcataaactgaggagtatttccacatttgaaaaaaattgttggtatgatagagtgctttactctatgtggagcacatacaaagtaagcagagagagaagtcttacaatgtcattagtcatgattctcttctttcagttttttagattgtgagtaggtttccatgcacatgaatgtcagacaatgaagaggaaggccatatgaatactatgtgtctagtggctgatgctggccacagacttggatcccagcctggtggtgcccaagaggtagggcctccatgtcagagctggcttgtttagggtggttcccaaaggtttcactgggtgtattagtcagttttcacactgctgataaagacatacccatgactcgctgggcatggtggctcacgcctgtaatcccagcactttgggaggttgaggcaggcggatcacaaggtcaggagatcgagaccatcttggctaacatggtgaaaccctgtctctactaaaaatacaaaaaattaacctggcgtgatgataggcacctgtagtcccagctacttggaaggctgaggcgggagaatggcgtgaacccgggaggcggagcttgcagtgagccgagatggtgccactgcactccagcctgggagacagagtgagactccatctgaaacaaaacaaaacaaaacaaaaaaaaaacccatgactgggtaatttataaagaaaaagaggtttaatagattcacacttccacgtggctagagaggcctcgcaatcatggtggaaggtaaaaggcacatcttacatggtggcaggcaagagagaagtgagaaccaagcaaaaggggtttccccttataaaatcatcaggtctcatgagacttattcactaccacaagaacagtatggggaaaactgcccccatgattcaattatctcccactgggtccctcccacaacacaagggaattatggtagctacaattcaagatgagatttgggtggggacaatgcaaaaccatatcactgggatcagtagtctatgaagcaggctctgggtcaagtttaccaagtgtgtcagctcagcctcccagagcaatagatactgctttggacaaggcagtaggctcaagaaatagttcttgaggattagtgaggaatcatggggaagttaactgccctaaggcctttggaaaccaatggccctcagaccaacaaccctgggaattagagaagatcaggtctccctagacctgtactctgaaaattagcaaattaacagaatgatattgtaggatgcagttggacctgaacagaatagccttttcccttgacctcatttattgaagaacacagtactattaaggcaccctgggcctgagggtctattataggcatactctaattacaggcacctctacatgaggtgttattggttgggggatagaaagagaatagcaatttttctttttgaccttcaagattttgtcactcagtaaacacttttaatgtaatgttttggtcaaaaccccttacttaatggactgaagtggaaggtacttctgtggtatgatgacaatagaaacaaaagctagtctaatcttcctgtgtgctctttctccttccctagtcttagaaagtctttatattctacacaaatgattgatgtggaagagtatttctaactgccaatttatctatttaactgttgttttgagaggaaagctcagttaaatacacagacagaatttctgtgcataatctccaatcagctttatattagaactgaaaacagtttcttagtgctaacagacattcattaggccaaataattttgctgtgttaacaaactgtataatcaatttaggattgcagccaagtattagcatgttattccacatgtgacttagctgttttcaaaataaatcaagtggcagctttgcaaacatgatttagaatagcgggaccagtgcagttgtatattcagagcattttaatatgaaaataatggagttaatattttctattcaaataatgaagaaaatgattgtatcttatttatgaaaatttaaaaaggtgaaaccacttgtacaaagcactatcaaagtgatttcaaccataggtttagatgaaatgatagtgcggaagagacatgattaggcttgtagaattcctccagtgtcagggtgctatgtgctgtatataaagcataaactgaatatcaatttgtgtaggattataatctgaataatggcttcattgtttccttcccccaaactattgaacttgctttatttgagtgtggcataaggtcatgaaatttatttgtttattttatatcagaattgaattgatacatccacgtaagtatgttctcattcacggtactcactgggagataactttaattctactgttatagttactgctcagtaattttgagacaactaacttttttttcattatttataactatcttttaagcattcccattggtgactggtcttaattccttgacagtatctgcttttgagaatgagcaaaaagttgtttagagccaattctaggaaatgaagtaaaacactcaaactagagaatatatgaagaaagtaatgaggctctgagttccttatgtgacctggacacatttattccttaggaaaaatatgaaaattgcttgtggagggttatggtatggactgaatgtatggttcccactgcctgcaaattcatatgtggaaattaccctatgtgatggcattaggatgtggggcctttggaggtaaggaaggtggagccctcatgaacaggcttagtgcccctataaaagggacctgagagctagctagctctcattcaccatgtaaagactcagtgaaaagttggctgtctgtaacccagatgagggttctcaccagaactcgacaatgctggcaccctgatttcggacttccagccttcagaactgtgagaaagaaacttttgttgcttataagccacccagtctgtagtgctttgttatagtggtccaagtgaagtaagacaaggttattcttggaataagagttctgtggttaggatctttgacccctccaaacctcatgttgaaatttgatccccattggtggagatggggcctacttctgtttgggccatgggactgaagtccccatgaatagattaatgcccttcttgagtgggaggcaaattagttgtctctccatgagctctggacagagctggttgtaaaaagagcctgacacctcctttctctctcttgcttcctctcttgccatgtgatctgtgcacatgctggctcccctttgccttccaccattagtggaagcagcctggggctttcaccagatgcctaatcttccagccagcagaattgtgagtcaaataaaccatttttccttataaattactcagtcttgggtattcctttgtaacaacatatatggactaagacaaaggatataggatatcaaaactttttctgtgacattgcctgtgaaactgcaaagtagagcttataggattttgtaaaaggataaataaagtattattgtagttgtaatttaaatgcattcacataggacagtttcttgaaagcaaaaatataataattataaacctttatccataagagttgaatactaatcttatattttaacttttctaaaatgtctgtaaatgtacacattgactacaagagtactctatgtactgtgatatgtacattcaacctacaaaaaatacaatcctacctcatcaaagttacttgcaactaatatgctggatttataaccataactaccattaaatgaatgttatccaaaagcaatttttggaattctttctccgaattgggaattttaataaaggtgtcttggaggtttaaacagaagtcatctttttctcaaaatagccttccctgcagcaagctgagtatttaaaactattgcattgattttagaacgatgttacttaaaattgcttgcaggttcttcctatttatgccagaaaataatggtctctcttttgttaataaactgtcaaatagatacaggtggctaaaaatgaaaatacaggctgattttaaacaattgagaatgaggctcaacataaggaggtctacctgaataacttctgagacaatcacttttgaagatttcactcacttgctgcatatatatgtcctggcatatttgttaaataagcataattattgcatagttacacatcataaatatttgaacttgaggtaaaaaaaattcatattttcctatagttacggttaagagtacttttctctctccacctacgtatgactctataatgatgtccacatttgctttctcgatgtttctgctgtgaccactggcagaaacagcatagcctaccagatggtccgttgatttaagtagagaaattctttggcccttatttaattcagttgttctactcaatctgctcaggagagtctaatgagagaacataaggctgctgctgttaagatgaggtacattggcaacatttctgcatttctttcccacccttggctgggcaatattgttagttttcttatctttatgaaaccatcaaatgaatcatttaaataataaaaaggttttcatgtgacataatattttaaagaggagttctaggtttaaatcctgtttcctatagagagttttagaagattggaaacacatttatctgttaacagttgacaagaagttgattatctcatttagcttgagaaatgttttgatgaccaccatgcttccaatgtggaaagataggaaagggtagttgggaagtcctgaaggaatgcagtcctttagaaccacatgtttatttcagaaattatcatggcaaacactgcctttgaaaagatccttccagtgctcacctccttttaatgtggaccacagtgacgccatttcaccccgtctttcatgtgatgttttacttctgtgagaaaagctttatgtccagtgcacttttctttcccgttggttttgatatcaagaatgacaaaattcttggggagataatcctaaatgtcagttttcgattagtaagcctagcagatcttgcattggaaaaaataaaaatgggtgaagatctttgccttaaattctttattggagtttaaagtaattgatggcctgactccctccttccttcctttccttattggcagtaatattatttgttagtatgtagtatgaaaattggtagatataagcaatatgacattattaaagacaattcctacattaaagaagacaatgactgtagagacatgggggttcagcatgtttaggggctacattgttccaataaactgcattttaaaacaaattattaactgaaagacaacttccttaggcagaggaactatcttgaacaaagtaattcaccttagataatgaacatccagcacagtgcctgagacataaaggatgttgattactgaggggctctgtatttaaggatgtcttcacttgacccctactcttgcttaatcacttgcttgtgtatagaattctaaagtcaactttgaagacattgatccattgtcatctgtcatccagttttgcaaatgaaagtttttttgccagtctgatttcttgttatttaaataagacttttttgttttgattcgttgttggtttttaactttctctctggaaactgtgcagtttttctcttattgttgctattatgatagttcattaaaatatgttaaaaaattgtctttaaaaaataactatttctgctctgtacttaataggctcatttaatctcatgcctacggtcttttattcagcaaagagaaaattatgtgtttcattattttctttcttctgttttctccttctgggtccaaattttgccaagcattatgtcagccttgtggttttcagcaagttaacctctaacatctttgatcatcaattgcattattataaagtggaaattataatccccagtaggccagtacccagtatggtaattattctttctccttcagatgtcttgcttctctaagcttatcattttgatcaagggatttgaatctaaatatagacttctggctcttaaagtgatgtctaggctgtttttagcatgaaggttattgggcatgactctggtcttcctcaaggtagcactggctcatttctgaaagctccaacactgtagcctgtgttttgtggcaaatgcagagatcagcacatagaaacgagtcaaagcatatatggaaaggggacacataatgttaaataacaaggaaactcttggagtttgttttaaggtagaagtctataaaagacaacagggggatctatagtatttttatgtgggttcatctgatgaatggctgccacatttatcttcccagaagaacagctctcatcatgtcatattctttgttaaaaatcttaactggatccccactgcctacaaaattaccatcagattcctcagcttaatttttgagttgtccaggaaagattaactccaatgcaactttctactatcatatcccactattctctatatattccttcactcaaatccaaatatgttactctatgcttcccagatctatcccatgctctttccttggattccttcacttcctcccatttataccgggacattcttctcttttaaggttcaacttcatgacctcttcctttaaaaaacctttgccaatctctataactcgaggttctatttctatgtatgccccaaagcacatgttgtgtgcatctcttatgtgtaacatactgcactgaaatgacttaaggcataatctatgtcatgttcatctgtgatctactaaggtctaacagtacttcacttataatctgtgctcagtaaatatggttgactaagtgactggatgcattgtagtcatgctgcattataatgttttatattgagaaaataaatttggaggttgttttgtttttgtttttaaaaagagctgactggtgaccaaaactgtgctttgttgactacattgactttacaggtttttatattatctatatgatcacttcttaatatttatttattttttcagctttattgaggtataaatgacaagtagaaattgcatatatttaaggcatacaatgtgatgttttgatatatgtatatattgtgacatgattaacatgactaagctaatcccatcatatagttatcatttttttggtatggtaaatatccttaaaatctactttcttagcaaatttcaagtatgggtttccacaaatagtgataaacacttgctaatgacacaggagtattgtcagatatttgggaaatagttattcagctttcagtctatttcctgtcagaagtttatataaagaaaaatgaaaatcaaatataatgctgcttgtaactgaaaacattgtgcatttaaatgaaattttttgtaccatttagcttgttttgctcttgaacattatttgaaaataaaccaacttattacttgggattgatggtagtaagtgtgctgagtgttgagatttatttcaaaatgcatggccaggtgcaatggttcacacctgtaatcccagcactttgggagtccaaggtgggcagatcacctgaggtcaggagttcgagaccagcctggccgacatggcaaaaccccatctctactaaaaaaaaaaaaaaaaaaaaaaaaaaaaaaaaaaaaaaaaaagccaggcatggtggtatgaaggggctgaggcaggagaatcacttgaacccaaaaggaggaagttgcagttgagccaagaccacaccactgcactctagcctaggtaacagagtgagactccatctcaaaaaaaccacaaaaacaaaaacatataaaacaaccccaaatgcattctctcttctagttcttttccactgatgaaatcaaagatactgaacaatccaatctttaaattggagaattccttgtaaggaaatgtgtaacttttataaaggtactagcagtttcttgataaatataagaaagagtagaacaagacattgtatggtggtttgttatgtgtgatttataatatttggggaagaccagccataattttgtgtctttagtcagtagaatgacattgatttgtggcaagtcaacatattcctttgtatttttgcaatggtgatatttaggagaacagtacttaagtctcctgaaaagtattttttttttttacatcgtagggacttattcttagccacacatctcctaaatatttaaatattttagttttgttcaggaaatgaaactgttttcaagtgtatattaatggttttttcttcttataaatggaaaagtacttaaagataattttgtttaaaaacctcattttgcagataggaagataaaactgaattttattgggctgaatacagattttcatttaaaataaatataggatagaaattgaaattgggttaaactatagccaataaattgaattaattgcaatgctggcctggtgcggtggttcacgcctgtaatcctagcactttgggaggctgaggcaggtggattacctgagctcaggagttcaagaccagcctaggtaacatggtgaaaccctgtctctactaaaatacaaaaaaaaaaaaaaaaaaaaaaaaaaaaaatagccaggctggtggtggatgcctatagtcccagcttggaagactgaggcaggagaattgcttgaacctgcgaggtagaagttgcagtgagctgagatcgagccactgcactccagcctgggtgacaaagcaagactctgtctccaaaaaaaaaaagcaatgcattctaaattctgcataataatataggattttattataatgcctaagtgcatatgaggtcacctaattgtgtcaagaagacaaaataagtattttcagcaccaggaaaggagactccctcaagtaagaaaagtccaatttcatcgaacttttccgcaatgtttacagtcagaaaatctatgaagaaatgatttctattttaatgtaagaatgagtatgatattttacaatttcagatgttttatcttatattcttttactatttgtcccaccagttttatgtttcttatttttgctttcttgcctttttttgactaatcaagtattttaaaactattttattattttactctattaccttgtagttatacactattttactggattttttttggtagttactccagatattgtaatgtgcatccttgattcattgaaatgatattgttaacactacttaaatctgttcattcactttctacccttaatgttaatattgtcatgttttttaattctacatagatcttctacgtcacaggacattaatatgtccactcaatattcactttgaattagcagtatatttacttttttcactgttctacctcccccctaacttctttttacaactgttgattctctctaccttttactctcctttttttttctttctttgaggttaattttcttctacctgaatatttctctttaatgtttattttagtgctattctgctagtgacaaattatctccagttttctttgtatggaaatggttttaatgtaagagggccatagggagaacagtgatatttagtgataaacagggttaaattagaatgaagggaaagttgagagaagaggttgaattttgtgggattttgttcctgattaactgtgagattcagaagcatagtaaaagaattttagtagctggggaagtgtggatggtgaagtaaaataagccaatggactgctcttcagtagagagtctggggcctgagaatggatgacctgggagttctggacctgtggtgactgacataaatggggaagggagagggcataaagacatttgtgttcaaggactcaagacaagcaatcacagggaaactgtaaagaggaaactgtttctaccaccatactaacttctgtgttctcctcttagctatttccatgacggtgtggagaccagggaagatattaggttatggagacctgaaggttccacttcattcttagggagtgaactgtaagagctgaaaataggccgggtgcggtggctcacgcctgtaatcccagcactttgggaggccgaggcgagtggatcacgcagtcaggagttcaggaccagcctggccaagatggcgaaaccccgtctctactaaaaatacgaaaattagccaggcatggtggcgggtgactgtaatcccagctactcgggaggctgaggcagagaattgcctgaacctgggaggcagaggctgcagtgagccgagattgcactactgcactccagcctgggcaacagagcgagactccttctcaaaaaaaaaaaaaaataataaataaataaataaataagagctgaaaataaatggattgatttgggagatgcttaggaagtaaaattagcagaacttggtgacagagtggatatggatatgggatgtgaatagagggaaatgtcaaaaatgactcccagatttctggtttatgcaacttgatgtatatggtggccattcactgaactagaaatgctggatggaggaagactaggtttgggtggcaaatggtgacaccatcagtttggcttagactttttgagtttgaattgcatgtgagtcatccaaatggggatatcaaatagccaattaaatatatgagtctattgctgtgcagagatatctgggcagaagataaaaatttgggaacatctttctataaattgttaattgaagtcttgggtctgaataagctggacaaaagagagtcaacagagagaggccagtcaagaatgccaatatgatgctgaaggacaagtagaatgaagacaagggtccttaaaattgaggagtttattggtaaaagataatttagctggagggaaagtttagtgtcttttttctttaaatcaaggggcttgaatatgtataaaagccagtgagaggaatctggttgagaaaagttaactatccaggaaagagaagagatcataatatagaacttctaagaagctgggaaggaaataggcatatattatttccccttgctgctgtaacaaattacaacaaatttggtgacttaaaacaacacatatttatctcagagttttggaggacagaaatttgaagtcagttcactgggctgaaatccagatctcagcggggcttcatttgttctggtgggtttgggtggcagggcaggtgtggagatccgtttccttttcttgtccagcatctagaagctgcctgcatttgttggctgttggtcctgaatcgctttgactcctggtttggtttttgcctttctttttctctctctgttttcacggaaacattagcttctctcactctgatcctcctctttctctctcttttaaggacccttgtgactacgttggaaccccctgtataattcagggtaatcttccctgatcaggaccattaacataatcacatgtgcaaaatcccttttacaatgtaagattacatattcacagcttccaggaattaggacactgacatggggtgaaggcgggggaattattcagcttcctacaaagaccaagcacagttagaagggcaggccctaaaggaaagaagggaaaatttcctaatttaattgaagagaaagaaggtagaaaatagaaatatgggtggtttgtatatgtcatagtggaaatacaatgtatttcctatttcactaaagtagaggttgtttcacttgtttgagggaagaggcactggtagtagatccgtagaagaaagtgtcatcctaacaactagagcatgttttcacttcgctaatagaacagcctgctgtgtgccaggagcccaatgggtagagggatataaagatatccagcacagggtgattattacctttctgtcactgggagttttcaaagcatgttaaatatacatttcactggaaaagtttagtaagtattcctgggtgctgagttacaaaagatgacttcattgacagttctaatatttgctaattgtgtaagtaatgcatactttctaaatagaatgcacttttttttttttttcttcctgagatggagtcttgctctgttgcccaagctggagtgcagtggcacaatcttggctcactgcaacctccacctctcgggttcaagcgattctcctgcctcagcctcctgagtaattgggattgcaggtgcacaccaccacacctggctaattttgtatttttagtagaaatgggatttcaccatgttgcccaggctggtctcgaactcctgacctcaagttatacacccaccttggcctcccaaagtgctgggattacaggcatgagccaccgcgcccagcctagaatacactctaaagaaatgtatcataaggctgggcatggtggctcacgcctgtagtcccagcactttgggaagctgaggcaggcaaatcacctgaggtcaggagttcgagaccagcctggccaacatggcaaaaccccgtctctactaaaaatgcaaaaattagcccggtgtggttgggcacctgtaatcccagctagttgggaggctgaggcaggagaatcacttgaacccgggaggcagaggttgcagtgaggcgagaccacgccactgcactccagcctgggcgacagagcaagactctgtctcaaaaaaaaaaaaaaaatgtatcatagaatgctactagaaataattgatcagaagtaaagatatagtaagaattcttaagaagtttttccagatatttgtgtagtcagagctcatggcactctattaagtacttgccctttaacttgagtaatctgatagctttttaaaatttaatttttccactgatagtaaaggaattataaaaattataagaatgaaaatagatacattaaaaataaccactttatgatctcctctgttctcttgttttccttcctagagatcaagattgttaaaaatttggcatagattcgtggaggtccttttctatgggcttacctatgctcatgtgtatagctggtcctccaataaggtcattttcttcaacatcatttttatctaacatggttgaggaaaaaaaaaatctattccgggattaggccactgtctgtgtgaagtgtgcactttctctgtatgtctatgtgggttctctccagagactcatttccccccacttcccaaagatgtgcaggtcaggttaattttgatgtctaaatggtcccagtgtgagtaagtgtgtgtgtgtgtgtgtgtgtgtgtgtgtgtgtgtgcaagtgtgccctgtaataaaatgaggtcctggccagggtaggttcccaccttgagccctgagctgccaggataggctctggccacctgtgaccctgaactggaataagcagataaatcattaaatcattatctcacttgtttttactcatctttcttaaatgtatatatagctcaaatttatttcagtgtttaatatcagaagtgttttgggtctttatttagaagtttggtgatgtttttatgaccagaaatgtgccataggaccttaacttatgtattttatcatttagcccatggtgaaactggtttaaatctttattatgtcttttggcttaaagtcacggtttctaagaaatgattgacaatgttaagtaaggatttactatttatatagaagtataggatattttattgtttttacacaaatggggtcatactaagtaatattgtataatttgtttttttttaaattggacactgtgttttaacagttcttcgttagtccatactttagttctcttaattcctacccagtattccacagtctgaatatattacattttattcatatgtgaccatttccagtatatatggtgtttccacattttctcttgtaaacagcgatgcagtgaactcttccagatacttttctaatcatttatgctccttagtctatagagaaccagaaaaggagtgcctatgtcaagggcatggcttctcaagatttttacaggtgctgccaaatttccttccgtaacatctgttcccatctatatgctttttatcagtattagagaataccactctctcacttgacacttgtaccagcctttggctttatcagtcatttacatttttgtccaactcatgaagatgccttatgttaatgtatgtttctcgtatcactgatgagattatctttttaagtgtttatgtccagtggtatattgtgtgtgtgtgtgtgtgtgtgtgtgtgtgcgcgcgaattgtcttttcgttccttttttttgttcatttttcttttgggtttttttaaacttttcatttttaaagaatgctttctgtatttggattattagtttattcttaaatatattgcatatatacttactcaatatgtgttttgtatttgaattttatttgtggagtcttctatagcattaaaatatttatgagtcaaaattgtttttgtaattccttttaggccttactttggaagacttttcatattacaagattattaaagcattctttttttcttttttttttagacagagtcttgctctgttgcccaggctggagtgcagtggcacgatcttggctcactacaactgccacctcccaggttcaagcaattcccctgcctcagcctcctgggtagctggaattacaggtgcacaccactaagcccagctcatttttgtatttttagtagatacagggtttcaccatgttggtcaggctagtcttgaactcctgacctcgtgatctgcccgcctccacctccaaaagtgctgtgattataggcgtgagccaccacgcccggccattaaagcattcttgagttatttcttctaacatatttataaactaattaattttttagaatttctttttagttgtctaatgttacagtctattttagagtatggtgttaggtaaaaaaatctatattttgtttactcgggtatagttagtctttttagaaagtcttattctttattgattttcagtggcatctgttgcatgcatgcacacacgaacacacgagtctgtcagcacctttttaaaaattggctaactacagttttattatatattagtgtattagtccattctcacactgctataaagaactaccaaagactgtgtaatttataaagaaaagaggtttgattgactcacagttcaactggctgtacaggaggcatggctgaggaggcttcaggaaacttaaaatcacggcagaagggtgaaggggaagcaagcatgtcttcacatgatggcaggagagagagagttgaaggggaagtgctacacactttcaaacaaccagatctcatgagaactcactatcacaagaacagcaagggggaaattcgccctgttcataccagatccctccccaaccattgggtattacaattcaacatgagaattgggtggggacatagagccaaaccgtatcaattaggtacaccaggtatgtgaagatccccctcattgatcttgtttgtctgcctttcttggctacaattgtacattttcttaactttgaaatagtttggctagcactgaaatgatctgttccttaaaggttatatagaatttttttgtaaatcaaaccgtctaggatttggccacaatttttagcagtatctctttgacaactgtctttcttctatagcaattaatttctttgaattttatggagtcaatttgtataaattatattgtccagagaataatctatttcattatgtttttttgcataaaattgggggaagtagtctcttatgattcttatcatttctctggtattatttcttattttgtatattttggtaccttctccctttttccccctagatttgtttcagtatttatctgttttattgttttccccaaagaccagattcagaacttattagttttatcattttacctttttttttcaagttttaatttctacttttatatttattagtttattctttctgatttccttaggtttaatttaataatttttttaaaattttgggatgttagtaaatttatttttgtttaatatacctgtatttaagcttatgaattagagtctgagaattgttttagcagtatgagatatgatatatagtgtttattatatttattattattacatagacattttacactttcaattttcattgttttctttgccagaagagttatttgaagagtcttaaaattttcagatgctaggagcttcttaaccccagattgattagtgatttttccttttactgtattgtgattagtaactattatctgtattctggaatttactggggttttatctttgatgtccaatgtgatcaagtttttttttaaaccaatttcttaaacagaagggatattctctgatttcaccttaaagttaaatatatggcaattaaatctattttattatgttaccctatttatatattttatatttatacctactttttaattctcttgttattcaggctttgagaaggttggataacagtcaattaatagtatgtttccatctgattatctttatacctattttagagtttgctttacaaatgtgtactatatgacaccgagacgtttataatcattttatttttactgtgaattacaccatttagcattatagtgttttcttccttgctcctttcttcctttttatttttatttgtcctatttgcttttgcctattcttatgaacaggcaacttgatgaaacacttggttatagagggttctctttcccatagaatagagcagaatctgtcttatgattcaactgaatgtttttctttcaataggtgagtttagctctgcaacatctctgagataacataaaagtttagcattagtactgttattttatgttttccaatttatagatttttgaaaaaaattcacaagatgttctgctttcttagctttgtgtttgctctttttattagaaaagtttatatttctgttatgattataaatgtaactgtaggaaagttcttaatcctcttatttccttaaaaatgatctattattcctttctgcagatgtttcctcttcatcctcccttttctaccagctgaccttagcattataaaataaattacttagaattctcctatgatttatcagtttaaaatatctttttgatcttagttagcaaagcagtcagtttatatagtatatactgcataccatgtccttgctccctcagctttcatctttttgaaaaattttatcattcatattttcatattgaaatttcataacgattcttaaattgttatggctcatattacttacgttttattatagcaacataatcacatacatgattggaatttagtaccatgattgatttcagtgtttatttcagttatttcactcaggtttttacaatcacttggatgactaaaatttatcttctagtaaattcctcaagaagatcctatgaaaacaagattttatatatttgtaatatgttcaaaattttgaacattgtccgttgcctttataattaatgagtttgattgaatttaaaaatctcatttgtattttcttttttcaaggatttcatgcacattactgcatccagtggtgtatctagagggcagtggtgtccactgaatctgactgttgaatgttgctgtggagagatttgacaacagactgattcctgccttaaaacaagctactagaaaacttttgccttgctgttcaaaatgtttcagtaattttactaggaagtgtcttagtgttgactgtttctctggggaactatgtgactttcactgagttttttttttttttcttcattttgagatagggtctccctctgttccccaggctggagttcagtggagtgcagcctcaaactcctgggctcaagcaatcctcctggcttagcctcttgaatagatggaactacaggtgctcaccaccacacctggccgtatttttttattttttgtagagagacagggtcttgctctgttgtccaggctgatctcaaattccttgacctcaagccatcctcctgtctcagcctcccaaatggctgggattacaggcataagccaccatgcctaacgatcaataagttttgactacaaaaaagtcttatattttatttattcttttctgctgttttggttttcttctgtgcggatttcattttctgtctaatgtttcttaaatttaagataatttttctggctgggcatggtggctcacatctgtaatcccagcactttgggaggccaaggtgggcggatcaggtcgaaagattgagaccatcctggccaacgtggtgaaccccgtctctactaaaaatacaaaaattagctgggcatggtagtgcatgcctgtagtcccagctactcgggaggctgaggcaggagaatcacttgaacccgggaggcggaggttgcagtgagctgagatcgcaccattgcattccagcctgggtgacagtgtgaggctccgtctcaaaaaaaaaaaaaaaaaagataatttttcctctcaatttggttacttcactgttagagtggaggggaaaaaatggctagtggtggatcagatcagctcatcaactgtaaagactgactctatgtcatttacttaaggaagtgaaaattcatagtagagtatgatgagctggtaaaaccagagtttctgaatttacctctgaagatctaggctacatatttattgctgcaacaatctatgttaagaattttcttctcaatattcatggccaacatctggcttctaaaggaaaggcttttggtcttttcaatcacttgctgatagggtgagactgcattgttacccataaccacatgacctaatttagaatcaatcttggcatccagtcttgcatttctaatcaaatttacaatccacctttcagcttcttctggagtcatgttcaatttatctgccaacatgttaatgctgatacactggtggatgcgacagaaagtctcaaatatgaagagacgggcatgaatattgagaagaaacttaattagaatagcaggtcagaggctcctaactgggcaactcaagattctggcttctactgaagaaccataaagaaaagatgaaaaaaaaactattaaagaaagatgaaataataaaactattatataaagggtgacttacattttggaaacaacatattacgtataaattttgaagaattggaataaaattgattcatttaaaaaaaagaattttctgagactggtgttctcaagacaacatttagatttagtgttcacactagtggtcactaatagagctgtgtcagatagtgaaagaatatctacattttcctgtaaagaagactttgtgcttttgttcagaaaaaaatcataaggctaacaattgttaagatgagaaaggaggcttgtccactatgtaaccggagtgactagtctttccacattgattgtatgtgaacataaggcctactgtgtacaaagaacactctgctaggtattctgggagaagcagagaaactaagagactcagtcctaaccttaaggattatatttgtgttgagtggaaaaagtagagcctgttgaaggatttataagttatcaaaacaatgcattagtaagtctcaggcaagaaaggagaaatggaaaagtttaagtcctaaaaaaaattacaaaacagggagtgatatgatttatatggagggatggctgcttgatggaataaattttgatctatgtctttgagagagatgatgaacctagctaggcaatgagttatcccaagggggcacagcacaatagtgtgagatacagggaaagatgaaaggacagtgcaagttgtattttgtgtgaggcaggagattggctggattaaaaaagtatttgtaggacttgatattcaagaaacatctccttattgcttttttttctctgtataaagccactgggggctttatacagtcagatagacactgagatggtcagagagaagttagacatgccactgccctcaaggaacctccattctaaataatatagaatgcatccacataggagacagtagctgaagtttgaataaactggtgtatgagaaagaataaagtggtagtattgcaaggacaggtagggtttgaatctgtaaaatgagatgaaataatacttactttgcagggctgttagaataaaatgaaataacatatgcaaagtgcttaacacttaatgggcaattgatatgtgtttgtcatctttccttccttccccacctctcaattctgacataacttgtatataaaaaggagagatccttgaaagatgcacagaagtgaaattttcagaagaggtgtgactggccttgggccttcattgtggggcttaatgaactgaggaacattatgaacaaagaggtgggaatacagaacatgcttttgggagcttcgttgaagttgagtgggagaagagatttgaaagggggacttgaaacctagaggttggatggtacttttgtattagactggtgcaaatgtaattgcggttgttgtcattactttcaataataaaaaccccaattacttttgcaccaacctaatagcatttttcttctgcccagattccactttgtatactataataactgatggtttatgtgtcaccctgcatcagctgttttggtaaagaggagtcatgagttgattaactttgaattctccataataaacagcacagcactttacacatagtaaggtcttcaatacatatttataaagcaggttaatcaaacaaatgcttgggtacgtcaggaacaagggctgtatgaatgtgacattttatgctaatgtatcaagctatgtatttaataataaaatgtggaaacacatgttgtagagtggaatagtggggtgccttggagagagccagattacagttttctccctggcttagtggctatggactttgtgaacttggtcaagttcttttgcagtatgtgcttaaacccaagaccatttcttagctgcctgctcttctggccttaatttcctcatctattcaatagctagtaccttatagagttgtgagcattaagtgaaaactagctcagtgcctggcacataatgggtgctcacataaatattattgataatcacaataatagttatttttatttttcctaattgaaatattgatatgaaaatattttaagtgacacatttactcttgttctatccaattatcaaataaaattctaaataatgtacactgctattctgtaatattttattgttgactctgttgtgttaaaaacatcttataatgttagtttcgtttttggagataaaagaccaattctctgcagcgggagtttaaggagtgttttgttagtgtctgccttgggctcttccaggccttctgcaaacttgatttcctttgatcctcacagcagttctgaaagttttggtcatagttttttatcctcatttttgcaactgaagaaaattaagggtcaagtgacaaggttagtgagtggcaaagtcatttataataattaatgagaaaaaagaataggctgaagttaaatttggaatcagtgtctaaaataactaggaagtaagataaagcacagtcaatatgagcacctgcaaaggattacagaaaaatgagattccacctgtcttaagtatgcagggtgctatcttgttcagtctgctgactatgaaaagtatcggtaagcttcatttttcaaagacatttgcctttttgataacatagtcacaaaatgccaaattttgctcttcataattttccctgaaaatttagaaacttagttttccagtgttctgaagggatgacctatcacacacacgtaaacagctagtcatctattaagtgtttttaagcccttttagggcatgtatatattgcactgtaatctatacaggacctggatactgttttgaattgaagcgttcattttatacatagtgtttaacaggctttatggtgtgatacaaaacagcatttctaacttccccatcatctagacttcaaacctcagagtaaactttgagaccttgaccctgtgttcacatcagttttcaagttctgcatattcctcacctctattcacttttcaaagcaagtgccgtttccttcttgcagcctgccctgatcttacccctattgtgcagttgcttctaccttggtgcacccttgatacttagcatttaatcactgttagtctcaacttaccactgaatgggatattttaacttaaaaattaatatctctattccactatgagacagtgaccttaactgtcttaataatagtgtgttcctactgcctgatacagggtttggcaaatagtactttgcttgataatttagtgaaatgaattactttcattatgatggaaccccagtaaaatttttgagaccagagataacactttttttttttttttttttttttttagatggagtcttgctctgtcacccaggctggagtgcagtggcgcgatctcggctcactgcaacctccacctcccgggttcaagcaattctcctgcctctcagccttccgagtagctgggactacaggcacgtgccaccatgcctggctaattttttgtatttttagtagaggcagggtttcacagtgttagccaggatgcagagataacactttgtaatatttgaaggctaaattgagaaaagaagacagataaggccaaatattatgggtgatattcttgaaattatttgttaccatggtctttgttattgttggcttgctgaaaagtagctcaaggttagaacagaatcttttacttcacaaatgctaaccccccatcgctgtattagttggtatttgctttcttggtaattttcttttaaaagatcatgataaacctaactggataaggatcaaattaattaatgcctccaaaatagatctgtgactttttatattaagcgcattactgccactcccaactaccattctgagggatttttggttttgaaattcaaagcagggatccttggagttgtagtgtctcttttttcttttgaggaatatgagctcaccatgcatattaaactcacttatgtataaagcagtaaagtgaacactgcctagtagcagtcaagataacgaaatggaaagtttgtgtctgtgttgctgagtatcttccattttgccttgttactacaacaaccacattgtaatctggaaattaccagttcttctcccgctgaaggcagtgggtcaggattgaagagcattgagcagttcagtgaagcttgtccagatgtcagtccagaagagattttacaattgtaaaagctcagattagttttaacgttgcaatcctttttgtcatttttgagtgtttctttcattttttatttagacttcattgaaatttttcttgttagttatagatgttttccattgtaaacctcctccagcctccctcccctagaaacattagaataaacttttcagtttttatgagaagaaatgcaaaatggtcattaaaattttgagaaagttttggcagtggttattttttaaatgcttttaatggaatgaaatatgctacatcacacacatttgtgctttttaaaaacataagtatttgagattgatatattgtagtttaatcccctctttgtatttaatactattatttaggtttattgttaaaataatatttaacagtgtgtgatatcaaggatagctggaaggcttataatacaaaaattttaatgtttaggaaatgaaagatattaatatatattaaaactcttttattataccatagaaattaacactttgtgccaattctaacctcaggattattttttgtgccttgtgtatgttccagttgatctcttcatcaattttatgaatagcataagtaaatttagttcattaatatatttatatactttaaatagaccaatgtaaacagattcttatctgccatatgttgaaatgctttagtaaagacataactgcctagtcaacaaagatggcattgaattgcactgttttggaaaaaaagttgagcgaactagatgcctgttaatctggttctttaaatatcataaacaaaagtatcagaatgtgtttccaaggacaaaggcggggttttccgggctttgattggttgctgccttgtcctgtcccacagccatccttaattggctttgggtagattggaatcacataagcagggtgacatttattactttcctagttgtttcattgcactgagccctgagattcccaaggagtaaccataaaagatttcttttattttgtccatgacctacgagacaggatcattctaagaagagcaggcatgagtttgagtgcaagaagagtcactctgcctgcaataacgccaataattctacagaaaagggtatgtgacttctttatcctttttttctttaatttttcttgctgctttttttcccctgttactgtgtgtttattaatacataggaagctttacttacatacccttgaaagagcctataattcattaaagttgtaggtaaaattaaaggacatattattggaattgaactaggaaaaataatactgcgctaggacatcgctatagttaaaaactttcacctaaaagaagtttgatctcgatttcaggtcactgtgatttagagactgtattgaaacttttccttttttttctttctactgtaacttcaagcctctttgtttttagctcagtaggaaatctgctgttatgtcttatatttgtttactaaggaatagtttctttgtttcaccataattcataatatatcaatctcttcattgttgaatagactatacaattattttactgtttaaacatgtgttaccagtttattctcaggtttctacccatttctattgagcttctgcgtatttgcttaagaaaaactttccattaaattcccctgtgaaagggctttctgttaattattaatgcagtcaatcctgtgtatgaaaatattttatttattagttttttgtaaagattatttttatgtctcacttacagcattgcattttacaaggtggtatatgcaaccatgtcatgtagtcatagtaaacttttcttgtaactctccaaaataagaacattgcactggacttcttaaagaatcaaatctgtcgcattgagaaggaaggcactaaaactcagttttggcaatatgcttaccaaatggttttggtgacactagaaactgtagtgtttatttttgaactcaacttttaatagttaactgttaactatcagtgcattccattaagtcaaaggtcatgttgcaatttatttgaaacatggcaaatctaacagttaaagtggctatagtttttaaaaacgaagtgcctctttactatttttaatttttagattttcagcttattttcttatccagtcaaccatttatttactgagaatattttatttggcattggaacagctatatgataattttgccaacatgagttctttatctttcttgaggccttttgctaattgtaagcaaatttaattaaaaatattttgctttgggttttaacttttatttggaattggacttagcagtgcattaataatgacaatataggttcctggactcactgaggatgtgaaaaggcatattaacatttatcaagtctatgttctcatgtttgaattcttctttatccggttaatattgcagtttagattgactaagaaacttctatcatatggtttgtttttgatgacatgttggtatgatggaaaatgtactatctggactctccatttactagccctgtgactttgggcaaatccagtaaactcttggagtctttacttcctcatctgtataacaaactgaggagttttcagtaaataatatcttcagtcttatttgtgtctataattctgtgaaccaaatattttatattttcatggttatagtaaaatatgtaaattatttttattattttagaattattataaaacattaggaaagaatgctgtaattttcaaggagtttgaacaattagcctaggggaaattggttatgggaaaacttggctagaaaaataacttctagcactgtttgccaagtaggaaaacaagattactctggaaagcggtggttattattgatgttacatctgagctgccaatggtcacctcattgtgatttatcgtggtattttaataataagcttcttgtcaagtttctgttataatatttataaaagtcaaaattccctagactcaagtctatgctatttttttcagtgagtgcacatattttggtgtttatataatttagcacaccattatgtgcttctcctgatattttaactctgaaaatacccatttgattgttctgaagatcttaatgtcttttattttaggagttgggtattttctgatttaaaaatcatccatctgccctggtcacaccatgattaattttttcttccaatataagaagttatttcatacttgtaattaatttattttccatatatgccataattttaaatgatcttataaatcagtacaagcatttctcagagaatttggggagcaacttattttcccatgaaggcaggtgctttttccacaggtttggtgtaaagttcactcatcctgaatgagtggcccttgacaaataatttatcaaatggaatcctaatcatttaaaaggctgagagcattctgaaaatgctccgtagcaatagggagtaattttcttatcaggtagtgtgtctgatccaagtggctgtaagtgtctctggtagtgcttaggaacttgaattttaaacatggcccttcatgtggtatagatctattttgtagcagagaaagtacgccttgatctttgagaagaaaggtattttggtagattctctatcaagtaaattggaaagaaaatgttcacttccaaattctattaggatctgatttctctgatttaagtgaattaaggttctggtgaagaacgttcctcatgtgcttcagaaacgatcacatcctcagcaaacattgtgaatgaatcttttacctcatcgcatttttctcagatcatcactaggttgtagctttttactttttcaaatgagaagactgagtctcttgggtgttgagtgacttatgcaaggtcacccagaaggtcagtggcagagctagaaatagaatctagatcttgtgacttccagtatgcttctcctagatacgtgttacctcctgaaattaatatggaaatgaaattgccttatggtgggtataattgccattcaagtctggaattagcttaggcaaatcctttcatcttcctctgcacctccaccaactcccttatgctctagcatagaaaacattttattcagaaagcaattgtaagcagccaagtgtgtgtgtgtgtgtgtgtgtgtgagtgtgtgatagaaagacagtttatacctggaactccagattggcacattacataaagaaaacattttaaggtcccggagagttaacataaggctcaagtattgtaaagtataaactaagtataatataaaattcacattcttttatggaaacactaccaggtcagaaggccttacatccatatcctgattcggtgggtcaggcatatttcatgtctctatcagattaacattttttgtttgtttgtttatttgtttgttttttgagattgagtcttgctctgtcacccaggctggagtgcagtggcgccatcttggctcactgcaacctctgcctcctgggttcgaacgattctcctgcctcagcctcctcagtagctgggactacaggcgtgtgccaccacacctagctaaatttttgtatttttactagagaaggggtttcaccatgttagccatgatggtctccatctcctgaccttgtgatctgcccacctcggcctcccaaagtgctgggattacagacatgagccaccgtgcccagccaacattgtttttaagttatgtttgcaaacatttttgcattcttcatccatgctacaattacaggagatgttcataagcacacaagatcctgaagtatcttctgaaatctcagagaaaaaaagggatacttttaatgacatatatttttttaagattcaaatccttttgaaaattgtaaattcatgagtgtaatacggagcaatgccatttatgagaagatctaattccccattcatataagagaatagttcatgttataatcatttctttcctcatacaattagactaattgctatgattttctaaaagtgatttagtggaggaaagaacacatcatcacatcactatttttcccagaatcttttaaacatgcacaaaatcagtccaggcttccttagcatttgccatgctccagggcctgcctggccctcagcctgcccagcttcccttgaagccttcactgcagcatatcgtttgcctccttgggcttcaaacggcttttaaaatctgtatatctgcacttctgctcccagaattgtgctctgcagcctatagacaacaccaggctcatttgctttcccaaatgctgtctattgcctaagtgtcggctcaggctgtgttctcatcctaaagccttctaagactcttttgcttcacctttatcttcaaggtgccttgatttagtatcagtggacccacctttattactcatttgtcaattcaaccactacagccctgtaacatcaattttattattaccttttaaataatatttaagtcatattgccgtccataggtgtgtacaatatgactttcagttgctctatcttgtttatttttgtatatcttggaccaccatttggtttccaaaagttgtcttttgatttttggtcttacaactagatcttagtattttaaaggaagaaatctttaaaatgttttgtcatttatgggcagaatgtaatttcatgtaaccaaaaaacacaaaggactgtggattaaggaggaaaagagatttatttttctttcactttacaaggataagtccaaagctaatgttgcagccccacaatgtcctcaggcaactgaactccttctcgctttctattatttcttctctagtgtgggtcctttttccttttatggaaagataaatgtaaatttccagtcatcctgtttacagtctttgcacagagaatgtgaaggaccaagaacaggctcgtgagttttataccagttaacgtgccattgtggagtaaccaggagtttctgcttacatcttgttggccaactctggatacaagaggagtcaggaaatgcgggcctggagtgtagcacactgccctcctcaccagaatcaggattcatcaggaaggaagagaggaagggtggatattggtgggtaactcgccatctcctctacaagtgccttggacatattagacatttagtaaatatttgtctgggatttttgttattctggtgccagatatgaaatgtagctatgctttttgagcaaataatattctattacttgtatagggattgtaggtatggtaataagtggggagagagcagatttcctgtgcagaagagggtcgtggaaggccatggatggtggtcttagtttagatggtggacttgcttggaaggtgatagtgaagtggtagtgggcattgttactgctttttatccagagttctcattcttgctaaaccttgatatttctcctgccctttttacttttgtacagagtaacttagttgcatactcaaccaggaagggtgtcacacagatgaatggtatttgcattttagtgaaatgtttcttttcctgagaagtgagtttttaggaagtgtgttgtagcagattatatgtatgctttagagccaggaaacccagagtttgagttcagcttcatcactctccagtgccctggctttgggagcattctttcaaaaccctctgagaatcagtttctctatcttggggatgatgatgcttcctcacagaacagttgtgaggattcaacagaataaatatttagaagcatttcacacatagtagaagtctaacaaatatgaatttccctttttccccacctgtgaaatggcatgttttactagtttcataaacagtttaaatttccctgtgactgagaatttaaactttccgtgccctattctcctaaagtggttatccaaagatttcatagtagaaagtgagtcaaacaaaaagtggtttttcttcatagatttcagccagggagagaaagacaatatatctttcaaatgcttgctcccactgctttcctttctgtaactttagaaggtctctaatttgaattaaaaaaaatgaatccaactatatacgctgatgaatatattttttaaaatctttgggaacgtagatttaaatacaagataggtggttaattactcctcctttcagtgtcctaaggagtattagacggggacttctgggttgtatatttgaaagggataaaagtaggtctagtattaagacgttgcttcagtaggcaagtggtgttactattaatagaaccttagctgtatgatggtgagaacttgttacttttgatcatcattgaaccccaatgcccagcacatagaaggcacaaagttggtatctaattaccaattagttggataaaaacaatttttgtaaaggcaagattgagctctttagatactgacctgctatttccttcctaatatttgtctctgttgcttttctttaatttttgccaagtttctcatcttttgggatgaaaagctgtaatgctcaggccttttcattacctttatctagctccaacttgctgcagtgggcaatttggtatacccttcacacagagtattgcccttcacaaagaacaataaaaaatagcagctacaacatgttcagcattgattacacattcactttaaccctcataagaaccctaaaagcttggtggccaaacccatttttggatgaggaaaattggcttagagagttaagtgtcttggccaaagcacctcgctcataaatgacagaggtgggacagaggtccgggcctctgctccacctagcacaggaggctgtccctcagaattgcctgggcacatgtactgcatagctactcatcaccgtgtagctgcagtaatttgtcctctcacctgtagtcttttcatgggacgaatctcaccttttctgccaatctgccttttgctctcctagttacttttccttgctgtgcactcagttttgcctcaaagacatagtgattcaaccatcaggtcagagtttcttagagctcaacaggactgtaggggtctcttgggacttattcagaaatgccttattttgctttcaaaattttataataataattgctaacattagttgagtgctatcagtttgccagcattttgcccattttacagtatgaggagtctaaaactcatggctaataataagtttggggtctgagatctgatcacagcagattccaggatcccctgtccactgtgaacacctgggctgaacccccatgagtacagttgctgggcatcatgattttgcacactgtactgcatgttccacatttggcagtgaaggctgattaaaaatagctgggctaatgaacggtctcagactactgcttggggcggtctgtagggctggctctcatggctgtgccccagaactctaagccaaatattaaaaataataatctcttttttggcaggaaaaaaaagaagcaagacttttggtaatttcagattctaaacccctagaaaggataaggattttctacccctgtaggatattaataatgcttgctattatgataattctcaaagaggaattcaaaatttgttttggcaagaacagcattgtcagaaagcctcctaatcagacatgcatatttgaacgtatacattcaggctttgtttgggaaaataccaggaattattattttgcagtttgaaaactgaaattatcttgggtagttttatcaatatttgaagaaaaaatttgatataactgttcgaaatcccagcgaaaactccaagtttgagttccaggaaaggttcctggtgaggtgacacatatgtatatatacatatgcccccccaatccttcttattaatgtttaatatgtagaaatcatttatcttaaaaattcaaatatttactaattctgaaaaaatagatattaactttgtcacaagcttgtgattgtatcaaacagaaaccccatagttttaacaaggttgcagttttcgaaacatgatattttctctatttgcacaaactgagaaataaagactccctctgctggctacttcagtatttgcaattattctggcgagaagctatgaaaagtgaaaaaacaaaacaaaatgaagaaaaatagtctttttttgacactcaaaaagctaggtgctttgggatatatgtatgtatacatctaattatgttctagtgtttatttatctaatacttttatccaagatgtcatgtagaagcagcagcttaaagcagcctaaatactggacgaacagaatggtaagaatacagcatcaggtgggagccagaaatggggttctgtggctggctcagctggtgaccatttggaggtccttgagcaggtcaagactccagcttcagctttttcatttgtgaaatgggaggatttcagtggatgttctccaggaacccttctaacctttagtattttatgattctaaacagtatagattccatttcttttacaacactgtgctctatgcatgtctttcactgatgtaaaataaatatttagaaaaatgtaaactagtacaaccactatggaaaacagtatggagattcctttaataactaaaagtagaactaccatttgacccagcaatcccacttctgggtatctacccagaggaaaataagtcattatacgaaaagatacttgcacattcatgtttacagcagcacaatccacaatggcaaaatcgtgtaaccaacccaaatgcccatcagtcaacgagtgggtaaacaaactggtatatttatatgatggaatactactcagccataaagaggaatgcagtaatggcatttgtagcaacctggatgaaattggagactattattctaagtgaagtgactcgggaataaaaaatcaaacatcatatgttctcactaatatgtgagagctaagctatgaagatgcaaaggcataagaatgatacaatggacttcggggacttggggggaaagagggagcaggcaagggataaaagactacaaatggtgcagtatatgctgctcaggtgacgggtgcaccaaaatctcacaaatcaccactaaggaacttattcatgtaaccaaataccacctgtaccccaataactcatggaaaaataaaataaaataagaaaagtaaataaataaatatttagaaaaatgaaggaaaagtaaaattacaaaatgggtatacatcagttgttcccagtgtttgttactgcatgggaatgttaggatctagaaagtgatgttttgtacactattataagtttatgaaataatacccccaaatgtcctgggaaggttgaacatagcatattttattgattgtatggcactttaagttgtaagaagcatcattattttatatacttccaataaaactataacataccattaagggtaagttacatccaggtttcagagaagttaaatgtgaaaaaaatgtgcttttaaaaaatcaaggaaataaggtagttcctaaaagggcttcaattgatgccagacaactcaataattgcaataaagtctgatgtgtcttgggctctagcaaacagtatctttctccacctcacgttttccctctcttctaaacacttattccacctctgccctactacttgttcttctttctcactgtgtgaatcaatttttaactttttcacttagacatgtcttatggctgttctgggaataaactattgcttaaaaactgaaatgagatcctgaaataacattgtgtccaacataagcatggccagtggtattctgctttaaatatgaattagcattagcacttgcagaggttttcttgtttcaaagatgaattagccctggcatcttagcaggaattgcatgagtattaaaaacactgaaacttcagagaacacagctttgatgaaatcatcggaaactttagtgtgggatttgtgatttgaacctctttattattcatattggatttaggtcttaacatgtgtgtctgtgtgtgtgtgtctgtatgtgataacttaggatattttctaacttagttgttaatgtttgctttcttttataatgaaattggagcagtttcttttatctttttttctgccacataacagagccaactgaaagggcttgaatttctctttgtcaaattgaacccccacttgagttggagtccttctttctacctaataggaagaaaggaggcccaaagaatgagtactcttcatggctcttggcctgagacaaggagagcagaaaaggtaaataatagagtaggaggataaaggtgaatggaggggctttaaggagatgtcctgagcctcttcttgcctgcaggctttttttctcttggttggaaccctagatgcggcatgctgctgcagtgtcagtgccccaggctatctggtgtgacagtgctaacttcccttctgtgccaagtttagggcatttccagtagtgagaccactactctttagcctgttgctggatgggaaattaatgcatcataaaacatcatctgtggattttgaattcatatccaggactcctggaagctctctgtggatccccaggaacacaaattctctatttctgaatctctttagccaggcatgaccctataatttactgcagaaatgtaatatcatacaaatctataccagggctgggtttttacagagctggtgtggagatgatccatcttgcgaccttaatgataagagctatacctcaaagattgtgaaaggacagaaagagccttggtcaggggtgacttgatggaactgcctcaccaaatcctgagctgcctgccctggtttcaaatgtgagaaggaagtcaacctcaatctggctaacccattgtaggtaggaatgactttctgttattgtagctgaaccctttcctaagtgattaagtcatcatgtggatatttatcctgattctcttaccactttgtaatcatattcatgtaaaactgtcatttttattattaaataacatttaatttttaagaattatttctacgttgccaactttttaaaaagctacccatcacttgtgtatcttgaaaagcatttcctattgtggtggcccctggctagtttgcactgatggaaaccagtgtaccacagtaccgggtgaaggcaccccctcctcaggctgcctggcacccatgcttactccctgtcctcataacttagcccttctgctctccatttagtgtggtctggttattctttcctgagtattgttcactcctttcttcctcagtatgtttgctcatgtttgtcccacacaggtgttttcttaccttctttccttattctttcagaatcccagatatgaaatggctctcagcagtcacctaagccacctttgttcagtccataagtttcatgaaaatttgcctaaattttctctttggttcacatgtgtcttttctcccatagaggttttcaaactccgtgaggtgtcaacactaccattttggaattcactaatactgtctcatacaggggtgtacatgatggtttctttcatcactgaaggaatcgttttgactgtcgctgtgtgccccacattttgctcactgctggggatataaagaggagaaaacagtggtccctgatgtcatacatcgttcttatggtgaagggcaacacgtagtaattatagttgcacacttgcatgcttgcaacaaagggcctggacctaagctggagggtctttggaagcttcctcccagaaataatggtttatcctaagatatgagggagcagaaaaagtagagggtagggaaaccgtgttctaagcacaagcagtagcatgtgcaagggccctgtgttgagaaggagcatgactttttcaagaaacagaaaaaaatgtaggattggagtcagaggacaggattgtagggaataaagtgaaagggggtacaaggatgtggaataaacctgtttgtgtcaatccttgtaattctgatattggtgacagtatctgttttaagtaatgtcttataactaatttaacatgtactgttcatgctcaaggaaaatgtgtttttgactatccctcgcaagtggagaggattggaggcttttcttgcaacctgatttctcaaaactatatactgtttttctcttagtaaatatttgacagctagcaaaataatacaggatagcaataagaaagcagtggatattcttgagctgttagggtcttttggagcagtctttatttttaaaatgcaaaattttaaaaacacaattagagatttggaataagtaataatgactacattgcttcccattccttttctttcaagggaactactgagttgcttaattcaagatatctaaaaatgtctcttgttatcttaggacactgtgtttcttatttataagaatgtaaaaattcaggactactctgaccctgatataaaaatatttctcatgaaatattagtacattgcctatctattagtacattgcctatctattaaaaataataaagaaaaatattgaaacattataagctcttttataattttactgtggttagatgataaactttcaaagagctgtagaaataagcttagctttaggacacagttcagagcaaattcctgtgagccttgtttcttttatcttgtattaactatatgttaactatacatatataattaatagatacaatacataaattaatgaatttatatttctgtttaaaaattatatatgtctcatcatgctaaggtcatatttaaatatgatatttaaaataaatttaaaataaatataatatttaaattattttaaattgaagactaattaattaatagtaatttagttaggtttaactattgaatttaaaatttcctaaaatagaaactttgacacagaagataaccatagataactatgcccaaatatctttttctttcacttttgctcttttttttctttctcttgcttcatcttatggattcttactcattgttttatgtttaatccatgctcattattttacctgctgaatgatgatttctcttctctctattcttgaagaaacaaagaataagtggggcaaacctatggcataattaatgactttccagtcatggcagatccaaagccctcttctgctccgtgacattctcaaacgaccattgacaatgctgaattcatttcaaatattctagaatgaattcacattgaaaaggatctggctatcccatgccatcccattccttggagtcagcaaggaggaggagaaaggctgactgcttagcctttgctcacttttttccttagttatagctttccaaatatgttcttagaatttcaggtgatgcagagaaatactaagtatgctttgggagcaaggtgatacatactgacttgactttattttgtttatttatttttagaaatggcctttgactttcattttaaatattttgtcgcttttagtctagaggctttaaaaggcctcaagtttttttttctgaaaagttaccatttcttcttgtgctttaacattgttgcatctagtattctaaaaatgggttgtgttagtttttttaatctctttcctccacttactttttatgaagagcagtctaggggaggagttgatgtgtaaagtgtataaacatgccttgatagaatgtcagccaaaacagagatttgcttcacccacattccagcatatccctgcaagggctgcagtgactacgtattaaatttgcattgctaggtgccatgtgctcctagggcagtttttgaagctgtaaactactccaaaggccaaggttgttgtgattgtcaggattagagtgacacagaagggctttccaacacaggcagtgtgtacaatcttggccttctttggacgctctgtttatgctggtgggttgttatagataaacattatcagtgctatgtttcttttgctagtcaactttcaatcctttgatggaacaaaatttcttcctattcttctttagggtccaggaagaatttcttcctgttggcatccaatttcaaaagatcttgtaaataaattgatatgaataatatactcctcactctaaagcaagctatgaatttgggccactgcactggaaatgtataatatccttttattaaagaaatgtataatatccctttattaaatagcatgattatataatgtttaaatttttttttaccttttagtatgtataggaaatagaatactaatattttgcttcagtggttcttaagaacagctctgctatttgttttttacatgatcacaaaagtctttaacttagttttaacccatatagtcatgcagtttttgtgatgagttgaattcttcttaaataggaaggtttagtgtagtaattctttgggcaagaggcatattcaactctactagagagttaaggcttcagttgtcttttccttttatatatatatatattctttattgagtcagagtgttgctcttgttgcccaggctggagtgcagtggcgcgatcttggctcaccgcaacctccgcctcctgggttcaagcgattctcctgcctcagcctcctgagtagctgggattacagccactcctggctaatattgtatttttagtagagatggggtttctccatgttggtcaagctggtctcgaactcctgacctcaggtgatctgcccgccttggcctcccaaagtgctgggattacaggtgtgagccaccgcactggccctttcatttattttaaggaggaataaatagaaattaaatgagactttttaacaaaggcatcccattcatcgtataaggaattttgataattacagactatatctaagagatgacagagatttactgcgtggaatatcaacctaaatataattccgttattcatagatgaacgtgtattttggataagtgtgagcattaaataggatttttaaaaaataagggcttgaaatggatttcaaacaaaaatattaaatttttctctcagcaggttttattcattctaacaatgaaatatatgcacttattccagaaattcaagttggcctaagcccctctaaatttgtgcatctcaattcttgtcaacttatgtctaaatttgcagtgacatagtctgaagaaaatagtggcatatcctgattatttagtcactttctcattttatccaactttacctcttgctcttttctagcccttttttaaaaaaaattggtttagccttcagaatgtctctagtttttcattttcttagcttctctgaaataagagatagaacatgcaaaataagaggcatacttctgttaccccaggtgatgagagcttactgtaggaaaacatatgggggtagtcaggaggtgcagagaacattttcagcaacccctagatcattcttcaggccccccatttcttggcatggaatgtgcagcagggaacagaaacagtgatgttattgctgcatatgaaagagcagtcccagagttggttcctcttgttctctcaggagtggtcatcttcacatcatctttggcagaagcacccacgagtgtttagtccaggcagttgtaagcacagcagcatgcctcagaattccatcagttttctagtatagatgcacatactgaagatatatccttaagagcagtggcctaccaagatgcaaacatgagaaacactgagactccaaatagaccttgacatcatagggcatgacatgtattcaccaaaatttgaatgaagtgaaaattcagagagaatagcatctgattttgacagtgtgtttttatgacctttttcatatgacttagtatcagcctcaatgacttcaaaaactcagaactgccatattgagtcagttcctacctaggaatttgtatgatgagaaagtatttgtctcttactcattgagaatatttttaattttctgagcataaaaatgggaattaattatatactcaaaggcagaaaatacttttctattaaaatttgccattatatagagtacctaccatttacaatgcactgtgataggctttgtaagtggtacaaagttccctcgctccacatatctgtattaagtcatgtatcaccctggggtaggttcctgtgatacaatgataaattatgaataaagagagacttttcttaaaagagtttttgctaggagggtgatacagtttggatatttgtcctctccaaatctcatgttgaaatttgatcgccaatgttggaggtggagcttagcaggaggtgtttgggtcatggggacagattcctcatgaatgtcctggtgctatattcatgggattgagtgagttttcactcttagctcccaagagatctgtttgttaaaaagcatcttacaccgccctcccctccctcttgctttctctcttgccatgtgacacccctgctcccgctttgtcttctgacatgactgtaagcatcctgagctccttaccagaagcagatgccagcaccatccttcttttccagcctgcagaaccatgagccgaataaacctcttttctttataaattacccagcctcagatattccttaatatcagcacaaaacagtctaagacacatagctggggagaaagacatgcaaacaaaaagttacaaaatgagagcacataaaagaggcgcattatgaacccttggacagtcagggaaggctttctggagcaagtgtgattggaaccagggccaaatttaggtggaagtttgccagagaaagcatgttgtttgtgagcggagcactgaaatttcttccaggtagaaggaatcacacgtgcaactaagaaagaatggtttgcaagtgtttgtcttatttggtttgggtcacatagtgatctattccataggacactaatcctatttataggggccccacctgcataatgtaattacctcccaaaggccccacttccagatatcatcatctgggactagggattcaacatgtgaattttggagggtacaaacattcagtctattgcattatgacttactctgtgtgggccccatttgcccacagttgttcttttagtaacagtagcagctccagcctacattttcccaggcttaggtccagtagaaaaggaagtgtgtgccaaggttatgtgaacatatatctaaattggctctaactgcttctgattaagtcacatgctcatctgttaaataatcactgttgtctgggtactgattagtcaatatagaaaacatcttccaccctggagctgaggcgatggtgcactgataaactggctctaaaaataaaaattttaaaaagaccttatatgtaaaatttactggtttctatcatataaatacttccatcatggctgattttaagatgcctggcttttagagctcctgaatatttaataatcagctcttgcaagccagttccagcagctccagcaaactgtcactgagctgaaggtggagctaccagagcaccaagtctgctggtgagggagggagtggtactctaaaaggaaatgtatctatctatcagaagaggagtaggcgactggtagacaaagccaagtaattttgcacgtaccactgaagaatttttaagtgctcttatatcattttcttgaataacatttttagggaccatataatattccattctgtgaaaatactgtagtttgcatttttttttttattgttggatgtttaggtcaatagaatgacacataatgctttgctggacatgtaatgcctaaagccattttccatatttagttcagatgtttaaagtagtttgcttaagaaaaattgctgggtcaaaggaatagaccatttaatacttctggtaaatattctccaatagatgtacaaaatagttttaccactttatatcattgtaagagagagcaactatttcattgcactgtcattaagtataatttttaaaagataggacagaattgatatatcattttaatttataacattagctgctgtaatagataaatcctaattcacagtgagttaacagaatagaagtttatttcttgctcatgtcagagtcttatatgggttttcatagttaggcgtcttctatgtggttatttaggaacaaaggctcattctgtcttatggctttcctttcctctaggcctttgtagtcattctgttcagtgggagaatggcaaaaagcaatggaggacaatatgtaggagattttcatgggccaggaagtgtaacattctatatgcttacattccattgactaaaattcaattctttggccacaactaattgcaggggagaaaagagaaaggattgggtgaacatctggccaatttttactgaaatattcatacctgagatggagaaatcttttcataaagtctgattctattccctccttgtactacttgagtatatctgcaataaatcacccatgttactagggttatttacggaatttaaatatagaatatgaaattttattttattttattttattttattttattttattttattttattttattttattttattttattttatttttagatggagtctcactctgtcacctaggctggagtgcagtggcacgatcctggctcactgcaacctccgcctcccaggttcaagtgattcttgtgcctcagcctcccaagtagctggaattacaggcatgtaccaccatgcccagctaattttttatatttttagtggagatggggttttgccatgttggccaggctggtcttgaactcctgacctcatgtgatccgcctgcctaaacctcccaaagtgctgagattacagatgtgagccactgtgcccagctataatattgataagagatacatagctttttcatagaccaaagtggtggggaagtaatactaaatagttattgaatgacctttagtttagacactgaagagaatgaaagttgtcggacaaagtagctttggcacataaacaagtcttggatagataacattcattcagtgtataagaaaattaaatgtagaagacactgtataaggaattataactgattaatctttgctgacttaccagaatgatattttaataaaatattttaataaaaaggctacctgtggattgggaaaaagtatttgcaaaccacatgtaattataagggttaatatccaaaatttataaataactcatacaactcaatatcagaaaaacaattaacccaattaaaaatgagcgaaggactgggtgtggtggttcatacctgtaaccctagcactttgggagggtgaggaaggcagatcacctgaggtcagagttcgagaccagcctgactaacgtggcgaaagcccgtctctactaaaaaaaaatacaaaattagctgggtgtggtggcgcatgcctgtaatcccagctactcaggaggctgagagaggagaatcatttgaacctgggaggtggaggctacagtgagccgaaatcgcaccattgcactccagcctgtgcaacatgagtgaaagaatgaaactccttcaaaaaaaataaaaaaagcaaagggcctgaatagacataaaaatggctaacaggtatatgaaaaggtggtcaacatcaccaatcatcaggtaaatgcaaatcaaaaccactatgagatattacctcatacccattaggatggctgttatcaaaaagacaagagataacaagtattggtgaaagtgtagaaaaaagggaatgctagtacactgttggtgagaatgtggattgatacggtcattctgaaaaacagtatggatatttgtaaagaaattaaaaatagaactgccatatatgacccagcaatccctctcttggatatatacccaaaggagtttaagtcagcatgtcacagagatgcctgcactcccatgttcattgcagcattatttacaatagctaagatatggaaacaacttaagtaccatgtcccactgatgggtgtatattggagcatatatacataatttattttatatttgcattacacacacacacacacatacagatacacacaatgaaatactattcagccttaaaaaataatatgctgccatttgctacaacatggatgaacccagaggacattaagcttagtgaaataagtccttctttcttttctaacagaaggaaaaatattgcatgatctcagatgtgctgtctaaaaataagtcaaatatgcagagatagagaacaaaacagtggttaccaaggacagtggtggggtggagggaaatgaggagatgtagatcaaggatacaaagtagcagatgtgtgggatgaacacatctagagctctaatgcacaacatgagaactatggttcataatagtgtattgaatttggaattttgagaaatgagtagattttagctgcctttgccacacttgcaagaaaatgggtagctatgtgaggtgatagacatgttaatttgttttactatataaccattttgctatttatttatatatatctcataatatcgtgttgtatactttaaatatatacaataaaatttattaaaaacacaaacaggaatattttaggtctttttcttgtttctacctacacaggtgattaaagtatacagtgaagatgaaaccagcagggctttagatgtacccagtgacataacggctcgagatgtttgtcagctgttgatcctgaagaatcattacattgatgaccacagctggaccctttttgagcacctgcctcacataggtgtaggtaaggatacggagttattgtctcacatcattgcttttctatttcttgttcagctccctcttgaacaccaataattcttagatttggtgttttgagataattttctatatcttgtaggtgatcccagttccttttcattcttttttctttttttccttctgatcatgtattttcagatagccaactcattgatgttttcctctgcttgatccattctgctgttgagagcctctaatgaatttttcagttcagaaaatgtagttctcaggttcacaatttgttgtattttttaaaaaattcaatctcattgttaaatttatcttataaatatctgaattgattttatcagtttcatcctggcagtcactgaatttccttaaaggtgctattttaaattcttggtcagagctcacatatcgctgtcttgctggggtcactaactggttccttgtgtctgtttagagagatcaaggttccctgttcgctgttgtttttgtggatgtgtgtctgtatcttggcactgaaggattagttatttattcgagccttctttacctggcttcttttgttctttattggatatattccttagaggtttttgcccataggtcattgccttctttttggctctaggtggtgccttaaacctaggttcgccttggctctagtgaaggtcagagcactgcactttccaaatgggagaggttcccaaaggggatatcccaacagtttgggacagctggctagggacccatggccaggggacctgtgggatgaacctcctatcgtgtggtgctgctgaacagccactctgatttggtgtctcctttggctgggttgcagagcagagtttctggggctgggaatggttgtcctgcccccttttatgtctctgcctgtcctcagggatatttctcccatcaggcaatcacgatgcttcctatgattaagacagaggcagatcttctgccagggaacccaagatggggtaagaggttgtctaccttaatctcactttttctggtgtaaacacagtgagttgggggaaagtttttcacaagcttgtgggaggggcatcgtggtggatatggaagtttgattctcttaccatctggagcttttctttactttcctgtcgcccgtggaactgcctcatcttcatatttgagttctgggatacttctggggaaaatctcagtgctatttatttggttttggttttctgttggggagagtgaagccagtggcttctttgccattatttttcaggaagtcctgcttttctgtttattttagtatagatcctatggtgaagattttcttccgaggtacaaaaatagaaaagaattatgaataatcatttctttattcttttattttttgttatttgtagtcacaagagaaagaaagtagcgcaaagtagaaacaagcctagaaatttttataatttacccacccctcttcatttaaagatctatgggaattttagacctaaaacagctcaaattgatggaagaatacatttcataataattttattagcacaatgcaaagtgtttgatttatttaaaaaagtaagctgtcatttggaccacattttgagtcaattgtagcacagacaggtacaaatatccatagcagtggttctctttatggtagtgtagaccctaaatttttcttgaagaaataagtaagtccttcacatttttaagacataaacacaaggagtagcctcttaaaatgttttatttggaaatgcatctctattgtgaagtgtgaagggcttaaaaatattcttttagtatgttctaaagaattcgttctactagagtgagacaggatttggcaacaattttgtcccctgatttcttatttttatagatttgttttcaaaacatgtttacatataagtagataagacaggaaggagttcgttatggcagtgtcattcgattctttgaactccttattagtttcctgtggttgctgttccaaattaccacaaactcgtcttaaagcaacagaaatttattctcacattttggaggccagaagactgaaatccatatcactggagtgaaatcaaggtgtcgtcagggatgtgtgtcctctggaagctctaatttcttgcctcttccagctctggtggctgccagcatttgttggcttgtggctgcatcacctaatctctgccactgtggtcatattgctttctgctcttctgtctgtgtcaagtctccctctttcttataaaagcggtaacatttcgggcccacccagataattcaggataatctccatttcaagatccttaatttaatactgtctgcaaaattttttttccacgtgacattcacaggttctaggaattaagatgtggttatctttcgggggctatagttcagcctgccacaaacttcattgcattatatgtttaacaacttttagtaagaaatcatcaaaatcattttaaataatttatcagtgacagctccattagttgcttcaatttgttcagacttgtgaaagaattttatacatagtcattagagtcatttactttctagcatagctgccaatatacaaaatcgtccctttgtttgatgcattcaagagtttatgcctcagagcaatgtgccaatgaaaggttctgttcaaatgaacatcctttctcttatgaaatggaattaaaaatgattttggcagaaaaggtgtgttcttagaaggattcattttttaaagatttgggaagtggtttttttgaacactacatgcattccctgaaccatttagaaaatgtttgtacttctgatttgacaactggtgtcctaggacatgtcagaacctcgtgaaggggatagagtaaggcctgtggagaggaagctagaattgttccacggtatcctcagctgatagctgatgagctacaatagtgcaactgactttgacagctcagcctagatagttatcaacctgccaaggacgcttgcttctaaaggtatgtcatactggccaatatgacttgttgcctcatcttctaggacagaagaggctcaacatatattttcttcattgccacttgtgactagtttaacttctatacatgataattaatctcctagaagtatggtgttaattctcaatagatatctgccctattccaagctatttcatttagctcctaattagcataatatattattacagtattttatattcttaaatttttctttcggggggacttaaatttttttttgttatagtcactaccatttatctctaacaaatagctttgcagttcagtaataaaaatctgctctgtaaatcaagaagtgtttttccctgagaacactgcaaattatttgtattaaggaataaaacacacaggtcttttaatgcaaaagctgaaagtggaacactgggaattaatttgatccacatactaaatttaaacttttaggcatcaagtagcaatagaagtttatttctttattactgtattttctggaaactgctgaaataaaatcaaagatatgagcatattctcatgacttcatcaaccatgcattagaccaaagctcataagaaagaattttatttccagagccttcttgtgtttttgttttcctttggtttttcactcagattatatgtttaaacagaacaattgaaaacattaatgctaccccaaaactaacatgtattagatttaatagcttccagttctttaccgatgtaagaggagagtaatcactattgaggtactgtcatcttcctcagcacaaaatataaacagttttgtctttaaaatgttttttgttttagttttgcctttttgcttagtttattataatcttgcaatatctattcagtctaattgtggtaggaagtaaaatgttcaatttaatttgcatatttaaatgaatggaaagaactacagtggtttttttctccttaaatgtgatatgcagctacagatactctttgttaacagaataaaccgctgacatctttactgcaagtcttctgtgagtgctactgatgtaaagaaccaaaggatgaactattttccagaactttagtgatcagctagtcggctctgcatattgtttaagaaccattcttgcactctttttgtccaaaatgatgaattttcaataaataaaattatatttggttttctgttcctgtgttaacttgcttaggataatgcccttattgaatagggagtccagcatccatgatggctgtaggagtgtggctttatttctttttatgcaggacatgatttcattcttttttttatggcttcatagtattccatgatttatatgtaccacttttttttttttcttttctgagacagagtcttggtctgtctcccatgctggagtgcagtggcgcgatcttagctcactgcaacctccgtctcccgggctcaagctattcttgtgcatcagccttcagagtagctgggattacaggcacatggcaccacagccagctattttttttttaattttatttttagtagagatggggtttcaccatgttggccaggcttgaattcaactcctgaggtcaggtgatccacccaccttgacctcccaaagtgctaggattacaggtgtgagccaccatgcctggcctatatgtactgcattttctttatccagtccactgttagtgattctgtgtctttgctattgtgaatagtgctgcaatgaatgtaagagtgcaggtgtctttttatttattttggatgtatgcccagtaatgggattgccgggttggatgatagttcttttttaaattttttgagaaatctccaaactactttccacagtggctgaactaatttacattccaccagcagtgtataagcattcccttttctctgcagccttgccaatatctgctgttttttttacttttgatgatagccattctgactgatgggagatggtatctcattgtggttttgatttgcattcctctgatgattagtgatgtggaggaatttttcatgtttgttggctacttgtatgtcttctttcaagaagtgttgattcgtgtccttcaccactttataatggggttgttttttgtttgttgaattaggttcattatagattctagatattagacctttgttggatgcatagtttgcaaatattttctcccattctgtaggttgtctgtttaatctgttgatagtttcctttgctgttcagaagctctttagtttaattaggttccacttgtctatttttgtttttgttgcaattgcttttgaggacatagtcataaattcttcctcaaggctgttgtccagaatggtgtttcctaggttttaatcttttaaatctttaatccgtcctgagctaatttttgtatgtggtgcaaggtaggggtccactttcattcttctgtatttggctagccagttttcccaataccatttattgaatagggagtcccctcctcattgattatttttgtcaactttgtcaaagctcagatggctgtaggagtatggctttatttctgggttctctgttgtgttccattggtcaatatgtctgtttttgtacaagtatcatgctgttttgattactgtaggattataatatggtttgaagtggggtaatgtgacccctccagctttgtttctttgctcaggattactttgactacttggtctctttttgggttccgtattaagtgggagctaaacattggatactcatggacatagagatggcaacaatagacactgggggctactaggggaggaagaggtgggaggaagggttgaaaaactaactgtcgagtactgtgctcactttctgggtgacgggtgcgattgtatccagacctcagcatcacacagtatacccatgttaaaaacttgcatatatatatatgtgtgtgtgtttcttgaattgaaataaaagttgaaattataaaaaataaataaatagaattgtaaagggaagggcatagtatctatttatttaaatttaaattatttatttaattttttttagagatagggtctcttttgcctgaggtggagtgcagtggtggagtcatggctcactgcagcctcagattcctggactcaaacaatcctccagcctcagcctctgttattattattattatttattattattattttttggagacggagtttcactcttgacacccaggctggagtgcaatggcgcaatcttggctcactgcacccttcgcctcccaagttcaagtgattctcctgcctcagcctcccaagtagctgagattacaggcacccaccaccacgcccagctaatttttgtattttttaaactagagtcagggtttcaccatgctggccaggctggtctcgaactcctgacctaaggtgaaccaccccacctcggcctcccaaagtgctgggattacaggcgagagccaccacgactggcctattattttaaaaaatattttaaatacaaaaataatctatctcattgtaaatacctcaaaaatcatgaagtaaacaaaattattcataatttcaagaccgagataactaatgttaacattttttaaaactctttaatcagtttctctactttaacatagttgctatatgtattaactcttatagactaccttctttttcttttttcttttgtgcacttaaaatatatcttgagtatttgtagttttttacttgtcattttacagattccacaaaaatcagtaactcctcttgccttctctggctgcgttacccaaacagtttagcaaatatttattgacaattttgtaccaagcctatattttgctgtagattctggggatgcagtatgagcaaaacagacaaaaagtattgcccttgtgagtttgcattttcactgggagagagacaggaaacaaggcctaatatttgttatcccgtagaggatgataagctctggggagggaaagcaggaggaaagagggagagtgagtgctagagcagaagggagatgtgctttattttttatttatttatttagagaccgagtctcactctgctccccaggctggagtgcagaggtgtaatctcagctcactgcaacctccaccccccaggttcaagtgattctcctgcttcagcctcccaagtagctgggattacaggagcctgacaccacacccagctaatttttgtatttttagtagagacagggtttcactatcttggccaggctggtcttgaactcctgacctcatgatccacccgcctcggactcccaaagtgctgggattacaggtgtgagccaccacaaccagctgggagatgcactttaaagaggcatcagagaaagcctccctgacggagtgatgtttgagtagagaaatgaagcacgtagcaggcaggctgtgcaattaagtggaagattgttctagacagagggaacagcaagtggaaaggcctggacgtggcagtgtgcttgtgttcaggaagcagcctaggggccattgcacctggagtggagtcaataaggtggaaggtaatgggagaggacatcacagagttgccccaggaccagatcgtgtagggtctcataggccaagaagtgggcctggcatttacactgagtgagagaaaaagcaaggggaggtctttgagtcagagaagaatatgatgtgatttagttttaaaagtatactactaaggagaccagaatgcaagatttgaccttttattttgcttttccatcagactacctgtggctccctggaatgatccccacctatctgtcatttctactagctgtacatgcagccattgtaccatcttcacacgtggtctgtttatgagatttagtgtttgtgagatcctgaggcctcataggtaaggatattttgacttataggatagatgagagttgagggttttctgcactttagctcacttttagtgaccaagataagcttaggccagtttcagagacattccgagttgtgaatacatatgctactatcgttgcttctcatctgtctaaaccatatcacaagctactaaaagcagaagggggaatacttgaaattcaaaatgtggtaagttcctgaacctgaagtctaatttcagagttaaattttctgtggcaaaggaaacttcaatcttattagtattttttttttccgagatggagtcgccgtctgtcgcccagggtggagtacagtatgtgatactggctcactgcctcctccgcctcccagctgcaagtgattcttgcgcctcagactcctgagtagctgggatttcaggcgtgcaccatcacgcctggctaatttttgtatttttagtagagatggggtttcactatgttggctaggctggtcttgaactcctgacctcaagtgatccatctgccttggcctcccaaagtgctgggattacaggcgtgagccaccacgcccgaccgttattagtatttttaatataaatgcatatgtgtgatagctactactagtgtgcatagagtatgtattttaatatccatttacatgcaggaatacaaagatctagattccattagattctgtaatctgcattttccactgaagcaagttggtttcttcccaccacaatatttcaagcaaatgttcctgagattctgcggtcggtttgcctctgtctcactctacatctctctcaggaatgctataatttaaattgcaaaccaccaggaaaactttcgtataaacgttcctaacccaggtggtaatgaaattactgagattgaactgagccaacccagttcaccttatagcagagccagatatttattttggctgagcgagagagaatcatgctaaaagttacctgtttttgaatttgtacaaaacatgaattgtataataatactatgtttggaactttgaatgcaatgtccatgtttcatatcctctacctgtaattattaatatatggctgctgagaattttaataggcagagtcagtcatggaagacaactaaatatcttgattttgttatgaatctctgaatggcctgattttggatcatattattatatggttctacttgtacacacactttgacagacattgaatttaaaatgtcagcacatcaacaaatatttctcctttcatgatgtagtaaaccaggttttgcaactggtgtggtttgcttcacagccactggatgtcactatagttccccagatagaatcctctgtgctgttataatcaatgtaagagtagggtgggggaaaaactttagcttcaagtcctctgaaacttaatgggatccatgtttgtcttgctcccattctgattcctaattgaagccatggtatgaagcagtggcaattaacacaatacctcaagcgcatacctacagactcctcgggaagaggaattaattgtattttagtatcattgctagggacagctgagatttccattgtgaatatcattgtggagtggctttaataagcaaaatgaatgactggaggcttttaatgaaaccattttaatgtgtgcagctatgcccacgtgatcgccttaagacagaagcgatgcacagtgacagtgagggaatggttcacagcctcctgcttggaagctgctccttcgctcttttttttttttaacaaaggaagtacaagtgtttttcctcttctggagctgacatgtagttggacttcctgtgcagtttataacataccagccatcagagttgtgaccaccctcatcacagcagaaatcattgtgaagcctttgggacatgtggcactgtgcttccttccataaagagaaccatgtgccctgaccctctgggctttcaggagacatggtgtcctggtggcacgcacagaccggaaatgggcaatatgtaactagcaaagatagtaagtgcccacaactaaatctgcttctgattcagctgattttttcttctacatattcttatagcctcggctacatgaattcaggtccgagcatctctcccctcaggtattatgttagcctcacaactggtcctcctgcctctggtagtaccaacattatccatctgaatgcagacctgattctttttgcatttggatccaaggtcctctgtggggcttgtagcatcttgtgacctgtctgcccttcatagctgcagtcttaatgtctcacccctccctccttttagtttatacattagagaactgcctgcagatgcctgcatatactacagtttctactcagttttcttgtttgtgatgttaagagtcacaggaaaccccttcctgtccatctttacttggctaactgctatgtatcttccagggcttagttattttagttaaaaatgtcaggaaagtaaaaccccagccttttcttaaaaatacttatggcaataaagatgaaaactctgagctgtccaagctgactgataggtaacgtagtgccactgtccagggagagtggagagagaaaagcagttggaggcatcccatgctcagccttgtgaagtagaatcaccctttccatctatctgacagcaggccgggagacacacctgcctcttacacttgcctgactgcatggcgcaaactgctgctgctgctccagggctgttccttgagatgatcaggatgcttgctgccaccgtccgtactcatacaccccttgggcaattgcaaatcctgaaaacagcagagagctgcaggaggcactaagagtgttagtgatgaattgtgtcctgggaggtgatgcttccacaggacatactatataggtgggtgtgagaaacaagccgtgtggacaagatttagatacaaggttgttcaaagtagattgtttataatatcaattaactagacaagtaaaacctcagtataaaaggagaatgttataaattatagtacatccataggttgtaatgttatgcagcttttgatcatgcttttattcttcctttgaagactgatgtgggtaaatgtaaggttgtggtgacgattgaataaaatcagtgcataaacatatgatgttttctaatattataaaaagtatatacacatacactcatatagagcaagagaaaacgacaagaaaggaatatactgaaaggttaggtgcttattcctgattgacaggtttaaagatgtattgtgattgtaagttatctgtatttgtaaaatttcctttaatggaatgtattattttaataatcagaaaaaagaaataaacacaattttaaaaacttttaaagagatttttaaagccttagctcagacatctttctgaagccccaagttggacaaaatacacatcttctttgctgctgtaacagtttctacaactatcttaacagtgatcaaattattaaaattagacagtaattccatggagctgggactctctgtacactgcatctttgtaacccagggtctaagacaaataaatgtgtttggaactaagtcatactaaactgtaaggcatttatatcaaaaaattaaaaggatggattacaaagtacatagaaggaataggcttggaaaagaagccaaagaaatcacatgctgtgctcagatagaatttactcttgagtcctcaaagaatgctgtgagaaccttcgaattaatggaagctgtctgtaagctcttcagatatttacccagtcaactcgagatcatatatatgcaggcatttttgtggaaaaataaggctgcctctgaatataagttccaatggttgggtcggagttaattggagactatttcccctcgcagaagaatgaactgcagggctttatagccatcaagctgaagtgtcacaattttcctattattgcacttggggagttgaatgtgtctgatggcaattttctgagggatcctgctggtattaagtagtattcttaggttaaggaaccttttagaaattgagctgtgttttattctttgcttctccagtttttgttttgcttggccagaggctgttcatttttatctgaaaataagattgacaaaatgtatgtagtttctacccagcatagagaagtacaaggaccatttgtctcctggagtttcctgtaaaaaaggtattcaaaaaattgttttctgagcgaattagaggtaaaagccacttttgtttcttctcttatcaagtgagagaagagtagggactcaggtttctatttgagctccacgctgtacttggcagtagattcagcaaagaaatccaggcagaaggtcacaggtgagcactctccattcttggaggattgaggtttttaaaaagactttgatgttaaatcaacagtttcagaagaaacttcttgctttcttcttcttttttcttttctttttctttttttaaagaaagagtttctgaaaattcaaaaacagaattacatgtagttatcattatttggtaatatttctttttattaccataagacctcactgacctattagaaacaaaaaacacaacttaaggcaataggaaatttttgtttttgttttgaaaaagcctttaaaatgcttttgaagcttttctttttccatcttcttgattgctatgttgaagtaatttaagagggcttccctcctatttttctacctacatatgagtggtagttgacaattgtaatttactttccaatgcccgaaaaataacgtcagaaagttttattttaaatagacttgtatctgtgaagttttaataacatgttttattatagtattttagatggattttataaagttttaaaaataaagtctaaaataataattttgaattcatgtgattcctacctgtggtcacttctcaaatggtaattcaaaaagtacctgagttcattctgggttttgaacatagcagcaaagagcccctagttgtagaattcatattgttcctttttgatatttgaaataaatgataaataacttagtaggattacttacttggttaaaatttgcttggtaggagaaaggtccaagaaagtttattaaaggccttttgttttagtgttttgttttgttttcccttttcttaggtcttggtgatggtgttttttggctagaccaaggcaagagaaagttggtcttcagcaacatttcacctccttttgcagcgtttttattttcttctcaaagtagtccatctagtcatcttgtatattcctgttgaattttctgtctactagggcctgtatttagtcagatatctgcattgaaaaaagaaatgctaattttatgtgagatgtgattaactgatattcaattatgcctcccagggttatttggattattgtaacattaatcctttaacataatgagattggttgggggaaggtacaattcatgcaaattgggatggtgatatataaatttaaaaagaatatgtaatataatttctaaaaatcagtttctacaataagaaaattatatcttcattaccaggctagtatataaggtaaaaaactatagctgcattcaatccacttgacttttattagcttccttaatatgttatctgaatttttgatagaatagtactagaaatcttttttcgaaggaatggaatgtatgtctttggctttctcacatactctatttcttgatggctttttaaaagatgtatttttcttaagattaccagattattttcctagtgctagtaattgcagtatgtaaatactcagttttatagttctgtgacattttctgcaaatcttttatcctttattttattttttcaagattggtattctggtttttatttgcatgtagtcaacaaaacccctgactagattccacttcttggtaaccatacacattacgctagttcttttttatattcagactcctgagtagctgggattatgggcatgagccaccgaacctgcttagttctttagttacacatttgtcatagctgttcaaatgtagtttgatttttcaaccttttttgttttattttcttttttgatgcagtccaaattcaaatgatttgtactttgaagattgacataatttgaaatcttgcccattactgttttgtcccttacacttaaaatgtgatttactttcagttaattagcaaatatttattgaatacctttcaaaataaaagaattggggccgggcgcggtggctcacgcctgtaatcccagcactttgggaggccgaggcgggcggatcacgaggtcaagagatcaagaccatggtgaaaccccgtctctactaaaaataggaaaaattagccgggcgcagtggcgggtgcctgtagtcccagctactcgggaggctgaggcaggagaatggcgtgaacccgggaggcggagcttgcagtgagccgagattgcgccactgcactccaccatgggcgacagagcaagactccatctcaaaaaaaaaaaaaaaaaaaaaaaaaagaattggaaacaactaaggtagagaacggcaggagcatgaaagagcaattttagttgatatagacagaatgtgcaggatgtaaatagatccagcagaggcgctagggaatgtcccttgggtgagaacttccatgaagttgaagcaatgtgtgcagggaaaagaacatcaacttgggctcagacatgtggttgtcattcaacctgggcacttgggacctacaagagggggcacttgggacctacaccatccaattaccatccagctccctcacagtctccactccaccagtttccttcaataactctttaactctgcctcgtttcccagagggcagagggtgggtccatatacatggctattctgaacctctgtttctatctgtaaaatggaactataacttgcttattacattattatattgatttcctaaggcttatgtaacaaattacaaatttggtggcttaaaaaatagaaatgtattctttcacagttctggagagtcacattctttccaagaaccttagggagattccaccccttgcccgttaacagcttctcttggctactagcattccttggcttgtgatgatttcacttgaacctctgcttccctgatcacattgcttttcctcttctgtctgtgttaaatcacctgcctctgtcttaaaaggatatatgtgattggatttaggtcctaccttaatccaggatattccccccatttcaacatccttaatttaatgacatctgcagaggctttaccacataaggcaacatttacaggttctagagattaggacctgatatctttagggccattatttagcttactataggtattataagaattaaatacaataatgaaacagctgtcagactcagacatgcagaaattactgtattttgaattagtttctgatactgagtaacctggcttaagaacagacaggttattcttctattatttgtttgttctctggattgttcttagtctttttggggaaaataatcaatgcagtttttatcaatgagttccatacacgtttgaaatgtgttcagttgaaggtttagacctaccttcactcctccagcactctgttgggacatgtaaatccccagagggatatctgtctaacttttatccaactgttgtcttcatgttgtagaaactcctgctttttaagcttattgcttatatcatgatgacccttaggttcatggtcttcctttagtccttccacatttcttctcaggaatgtggcactacaatactcttgccccgtactgggatgctgtggacttgacattgtacttagctattgcttctctgtcatgcttggtgaagggcttctatttaagggcagggtatagactttcctaagtctatgctctgatttgagccacataccactgttaaacctatccggagtcttacaactcatagagggttctgttcaggaaggaggcaggatatggggtcacttgggacctacaccatccagttaccatctagttccctcacagtctccatccactccaccagtttccttcaataaccctttaactctgcctcctttctcagagggcagagggtgggtccccacaagtgacaatggaggattgactaggcatgcttcttcctaaataattatatttgtcaaaaattgataaagtctactgtgacactcaaaaaaacaacaaaatgcctctttgctattttttcctttctttatagtgtagtatgagggcagaattcatactattttcttagaggtagaggaaggtaatgggtccaaggaaacacaggttggcaaagcaaacaaacaaacaagcatctttgttgatatcttgaaattgtctcccactgcagttgcaaagaatacagataccgtgcttagcacatagtgcatttaataatgtgtacctgtgtttcataatcttgaaaataccagctgagtttgtgtgaaaagtaaacagaagtaaggacagatttttaaggatgcaacttcccccttggtagctcagtgatcactggatgtccctccagtttgtcttgcagtttttctagcttattactggtaacacatccttccaagtgctaaggctgagaaccttgatgtcttcctcaagtactttctttttcactccatatccaatttgtcagtgaattctgttgtccctaccttcaaaatacatcaagattctgtgtattttttttaaccacatcaactgctaccatgctaatgtaagctgcatcatctctcctggggttagttccaatagcctaccaaatggtctttgtgctttcagccttttaaaatcagttttctgctccacagtgtgatcctattgaaacttgttagttcatgttattcctgtgttcaaaatgacttcccatctaacacagaggaaaagcctagcccttactatagactgcagggctttctacaacccactatctcatccccattatttccttaacttcttctcctgggataaccccttttccttgttcagcattagccacactaacctcctggctgtatttcaaacataccagcctttctctcacctcaagggtttttttttcttgcttctcctctctatctgcttggctcctgtcctcttctcctttaggtctctgtttaaacattaccttctcaatgaggccttcttgataagctgatggaaatggattcctatcccctgtcctcagcactttctctctcttcgctgctctatttttccctgtaaggtttatcaccactattatggtttaaatatatgcccctccaaatttcatgttgaaatgtgatccccagtgttggaggtgggcctagtgggaggtgtttgggtcatgagggcaggtctcttgtgaatgacttggtgccatccttgtggtaatgagtgaattctcactctatttgttcacacaaaagctggttgttcaaaaaagcctggcatgtctattgctgtctcttgccgtgtgacacgcctgctccccctttaccttcctgcatgattgtaagcttcctgagacctcaccagaagcaggtgctgctaccatgcttcctgtatagccatgagccaaataaacccctttcctatataaattacccaacctcaggtatttcttgacagcaacaaaaaatggattaagaccactactttttatgattcacattttatttattgtccatgtattcccattagaatgaaagcttcatgagggcagttattttgttactgtcttctccactacaaaatttttagccctaagatgagtttttgacatactgtgaaccttcaacaaatatttgttgaatggatgaacaaatgactaagttataactaactgccagactatatgcatttatctataacaggcagaagcagacaagctttttgggcagggttcacattcatacacatgttttaggaggtttgctatgctatcggtgtccacgttggattagaagaatgagaaagtagaggcttgaagattagttaggctgaacaacaaaaggcaaaggtctaaattgaaatggtgacagtgggacctggtgtgggggttgtttgttgtgtaagagacactcagagaaagaatccctgctatctgagaatttcaggagtagaagatattggagcagacgtagagaaagttgcaaaggtgagttgtagtctactttttttgacggaatgtggtaaaaatgacagtaatggagacgggataatttaggaagaaaaagtcatttgaaagggaaaaatgtagatgactttgtttcgtttttaagtttaaaaagttttttggtaccatttgaaattttgtatgtgtacagttcagtggcgttatatgaattcacattgttgtgcaaccatcacgactggccatcaatctctgaaatattttaattttctcatactgaaactctgcatcaattaaacaacaaccctttattccctactccctcctacccctggcagccaccattctactttctatctctatgaatttgactattctaggtaccttgtataagtggaatcatacagcatttgttcttttgtatttgtcttatttcacttagcaaaatagcttcaaggttcatctatgttgtagcatgtgtcagaattacattcctttttaaagctgaatattccattgtaggtactgcgtataccacatttgttatctattcattgttcatggacatggacattaggtttccaccttttggctattgtgaatgatgttgctatgaacattggtatacaaatttctgtttgagtccctgctttcgcttcttttgagtaaacagccagaagtgaaattgctgatcctatggtaattttatgtgtaatattttgactttggttttagacatactgtatttgaggtggtgcacagtatagtagttaggacaggagcatgggtgagaacaattatagccagagatttcacttcagaaaacctgacaaattagatggttgaagaggtgagaatggattaatttatagggggagaaagaaaagagttgaaccaagattgtaggaggagaaggagctagtggagccagtcgatgggatagaaaaggagcaatcagagttaggaatagaaccccaagtgttgatatatacttagctcaaactcatccatattcattgaacactcttaactgaacttcttttttggatgaataaatgtctatttaagaatgatattactttcaagagtttgggtgttgtaggtcacaaatcactactgaatgttgaatttctgagacataaatgctttttaaaaacatcctagaaacagtaaaacagcagagagtttccatattccttatttggttgttctccatttcctattttgcattggtaatttccagtttcttttcttttctccaccttttattgaagtatggcatacattaagaaaagtgtacaaaccaagtgtgcacaactcaatggactctcagatattacatatactggagtaaccaaccccaagatcaagaaacagtattgtactcaccccagtgattccgttcatgcccccacttacttaatgtctccaaaaccctttctagcactgtagattaattttgctgttttgaaccttatgtaagtagaatcatgcagtatatactatctgtgtctggattctttaattaaatattgtgttcatgaaatgcagtatttatccatactgttgtgggttgttgtagtatattttcactgtgtgcttttacacaatttacttgttcattctcatgtcagtgggcatttgggtagtttcaagtttggggctattatgaataatactactgtcaacatcctcacagtttcttataaaaataggaatttcgcatgttatagtcacctctttaaaactgcctttgcttacttcatttaagtgccttttctgccaagtgccttcccacccacttaattatcttcattgttaatacaaaatatattttccttggtattagctttgaaagtataaagtgccccaaggaattgggcttcttaaaaaaaacctgtatcttcttgtattaaaattttcctttaaagcatttattttaattcttctcagctatccagattagtctggacagtcttaaatgcacatgaacctgtcaaaattcttcatctcttaatgaggtgaattgtccaaccttgaaataaatactttagttttggcaccatgatgagtcagagaaaaaaatagttcccatatacttaatgcagatgtgttatcaaacttatattatttacacagtaataaaaggaaattgagataacaaaaagtacattatgatattttatacatttttttctttctagacaacagtctgctttggtataaaaatgaacattagtaattgaaaattgatgacaaattttatcaatctggctatctcataattaagttgaaatctgctatgtttaacaaagatgcgtaatacattttatatgtttgtatgtgtctgtgtgtgtatatatatatatatatatatatatatatatatatatatatatatttgtctatctgtcaacatactcattgaaacattctttacagaaagaacaatagaagaccacgaactggtgattgaagtgctatccaactgggggatagaagaagaaaacaaactatactttagaaaaaattatgccaaatatgagttctttaaaaacccaatggtaagtgaaatccctcctaatagttacggaaaataaatgaacccgttaaattttatgtgaagaagatagtcactgtaaataaaatacagtcctattcggtaaattgtagatgaagactctggtcctttgaaattatacccatatttcttatgctaacaatgattagtgaacattatacacagaagttcagatacacaggtgcaaaactttttaaagccgtattggtaaagtctgaattgagatgaatttggtttatttaatttaaaagtattaggaaacctagttttgccttttgtgaaaaggtaacaattatacatttgatgtgggaaatgaatttctataggttctcacccagattaggaacaagtgttaagcaaaatattatatcttaacactttctatagaatttaggaaatttaaatagctttctaaagtaaaagcagactaatgattgttgagagtattataacttagccagaaattaagattgacatgaatcttgctattccaaattattttgttttcggtgcagtaatttttgaactaagtagaaatgagataaagaccagtgcattatctagtaaatactactttcattgtagttctctttaaaagaaaataaatgtgtgtcacattctaatgaagactagggatctagaaaagtcagaatagcctctgggctcattattttaaattgtttttgtctctgcagctgaagcatatttttacactaagttttggatgataattggattgaaatgattctttatgaaaaatatatgatacacaccataatagaatattttcaaaccctgaaagacctctcacgttgtcttttatcttaacctattaatagaaacataatgggatgatctttggcaaagaaaattagtcataataaaaattaaataaattcaactgtgaagagaaagtgtttctttttgttgtgagtccttattaaagacaagaatttaaaaagatatatttaaagaaatattgttcaatgcttgttttttatttattttttatttaaacaaggctggacatttgttttgtagacctattgcagtggttcttaactgggaggtgattggacaatgtctggacacatttttggttgtcacaactggcagtagaggggagggctgctagtgagcagaggataggaatactctaaacatctataatatgcaggagtgccccccctcaacacagaattattagaccaaaatgttagtagaactactgttgaaaaaccctgtcctagaggaaatatagtagaatatattttcccaaacttgtctaatcataaaatttactgaggggagagtgcttattaaaaacatagaatccaggacttgcccggatctactgaatcagaaactccaggaatgaggcctgggaattcctattttaaacaactgccctgggtgaattttatgattaaaaagtttggaaaaatggtaggtagaaagaactggacttttagctcccagcccagtttaagtcctgacctccactgtgctgtgggctatgaccttgggcataccctaaactctgtacttctgtgagcctgttccttgtaaaatgtcatggatagtccttttgacctgataggctggttgcgggactcaggaataagatgtgggagcaagcacattgtcaacttcagggcagtgttttataactccagatacttgaatccatccacatcagcattatctgggggcatttgctaatctttgtgcccaactccagacattctcattaaggtacctatgagtagagtctaaggacgggcattttcaaaagcacttttgggtgaattttagtcacaccagtttaaagaacttttgcttttgattactatattggtcataattgaatcttttctagcatgaattttgtgataatttaactgtgtctttttgacagtatttttttccagagcatatggtatcttttgcaactgaaaccaatggtgaaatatcccccacacagattttgcaggtaaaatatatttttattaacatatataaataatagcataatgaaggaaaacttttaagtccttttttatacatgcccagattttgaaaagttatgctttgaattattattaatattttttgctggaggtaaaactaaaaaaaaaatgcacccaggcaaagaatgtcctaaatcaataaagctctttaacaatattcttcttcccagttttagccaattgtcaaaggattttacatatttaaaaatgtgtgtcttaaaaggaaacttgcaattttgttctgtgatgtgtgtaaatattatgttagtctttagaaaaatcagaattctttgtaaaatacagatatcttaccaatagatactcagtatcagctttcataataaacaccctcaatcctatttgtaataaaatgtttagcaaataaatgaaaggagataaaagatacaggatgcaaatgtattcactagcgtttgtaatagctgttatggaaatccttgcatagaattgtgaaatattcttagctgaattaagaatactagttatctaattaaaaatctccttatttttgtgtctattggactcatttcttccaaactggcagtggcttgaaatggttattttcaaagacattgtcattacaataaatgaataatttcagttattttctttaattttcgatagatttgtagattttacatcagaagctctacagttgttttttacaggttaatgttgagcaatgtctttataatggttgccgtttgagctcagccccatgcatccccaaacccactcagtatcccctgatctttaatgaagacaacttttaatatttccagtattgtttgaccttaaaaatattaggttggcagagctatcatggatttttctgtgggctttttaataggttatatttcatttttgtgcttcagaatatttttgaaacatgattagtccccagagatttttctaaaagctgcttctgtgctcctgggtttttacagagacaccctgtcaaaatgttaggtaaatggcagcagcagctgtgccccaggactttcagatctcagccctctgaatgcttcaccactgtattacaacacagtggtgggatggagtttttattccgcctccttttgcaagtcttcctgtagcacagttatgttgctttaatgttaaattataaaaacaagaaaaatcacaggctttggaatcagatagtcctgcatgtgcccctgacctcttctctccactgaggcaatgtttcccctttttaaaaggtttcttctttttctagtgtgacctctatgactctctttttaaaatttaattggtttggtttaataacttggaaagcactcaaactaaaaaacctacttgcctgttttgcatgtcaattaattaatatctgtggctcattaaattaaatttcttttagtaatttactttaaaaaacataaatatctactgtcagcatttcctttagtagccttttaaaatgtgttacactattttagttaataaattcccttatttcaaattttttccatttgtttattcagagggatttctattttctttttttttttaaatgagacactaatgcatttccactgtcttattaaggatgctgagcacaaacgctcagttgagctattccttttcattctcattttcttgaccaacacatgcccactgtctcaattaattattaccatgtaacaaactattccaagcctttgtggtttaaagtatccatttacattttgccaacaatttgtgggacaggcatctgggaagagtttagctgggtgggtcatctctgaggcacgttgactcagtgctggggattgaaggtccccttctaagagagttttttgactgcatgtcgtttgatactccttggtgtctctgtctctctcccctgtttccccccacttactgtctctctctgtctgtctcatggtgtctcatcctgcagggcttttccagttgcattggactttttacctgtgatggtctcagagtagtcacatttcttatgtgacagctggattccaagggccaagtcacgaaaatcaccaggctagttaagggccacacctagaattggcaaagggtcacttccacatattgtatgggtcaaagcaatgacaggcttgctcgcattcaagggagtggagaaagactccacctttttgtgattcagtggcaagatgacattacagaagagcatgtgggatggaagacattgttgctgtcctctttggaaaacatgacctgccacatccacccacaactgagaaccacagatgacaaagaagagatagttttgtttgctttacccgcctcaaggaggtgaacttggctcaacttcctgcttcacaattgaagtcaggattgtggtcttacttataccataatgaagttaataggtaaacctgtaatctcagggaaaaccatggaaaacgatgaaaagcatatcaggacttaacgcaatagatgacgtccaactttttgaatggacattcaattagctgataattttggtagttagataactatgtactatcacttagaatgtatattttgtgaactcattttcatttgaaacatcttaggtttttggaagactgatttattttctgtgtgtgtatgtgtgtgtgtatacacacacggagatagaaagagagacagaggagagagatataccaaggactatcaaagcaatgcagtatacacaaacacatagttaattaccataatgttatatgttatgatcttgtgtgatttttacatgtttatatttggaatcttaatatgattagtataaggctaccatatcattgatttaatcatagtttgaaaatatataaattttctttcagatgtttctgagttcaagcacatatcctgaaattcatggtttcttacatgcgaaagaacagggaaagaagtcttggaaaaaaatttacttttttctaagaagatctggtttatatttttctactaaaggaacatcaaaggtaaattgaagtatccatgatgtgttatgactgacatattaagctgtaagttaaaacacgttgactttgttgtatttattactttattacttgatgtcaaaggttggtctttgattttcttgatttaaaacgtttgccttgattatttaaacactactcagctttacttcacactggtttcaaagtgtagtatctttgatggagtctggatactcttatttcagtacaacgtatgttactcctttgtcctcactctgaattcactcctttctcctcatccttggcttcagagtttgaagcctgatgtagtgtataccttttctttttaccccaggtcatactgctgatcttgtctacttctgaatctctgttgatcaacatcaacagaacagttaataatagaacagttaataaaatgtctcttctgagtcatttattgctcttttattattgattgatggatttatttcaataggtttttaaggaacaggtagtgtttgattacctgagtaagttctttagtggtgatttctgagagtttggtgcacgcatcaacaggcagaatacactctactcattgtatagtcttttatccttcaccccctcccaccttttccctgagtccccaaagtccattgtatcattcttattcctttgcattctcatagcttagctcccacttatgggtgagaacatacaatttttggttttacattcctgagttacttcgcgtaggataatgatctccagttccatccaggcagctgggaatgccattatttcattcctttttatggttccgtggtctgtctgtctatctatctgtctgtctatctcacaatttctttatccactcgttgattgatggggatttgcgctggttccatatttttgcaattgtgaattgcgctgctataaacttgcatgtgcaagtatctttttcatataatgacttcctctgggaagatacccagtagtgggattgctggatcaaaatgtagttctacttttagttctttaaggaatctccacactgttttccaaagtggttgtactagtttacattcccaccaacagcacaaaagcattcccttttcaccacatccacaccaacatctactgttatttgatttttttgattatggccattcttgcaggagtaaggtggcatcacattgtgattttgatttgcattcccttgatctttggtgatgttgagtatttttttcatatgtttgttggccatttgtatatcttcttttgagagttttttattgatgtcttcagcgtactttttgatgggattctttgttttttttcttgctgatttgtttgagttccttgtagattctggatattagtcctttgtcagatgtagaaattgcaaatattttctcctgctctgtgagttgtctgtttactctgatgagtgtttcttttgctgtgcagaagcttttagtttaattaagtcctatctatttatctttatttttgtttcatttgattttgggttcttagtcgggaagtctttccctaagccaatatctagaagggtttttctgatgttatcttctagaaacttttgtggcttcaggtcttagatttaagcctttgatccatcttgagttgatttttgtataaggtcagagataaggatccactttcattcttctacatgtgacttgccaattatcccagcaccatttgttgactagagtgtcctttttcccacttttttttgtttgctttgtcaaagaccagttggctgttaagtatctggctttatttctgtattctgttccattcgtctatgtgcctatttttataccagtactttactgtttgggtgactatggccttgtagtatagtttgaagtcgggtaatgtgatgcctccaggtttgttctttctgcttagtcttgctttggttatgcaggctcttttttggttccatacaaattttaggatttttttttctagttctgtgaagaacgatgatggtattttgatgagaattgcattgaatttctagattgcttttggcagtatggtcattttcaaaatattgattctgcccatccatgagcatgggctgtgtttccatttgtttgtgtcatctatgttttctttcagcaatgttttgtagttttccttgtagagttctttcaccttcttggttaggtatattcctaagtattttattttattttttttacagcttttgcaaaagggattgagatcttgatttgattctcagcttggtcactattggtgtataacagagctatttatttctgtatgttaattttgtatgctgaaactttgcttaattcatttatcagttctaggagtttttgggggaatctttagggttttctaggtatacgatcatatcatctgtaaacgatgacagtttgacttcctctttaccagtttagatgccctttatttctttttcttgtctgattgctctggctaggactttcagtactatgttgaatagaaccggtgagagtgagcatccatttcttgttccagttctcagggggaatgctttcaacctttcctcattcagtataatgttggctgtgggtttgccatagatggcttcgattactttaaggtatgtccttctatgccaattttgctgaagttttttatcataaagtgttgctggattttgactaacgctattgagatgaacatgtgatttttgttctaaattctgtttatgtgttgtatcacatttattgacttgcatatgttaaattatccctccatctctgatatataacccacttgatcatggtggattatcttttcaatatgctgttggattcggttggctagtattttgttaaggatttttgcatctatgttcatcagggatattggtctgtagttttcttcttttgttgtgtcctttcctggttttggtattggggtgatactggcttcatagaatgatataggggtgattccctctttttctgtcttgtggaatagtgtcaatgggattggtaccaattcttctttgaatgtctgatagaattcagctgtgaatccatctggtcctggacctttttttttgttgatcatttcttttattaccattttaatctcactgcttgttattggtctgctcagcgtttttatgtcttcctggcttaatctaggagggttatctttccagaaatttatccatgttctctaggttttttagtttatatgcataaaggtgttcatagtagccttgaatgatcttttgtatttctctggtattggttgtaatatctcctgtttcatttctaattgaccttatttgggtcttctctcttcttttcttggttaatcttggctaatggtctatcaattttatttatctttacaaagaaccagcttttgtttcatttatcttttgtattgttttatttgtttcaattttatttagttcttctctgatctttgttatttcttttcttctgctgtgtttgggtttggtttattcttgtttctctagttccttgaggtatgaccttaggtttcctatttgtgctcttttagactttttgatgtaggcatttaaggctatgaactttcctcttagcactacctttgctgtatcccagatgttttgataggttgtgtcactatcattgttcagttcagagaaatttttcatttctatcttgatttcattattgacctaacaatcattcaggagcaggttatttaatttccatgtatttgcatgattttgaggtttccttttggagttgatttccaatttattacactgtgttctgagagagtacttgaaataatttcaatttttaaaaatgtattaagacttgttttgtggcgtatcatatggtctaccttggagaatgttctgtgtgctgatgaatagaatgtatattctgcagttgttgggtagaatgttctgtaaatatctgttaagtccatttgttttaagatatggtttaaatccactgtttctttgttgaccttctgtcttaatgacctgtctagtgcagttagtggagtattaaaatcccccactgttattgtgttgctgtctatctcatttctttacgtctagtagaaattgttttataaatttgggtgccttaggattaggtgcatatatatatttaggattgtgattttttcctactggacaatttcctttatcattatataatatccctctttgtcttttttaactgctgttgctttaaagtctgttttgtctgatataagaatagctattcctgctctcttttggtgtccatttgcatggaatgttttttccacccctttaccttaagtttatgtgagtccctatgtgttatgtgagtctcttgaagacagcaaatacttggttggtgaattcttatttattcttccattctgtatcttttaagtggaacatttaggccatttacagtcaatgttagtattgagatgtgaggtactgaggtactattctattcattgtgctatttgttgcctgaataccttgtttcttttttcatcatgtttttgttttataggtcttgtgagctgtgagctttattctttttttgtaagatggtgatatggtttggctgtgtccccaaccaaatctcatcttgaattgtactgtcataattcccatgtgctgtgtgtgggacttggcgggagataattgaatcatgggagcaggtcattcccatgctattctcgtgatagtgaataagtctcacaagatctgatggttttataaaggggagtttccctgcacaagttctcttgtctactgccatgtgagatgtgcctttcaccttctgctgtgattgtgaggcctccccagccatgaagaactgtgagtcccttaaacctttttcttttgtaaattgcccagtctcatgctgataaagtatatctttatcagcagcatgaaaacaggctaatacagatggagtcttgctctgtcacccaggctggattgcaggggcaccatctcggctcatgcaacctccacctcctgggttcaagtgattcttctgcctcagcctcccagatagctgggattacaggcaaggaccaccatgccagggtaatttatgtatttttagtagagacagggtttcaccatgttagccaggctggtctcgaaattctgccctcaagtgatccacccacctcggcatcccaaaatgctgagatttattctttaaagaggttctattttggtgtattttgaggatttgtttcaagatttagagctccttttagcagctcttgtagtgctggcttggtagtggcgaattttttcagcacttgtttgtctggaaaagactgcttagtttcgctggatacaaaatttttggctgataattattttgtttaaggagactaaagatagggccccaatcccttctagcctgtagtgtttctgctgagagatccactgttaatctggtaggttttctttttttttttttctttttctttgagtatccctctgttgccaggcagaagtgcagtggcatgatctcagctcactgcaacctctgcctcccaggttcaagtgattctcctgccttagcctctcaagtagctgggattacaggcgcacgccaccatggtaggttttcttttataggttacctgatgcttatgcctcatagctcttaagatttttttcctttgactaggctttggataacctgatgactatttccctaggtgatgatttttgtgattaatttcccaggtgttctttgagcttcttgtatttggatgtctagatctctagcaggctggggaagttttctttgatgattccctcaaatatgttttccaaactttcagatttcttttcttcctcgggaacaccagttcttcttaggtttggtcatttaacataatccgaaacttcttggaggctttgttcatcttttaaattattttttttttgtctttgttggattaagttgaaagccttgactttgagttctgaagtcctttcttctacttgtttgattctattgttgaaactttccagagcattttgcatttcttttagtgtgttctttatttctaaaagttgtaattgttttttattcatgctatctatttcactgaagatttttcccttcatatcttgtatcatggctttttttttttttctcactaagttgaacttcacctttctctggtgccttcatgatgagcttaataatcaatcttctaaattctttttctgacaattcatagatttcttcttggtttggatccattgctggtgagctagtgtcatcttttaggggtaagaagtaacttgttttgtcatattaccagtattgtttctctggttccttctcattttgggtaactatgtcaaaaggaagatttgtggctgaagggctgccgttcagattcttttgtcccacagggtgctcccttaatatggtgctctccctcttcccctagggatgtggcttcctgagagccaaactgcagtgagtgttatttctctttcagatctagccacccagtggagctcccgggccctgggctggtactggagagtgtctgcagagagttctgtgatgtgaaccatcttcaggtctctcagccatggataccagcagctgctccagtgaaggtggcaggggagtgaagtggactctgtgagggtccttagttgtagttttgtttattgtgctcgttttgtgttggttggcctgcagcccggagttggcactgtcaagagcatatcagctgcagtagtacaaggaggatcaggtggtggatggtgccctggagcacccaaaagattatgtcctttgtctttggctaccagggcaggtagagaaagaccatcaggtgggacagggttaggcatgtctgagctcagactctccttgggcagggcttgctgcggctgctgtaggggatggaagtgttgttctcaggccaatggagttatgttcccagggggattatggctgcctctgctgcatcatacaggttaccagagaagtggtggaaaatcggcagttacaggcctcacgcagctcctgtgcagcccagaagttcagtttagctcactccatgccccgccaacagcactgagtatttttccaggcagcaggtgaacagggctgagaacttgcctcaggcaaccagcctcccaactgaggaggcaagcagggatttcaggttttgcacctccctacctgccaaggcttctgtactgtgtttgcactcctgattcaccccctcccccaggttctgtctaggaaacaatgagtcagttgaaattgttacaaagttcagctggaattttccttctctctgtggtcttttccaagttcctctggcagccctccccagggacccctgtgagacagtcagaaaaggcttccccagggaccgagagtgcccacaggctcttcctgctgctttttctaccctgtatttcactcaactctaaatttgtctcagctgtaggtaatgtcaaatccttctcctgtgatctggaccttcaggttccgcagtgagggtgtgtgttcaggggtggacgatcccccttttcacactttgggtactcacagttttttggctgtcttctgggggccctgaagcagcaattcatttccttcaaagggtctgtggattctgttggctttccttgtatgttcctgtggtggttcttggagcaaaagttcacaatgtgaatctcctcatgctgttccgcagagtgggagctgcaagttagtcctgcctcctgttcctttacttctctttagttattttgtgtgtgttattttgtctccttacatacattgtaaattcctagaggaagttatgatgctgtcatcagggatgaatagatatatttgtctacatgcttatatgtttacctatataatggttacatagatacacatgtgcagaagtttatatgcacatacattatcacttaaacataaatgtgtattctacagtgctgcctggtttctgtgtctagtctatgtccattatgttatatagtctttggcatacaagtgttgacattttatgcaacgcattggtgtctttcaagtaaaaattcttttgagaatttttatgggaggttattattattctattttcatgcatctatagttgtcaatgacaacactgttgcttctttatgggttaaactgtcttttttctctggcagtttttcaaacattcttataagctttggtgtgcagtaatttccctgctatattactaggtgtgttgaaatatagtctgctaaatcttgcttgattcttagcacacacattcaatctgcaaactcatctttttttcatactagaaatgtacatccattatttatttgactacttcttttctattcttgttatgtgatcttttgcatttgtcttaggattttctgtcttggctagttatgacttcagatgtcccatggcttgtctctgcctttgtattcacagggccttctccctttctctctgtatgtctcttataacaacacttgtcattggattttgggcccacctagataatctcatctcaagatccttaacttaattatatcttcagtgaccctttttctgaattaaggttacatttataatttcctggtattagggcatgagcatattttttggggggctactattcaatccactacagaaagccattgaagtgtttgaacaagggagtgaaattaccaaaagagtatcttgagattagtttggtcacagggagcttaaaagatcaaggagacagagagtgaaagagagaaaaagagactgaagggaagaaggcaaaggaggcagagagggaggagtgggaaggaaagagaaagagagagaagtagagagagaggggccacaagattaaatggcaaaaggccagatttgtgtggctgattgatatcaaagaagaggaagcagttaaaaatgttcttaaagataaaagaaaattaagaaatagaaaataaaaataaacaggaatagcatatttactagaaggtaactctcttagaagacaaatagtgatcttagttctggatatgttttattgaggatgaagcaaacaaatggcaatgctcaaaacagctaacgacggagaccagatgtttgggtaatggtcttgataggagatatggagctgcaaaatagttatacctgactttttcccatattttcccccaactgctcttgtatagcttccttctttccctcatacacagttttcttttgttgctgttcttgtgtgtgggtcttatgtgtgtgcatgtatttccttgtggtataatgcttcatgaaccactacctggctaccatctatgtttgctcaaggccctgggtctctacagtcagcacgtagtgaagcctgccaggcttgtgtccttccctcagggcagcaagttcccccagtccctgggttggtctagagatgccatctgggagccagggactatagccaaaaaccctggaaatcggccaggtgtggtggctcacacctgtaatcgcagtactttgggaggccaaggtgggtggattacctgaggtcaggagttagagaccagcctggccaacatggtgaatccccttctctactaaaaatacaaaaattagccaggcgtggtggcacaagcctgtaataccagctactcaggaggctaaggcaggagaatcacttgaacctaggaggcagaggttgcagtgagccgagatcacgccattgccctccagcctgggcaacaagagtgaaactctgtctcaaaaaacaaaaacaaacaaacaaacaaataaacaaaaaaccttggaaatctacctgttgttccattctactgtggcttagcaggcactcaaaccatgagacgcaggccttcccactcttccccccacttttcactggcagaggagcctcacctctggccactattactacaagtccccagggagtactgctagcaactgctgatgttcatctaaggcccaagggctcttcagtcatcttgtggtgaatgccaccaggtctgggactcgcccttcatggtagtggactcccctctgactcagagcatgtccagaaatgtcatccaagagctgaggcccagaactggggacccctcagaaccatcctggtgctctatccatctgtggccgagctagcatcgaacatacattgaacatacaggacaaagtctcctttacttttccctctgtttttctcaagcagaaggaatctctcaccatagtcaccacaactgcaaatgtgctaggtttcacctgaagccagcatgtcttaggatctatcttaggatctcatccaagtcccatggattactgcctggatatcactgctggttattcagggcccaagatctcttagtcagcaggtgatggatcctgccaggactaggtttttcccttcaaggcagtgggttcccttctggctcagggtgtgtctaacaatgtcatctgggagctactttctgaataggggcctcacaactctggtgccctgtcctactgtggctaagctggtatccaagatgtaagacagaatcctctttactcttccctctcctctcctcaagtggaaggaagggatctctttttggagccacgagctgtgctgcctgggcttgtgggaagggtagtgcaaggactcccgtagccaccccagctgttgctcaccagcttgtgtgccctccaagtgcatggcttccaatcccagctcatcactaggacttgcttaggagttgcagtccttgcagcctagactgcctttcatgtctatttagggctcagagcagtttagtccgcagttgggaggctcgccagaactcgagttccaactgctgggatgggcggttcccctctggttagggctggtctaaatcctccctccatgggtaggtgtcagctgagttcagttcggttttgctttccactgtgacagggcagcactgagttcaatgcaaagtctcatagttactgtgctctccctctcccaagtacacagattctttctcctgctaaggaacaggcgaggggaggtactgacaatgtaagactgtctttcctacctccttcagtgcctctttcagtgatatgaagtccccagggagtactgcagggactgctgatgttcacttaaggcctaagggctctccagtcatcttgtggtgaatgcaccaggactgagactcaccctttatggtagtgggctcccttctaaaaccaggtactgtgagtgctcatctgattttggttcttagaaaggtgcttttttttggtgtaaatgttaaatttggtgttcctgcttgggggaggataggtagagccttctgttcagacatcttgctctgcccctcctaatgtcacatatggcatttctacctgcaaagaaaccatttcctatccttttctctgaggaggtcttgattggttttagttctaaatttagttaactactgctgcaaatcttaaagatgtggtcatgaatatatttacagagaaatctctaagtacgcttctctccacctccccatgtccgtacacatggggaaatgtacaaatgtacacatacttagattttgctaaccatgcccgttcaacttcatagccttatagtgccataagccttagcagtggtggaacaaaaatcaagagaaaaaaactcatcatacctcttattgccttccagtgtttctcaagctaccttttactcttgtttgaataactgaactatattgacttctacagcatcagtggacaggaatggttttattccatcttactagaaatcaaacatttttaccagcaaattaatttttatccaggaataagatttttaaagccagggcaataagcttacctttctctttcctcctacctttttccgagggtcctattctgggtctttttaaagcaattttctttcctgtcttattctccaatggtgttagaaactacagtcattcattcgattaaaatgcttaagaacagtgaatacagagaaactcttgttctgccagttatcagaggtggaataacaccggtaaatgacaatgaaagattcttttggtttttggatttgaatggggttgcccgttttgctcagtgtgttcttctgtggggtgtttttttttttttttttttttccactgcttctcaaattttactgcttatgaatcacctgggatcttgttaaaatgcagatactgattcaggaggtctgggatgagccctgaaagtttgcattgctaacaagctcccaggtgatactgatgctgctggtctgagaccacactgctagcagcaaggttttagagaacaaatgcattttggtcagatttgattatacattcaacctcagaattaagcacttctccaagttattaacctatcacagaataatatgacctagtgatttcccatgaccagttttaaatctcatggatttcccagagaagaaatagctgttcatgattccactttgcgttgaaaatcagaaacattcctctgccagctaatttccctgaactcatctatctgtacagactttctttctttccttttgtaaagttagagtcgctgcttcctgtggtgtgttccactgtacacaaatgtgagggatgactgtgtgtgaatgaagcaggaatcattgtcttgttctcatttatcttctctaactgctatggaagctcaaaccaaccttctcccctttgttgagctaccattatttgaaagctggatgaggaatacgtttccaaaagccaatctttgctaacttttttctctctcagattccttgaaatggtggttaaagagaatcggaagtttaaaacaggaatttatttatattattggaaattaaattataaacaaaattttcacttctcaaattaaataaaattgtatccagctcctggttaattaaagatatggcagcttagattttttttctccttttatttttgtggcatcatattgaacttctgttggtcataagtttttgcccaaggtataaattatataatataaacacacaaaaaagataatgcaaaaatatgtatccatgtcaatacttttttttttaaggaaccgcggcatttgcagtttttcagcgaatttggcaatagtgatatttatgtgtcactggcaggcaaaaaaaaacatggagcaccgactaactatggattctgctttaaggtacaggcttaatattttgatagatgaataaagcaagcctcagccttttaggtaagcttgagtttcctttaattgcttttgaaaagagacagctttctcttatatataggagaattttagtggcttttatttcaacaggtgttaccttcaagatatgcattaacgataaacaatgtgctgtggccttctagcctaacaaagcgggagggccccgagacctgaaaatgctctgtgcagaagaagagcagagtaggacgtgctgggtgaccgcgattagattgcttaaggtaatctcgccggaggcatgaatttctattaactgctgtgagtaccataaaagttagaaaatatctgtatttcagaacgtgaagtctcactgggtggctacatgagaaagaagaaaaataaccaccaaatgtgtatgtttttaaaattctaaatgataaacattttcggagtagagtggaataacctaatacatttctgttttgtgtgtggagtaagtattccatttctagaaatgttctgattttcacttttgtgaaggtattacatagccagtgtaactgaatgaaatgtctcctatacatgactaagtctgcactcttaaaacgttgccaacaatccaaggtaaagtgtattttaaaatgtgcccacccttgagatatttaatgtaactgttttgtgttcgattcgtgttttataaattgctttctagtttaataagcatgactcaaattattgtacaattttactatgaatatattttttaaacatctactctcgtgctaagtagaaattacaacttccgtaagcataatttgttgctgctgagcaattttgaaatgagtaacaatattctaaaggtagactctcataggaaataaaagcagaactgatgtcttccagaatgtatagaaagcatatttattttcaaaaactgtttgccagaaaattgagcaaaacttaaactgtatacttatcaactatttccttttaaagatactgatttggtagtcacagttagggaggaaattacaaaattttgttgttgaaaagatacaatccagggaaagtgcccgtccacattagttagtattgctgctgctgaagccaacaaaatacataatttattgttattattaaatttttggtttaaaataagagcattaacattttctaaggtactctttataatttatgcctaggcactaatataatttgccaatatattgattatgcatattatatgtgtattagatatatataatccttttcttaccacaggaagatttagattattaacaatgcgtgtactaaaactagcttttcaatatagttagaaatgaaaatcagagaagctggagcactgtgaagtccttaggttcccccatttcatttaccctgaagaaggggatgaagtaaacttttcaattgatttgcagtttgtatattttccaggtgtactttttttcttctgcctttgccatttttacctcttctgctctctgttgactttttcctagcatccaacttaagagatatcagggtaaagaaggacagaatagtaataatcagaatcattatcataccaggtttagaagaaagttttattttgtattcttacaatttttaaattgaggtaaaattcacaaaatataaaattaatcaaactattgttaatgtgaataattcagtggcgtttagtgcattcagttccaagacattttaatcacctcaaaagcaaactccatacccattaagcagctactcccacaccctagcaatcaccaatttgcctctgtctgtgtggatttacctattgtaggtatttcatataaatggaatcatacagtatgtgaccttttgtttctgacttttacttagcatagtgttttgtggttcaccaacattgaagcatatgttagctctttattcctttttatggctgtgtactattccattgtatatatagctctctatatctatctatatgttggataaacacagtttatccattttttcactgatggacatttaggttgtttctacctttggctattgtgaatagtgctgctatgaatatgtgtatatgtatttgtttgagtacaggttttcgattttgggggaatacatgttgtaatgaaattgcttattgtatggtaattgtacatttaattttttgagaaattgccaaaatgtttttccacagtggctgaaccattttgcattcctaccagtaatgcatgagagttccaatttcttcatatatttgtcaatacttgttatttactttttttggttcttgttcttgtcaattatggtcattctagtggatgtgaagtggtattggaagaaagttttaacaaatgatttaaatgaagctttttgtttaactgaaatttacattcttttgctgttttggcagatagccaccatgtttacttctttatgagaggtttgcttgtttttcaaatattctgctgttaaagtcacctgagaagctttctgaatttacatgtggtccccgccccatccttaaggattctgaataagaactactaactttgtccagccctccagttttacagataaagaggctggtactctttggaaggctctactccatcaagagttatggtagagaaaatttcttgtggtttttggttttctctgtttttcaaaactggaaatcaggctaggctgcaaagaggatgttcttcaaccttgttaacccatcttcctcccttctaacttgggcttaaagtttgacacccaaaacagaagcaggtggtaagcccacttcctttaatcagcatttcacttaatctaagaagccattggtttttaccaggagacatcactatttttattagcattaaaaggaaaaaaaatgatgccaataaaatgatgatatgatgctttcatatcacttacaatttttgttttatttattcagatagttttgttaggtttatttgaacctagatttttgtaatttaatcacttttgtttgtatacactcagatgtatatacatatggacataaatgtattttacacatacacatatatatgcattaagtatatacacacataaatataaaataaaatatataagtagaatacattaattgaggtatctttaaaacttcttcttattctaagcctggcttttctgaatcattttcatctcagagtcacagatacctgtattttccacaggatatggcatggggctgtgttccactgatattgcgtgtgcaaggtttgatgctggtgatttcttgatcccaccaaaggtttcgggcaatgacaaatcactgggtccatagtgaatgtaagatgttatagattataggatgcagttgaatttatagatgttaaatttcgaaatgcacatctaaaaatgggtgaaatacactaaaagctttctttaattcttccatttcaatgaggcttattttctggaataatgttcccttctcactattttttctcatcttactgttcttaaggcatctttcaatcagattcccagttcaaagatgcgtcattgtgttggttttctatgactgctgtaacaaattaccaccagggtagtgacttaaagcaacataaatttattgttctttagttcagaagcctgaaatgagtcttactggattaagtcaaggtgttggcagagctgcatttcttactgaaggctctagaggagaatccagttaccttgccttttggcagcctttaaaatccacccagacgtcttgtctgggggccctttcaacatcttcaaagccaacactgtcacagcaagtatttctcacactgccatctccctggtactgcctcttctgcctctcccttccacttattaaggccccttgtgattacagtgggcccacatggataatccaggaccatcaccccaccttacaatcagctgattgacaaccttaattccctttttccatgtagcttaacataggctctggagatgaggatgtggacatctttgggggaccattattctacctaccacatccatgtttcctgttcatttcaataatggcgaagcttttccagatgaggctgaagagggaaggaggcatctgtgaggccctttatctggaacctgtgagaacccaaacaggaaagagacatgatatgatctcttttacactgtaaaatacccagatcacaggaagccagggcttgctccaggtctcacaacacagacacgcttgtggcattctaatggtggagtgagttggcttccctggcaacttcttgtcagcagggctcctcctgttggatccccctggctggtgcagctgggatcacctgatggtagaagtgtctttaacacctactttgttttcttttgttgtctactgtgttatttccagcgtttaccattgtacttagcgggaatgaacaaggagatattatcttggctaaaccgagagtgccctcttttttcatcacacaccacttgttagaaacagcctcccaccaagaatttggccacttgttttattcttacgtccttttcttttatatatatgtaaagtcttcatatggatcagatggagactctctttttctctttggataaattctaattacatatagaattatagaatatctgagacttagaaaatgggagattttctcacatgtaatgtcctagttacatgttgtctcttttccttcccttcaattagaactctgcaaggtcctctctaacatattttggtcccttatctgcccctccataggatggggaaatgttaaggtgacccccgccctacctcttgtccagagttaaatgcctactaaagaccttcagaagcacagaggcaactacctaacactgcaggtaccagggacaatatatctttgaagaaaacagacttattagtaggcagctggcttttcaatgcagattaataaaaggtggccaaacagcatgtttcttgtgaaagtgttggtttgaggttattatatattctccaaaatgaatttgactaggaattaagctcctttgccttctttttaaagctattgtaggcttagagttgatttgaaataaatttcattaggtcccattaatgtcaatcaaaccttaaattaaaaaataatttttagaagttgggaaataattggataagaagtcaacacagagaattttaaatgaatgtgggtttgcattcatgttaaaagcaaaatcttgaaaacagtgactcctttagacctcctctgattttttttttttttttttttttttttttttttttgcctaattaccaaatatacccattgtgctagaattgcttttaagggaatgactatttttctttagtagaaaaacagctctgctggaatgtttaaatagaatttatccttcaggtaagatttgattccatggtgtctatttaatctcttttatataaaacctaacttttaagttcattatggctctatgaaatggacagaattgcagaatctaggggaaaaaaggctgtttattccattgttttatttttcttttcttttttttttttttttttaacaaagtagcttaaacctaaaggaggttagcttccaaattcagatgtggaaacctccaggacaagtttggttttggcagttggcattcttactgtttttcaaactaataatccagttataatccagaccggttttccaattctgtcctgccagctcaatccatatgatgctgcctcctgaaagtgaagacactgaaattcttatcttctaccacttatattgtaccttgaaagctttcatttgaaatcagcttgattcctcactattttggtttccaggaatttgaagtaaaaaattaataatggcattaatagttttgatataaggatgctatattgtcaataattttcaacataggcccatgtttatggatttaccagagggaaagtaaatcattagtcattcatcagagaggtacaataaattttgcacagtgttgcttaggatgtgtgtgaagtttttggaatctttgtaccagaaagcacatcgcccttcccaagtgagtttttttttttttatcatgaggcagtgtactactccagatagttgtggtacaatttggtgctaagaataatgagtagatatgtcagctcctgaagtctgtactggtgagctggaccttaagttgtaggtctaagtaaaagacttcaattgtctttttaaatgtattgttgcagggcactaaaagttcatctttcaaaattttggttgctttacttgtttgctttaattgtttttatatttatattgtataattgatgaaagtgttgattttcatagattatcagagtagtaaaagtggtgggaatgtgttttatttatttattctgcagtatggcatgcagctgtaccagaattatatgcatccatatcaaggtagaagtggctgcagttcacagagcatatcacctatggtaaggaccaaatttttgagcctgtgttttattttacattcacattatattaatttaaattacactacataacagtatcttataataatttatgttattttctgttggtaaagtaactctttggcaccattctagtataatgttacattgaattttttatttttggattttatttgcttgcaatctatgtgataaaatcatatcattatacataaagtatttaataaaatatataatagtatatgttaaagttttaaatatttgaaacaattatgtgtctttctgtgtcattacaacatttgaagattagatcttaaaaatataatttatagaacatattccttggcattgtagattgtgttttgttaattattggttttgattgtggtttcatattttattttaataccgattctgggattgtcacaatctagtataaagatgccagtgatttgaattttaaaagctacagtatacacatgtgagctcttttgcattctggctaacaataatttttttaagttccaggtcctttaaaagcagactgctttccaggaaacccaaaaactgcaagccaaaatataggtcgtgtgttacattaactctagcactgcttttcagacttatactaaatgtaacttggatatttatttgcagacacacacagacacatctttttccttctttaggatctaattttaattttgtgtgcattaacataagaaatgtatttctgaacttaagatttatgttctgctatttttgctgcactccttaagatagggtatattaggaattcagatgtatgcacatgtgttacaaatcagttaatgtgcatttttttaatctacattttcacttaggttaaaaatatgctcttcatgtatgtgaccagggaaggtgcatttatcccacatgtaatgtagtagatgaaatgctcagttctaggaatgaagcatgaaataatgttgattatgaaacctgatagactatatagaaaaagaactccaattttgtagttacgtcactttaacttatggaagaataactttccatctttgtatggtattacttttaagccctaaaataagaaactaaggggcacagtgaatttttataaaagcaatcatgttaagatgaatgtttttacattttttcagcttactcttatctttcaattcatatgtatataaaaataataatgaattttattatattaatcctttcctaaactcctccaaatttcttttagagtccaaaattattaggatgaacatgttaatagcagccaaatatttggaggcaattatttaatgtcctcttaatcataggaaaaatggttataaatgaagttcttcctattctcatcactgtcagcatacatgtatggtattacccttgtctttttccattgaaggtgatgctgctattgatctagatgtggataacagtttagtgtagctttccttgttcagtgccaggtaaaggaagagatactccttgagtgagtttggttgggaatagcagttggaggatgcaggtgcctgtgtggtaaagaaccatcctgtctagcacttgtcctaatcagatacagtagtatgtgagaattacatctttaatattattaatttacatgaaggaaacttagaatctgttttgggaagtagttgtgttgactttggtgtctctataaaatctcacttttccagattatttgggaagaatcaggggcctaaaagatgccagtactctttaccagcctttgttgcttttcatccggggactattttcagcgattaacatataagtttttagtatatattgtagtataaaactttagttatatttttaaaggaacaatattattttctttcttttcctaacttttccaggtatacattttgagaaaggaaatgagaaaaaaaattctcaaaccataatgaacatcttagctatataaaggatgtaacagccaccccatcagcctttgaagtgagaatcaatcagcagcagacatttcaggaagccaaatatatttggtcctttttagggaaaacaaaggattcatttaaaggagcatttatcaatattgccctggctggagtgaggggacggagggttggggaaggcgagtctactcaagctctttttatgcttcacttttgacctgaggatagacattctaaactgcaattcctccactgtatttcccactctatggaacataaaagaaccctacaacagacatatctgttactgcttttaccataagctgcctgtgtgactttggtcaagtcactggtatcctgcagtgtaaaatgagggtgatggttgtataatctagaaaccattacatttctgatgtctgtagctttgtataaagcaaatgagagaaaaatatctgaagaaattgtgtgcccttttgctaatgatggcactgtaagtttatctaaatccttcaaatgggatgatactggttgtcacctagccaaacttcctgaaaaaccattttatgtgcagcctcactaagaattagtagatgtgatctcaaagtatgggctggataatccagggtatacccagacctattttttttcttaaaaagaaagaaagtcatgccattaaaatcatggaccccttttttagggccttctctgttcatctcctaagaaggaagagctagaaaaggggagaagtgttggagaaatataaccaattctgaatgttatcaacattgcttttctatgtgaaagaaattgatctgaaaatgaccttttgagtttgtcagactctgctttacttccatttttttgtccaccaatggtaaactattaattttctatctaccacctgccattcagtagaagacatttgctatagtcctgtgttttccgttaatctagttaatgtagcaaatgaaaacgttccttatttgtagtgtcgtcttcttatgtatgtcaagtaaatagggaacacaggatcttgttttatttcctggcctgctatactagagggagaaaaataggacagctgattatttttttcttaatataatggtatttttatgttgccagggagttgagattacagaacctaccttggcatgtaaacggagagatattataaggataaagctattatgattgaggaagcttactctgtggtttgggcaggtggatgcttttcattaatgtcagcaaagcacaagtatatctgactggtctacagacctgcacagaagatcacggggtgagaagggcaaactaaggtgtgacagcaaatagagattacagagacagcatctgtgtggaaagagcagctgtcagttataaaggctcctgtaacaaatgaaagattgcatgccagatctttagaaatatagatgaaccataataagattgtaggccactacagcatagtttgaagagaaaattacaaatgctaataaagtgggatatgttgaagcagtgataaaggagtcctatagttatctgtggataaggttttgtttgaagcctacatttgactatagtctatgcaaccaagccaggtatagctgaatctacataaagagagataaaatgcttttaagccagggggccccagatgcaggctggctagtagtttactattataacaccactttgggttttgctcttctattaattagtagaaaataactgttattttccatgggtgttttaaaatttttcttttggagaattttaattccttcttgatgttgtatgaacttatgaactgagtgggattcttgactagagattttgacaatggtctttcttaggattcatgacttgttgtggggtggcatatttgttaaaagatggttgtaaagtagagccccaaacaaacaaaaaagaaaaagaagatcgggttttgcatattttactttcaactcaaagaatataaatacaagaagtagttagcaaaaacaatgactttatcatttgtttaaactaagtttctttaaagttgccttctatcagttcttattcaggcttatttttgcagccctcatgtggccaagtgtattctcacaagatgaaaatgtattcatatgttaaatcatggaaattttaaggttatggaattatcaggattattctttcactaaattttattttctaagtaagatgaaagttgatgtgataaacttttaaaatacatattctagtttgctccattataaaactcattaaaaataatgagtattatttctcaagagatatatgtcaatctaagttataacttttgggtatcttgaatcttaaaaactagttgcttcataagtagatggatttgacatttaattgatgactgacggatctcaaagcttaatggagacatcaattcagaaacaatgtatctttttaaccagaggaagagctattcctttctaaatggaagttttcccattttactagagaacgtgaaaagataagtttgttttagaagaaagacatactttaaaagcttttaatctgtttattcaactcttcaattaccttaacaaattactatttagcttttttaacaaaaatatttttagcacctttatatcttgaatatgtattttcactttaaatattctgctagccccttcaggcaccaccttctagaatggaaatgtactgccagaaaaacactgagagaaaaacactgaaattgaaaaacactttcaatttatttgaaagataactttcaaagaaattttcataactcaaatgtgtttcttttttccagagaagtatatcagagaattccctggtagcaatggacttctcaggccagaaaagcagagttatagaaaatcccactgaagccctttcagttgcggttgaagaaggactcgcttggagggtacaagtagcttcacatgcttcaaaatatttatgatttcagtttgtttcacctaaaaacttgagatttgttttctccttccttgctcagaaaaaaggatgtttacgcctgggcactcacggtagccccactgcctcttcacagagctctgccacaaacatgggtatgtctgttcatagtcattgccactgagtagacggatagacatggaaaggacatgtaatgaaattgcagtcatctcaaacaaagctttgcattcatccatcctatttctttagctatccaccggtcccagccatggtttcaccacaaaatttctagagatgaggctcagcgattgattattcagcaaggacttgtggatgggtaagtttggtatttttaattttgagtacttgtgaattggatttctcctataagcagaaattatttattccatagccacaaagagttcttgatttgggcttatcataaaacagaagtgacattgttctataaatgaggtcatcactgtattctaacagtatctatattatacctggtacatagtgtgtgtctggtatttgtatataaatggacaaataacggaatagagtatcttgttcttaaccagtgatcactaatattacccattatgtcctgattctagcatctcagatatcaattgatgggggaaaatgaacttctttttaagtgtcaatattttgatttgaacatatgatttcgaagtatggtttatattatgacattatgtcaaatgtatttttttaggtatgatgcaacatgtattaagtaaaaagctgtttcttaagtgttttgaacacttatttttttgtgtgtttacatccctattgtcctttctctaaattttaacatcttaaagtaatatagatccgtgaaaagagtacctttcaactgtttctcatgttgtcttttagtggggtaccatggaatacaaaagagaaatataaaatgtattatgaaagatttataatgtgaagaattttatttttctcaaattactcagtgtttcagatactttctataatactggctgaattccctttccaaatgcagtacaaatgagggaggttgtattgtggtttagatgagtaatgaaatcattatcaatttaaacaagtggtgatgggatcttttatcttcaaaagttggctaatcatgtcattatcatgacaagatttcaaggtgatttaatactgaaatttggataacaatgcttcttcacatggaagattattaataggaagtcagcatttccccagactgtaaataagatattttaatacgtttctttgcatggaatgcagtctttttggaaataaatttgaacaatcagtagaattacaatctgatgaaaccaagaaaataaatgagtcacaaagaattattaaaatgttttgaaagattgtaattttctttatttctgagcccagtatttataaagtgaatgaaatgatcgtataaaaaaagatactatcttatttttagtatttttggtattcttttggagagatgtgatggtgccaagtgatccactaggtggtagtggtgatctacttgggaatgggaaaagaattacagcttgatttaccagtgaaacgcccttttgtcccatttcccagtgatgtaatgtcggaatctcacacagcacaaatgaaatggataaactcgtcagacatctgtgatgctttaaatttggctgcctctttgcccaggcacagtgagattcatattggattcaccagtggggatcatttacacggtgtatttaccagcagttaatacaaaactggttttgcattgcactgccagtgaataagaatccacttctggcagcatttttctcttaggctgttagaggccatgtcttgtttttctagcctgacattatagaggcttttctgctgcattcttcaaggttaaagtatgtgttttttggatgattttttttacttaaagcattttgcttaaatatttaataaataatttcaagatttttttaaaacaatatattgatttctttcttgctattgtgtatgaacagttgaaaccagaatcaaaagaaagggtatccagtatagaagagggggttataataaaataaaatttcaggccaggcgtggtggctcatgcctgtaatctcagcactatgggaggccgaggcaggcggatcacttgaggtctggagttcgaaaccagcccagccaatatggtgaaaccctgtctctgctaaaaatgcaaaaattagctgggcttggtggcatgtgcctgtagtcccaattacctgggaggctgaggtgggagaattgcttgaaccctggaggcggagattgcagtgagccgagagcactccagcctgggtgacagagcgagaccctgtttcaaaagaaaaaaaaaaattcattctaaattcttaccttctttcaaaacttaacatgacccagaaggtaaaataacagtatgaaaatgccttaatctttaggcaaaacagttacatgtgaatacccagtttcccagtgcaaagagaacgtagcaccaattgttgatgcagacataacagtgtattgtttattgtgatcaaacaaacaatctgactaatgggttgtgtatttagcctattaaaattacagtagcagtgatgacagctttatagtgcagattatattataccatattgattgccaagttggataatcccacccattgaatacatagtaaaggagtccccagctacatttatgcatacacttcttggatttattaatgctatagttctatgaaatccatgagtaaatatagaaacattgaaattccttctctctctttagagttttcttggtacgggatagtcagagtaaccccaaaactttcgtactgtcaatgagtcatggacaaaaaataaagcactttcaaattataccagtaagtaattcgtgatttcacatttgtgtattagaaatgaccttaatgcataagcttttgatcttaatgcataagcttttggaaactttggttttcttttggtctttttattaaatataatttggcagcttgtgctttgactagagttaactttggcagaaatgattttatgagcctgaattaatataagaaatacaggaattgtaaaaattaaattttcctttttctatgaaatatgatttagcaatattgtatagaccccatgccacctattgttaaaagggcactaaagcttctttctcctgaattccactaacggctctttagaaaacattactttaaagccttttctcctctcttctctcaaaaatgttttttttgttttgttttgtttttaatggctatggctagaaacagagattctatggaactggtgaagacttctgaacacatttttaaaagttctgtgattcggcttctctgtgacacacaacttgctttgggatttctgttgcctcttctgctgtgtgtctgtgtgggtgtgcatgtatgtatgtgatgtgtatagtatattggaactgaatggtggggagtgaagattcagtctttttggaaaggtattccatagtattgctaaattactagtgcgtccttttgaattgcctctttttggagttatccaaaggctatataaaatatcctccctacttcttttattttgtgatcaatgtccccagcaaatacgaattgtttagtaccagaagacttcactgatttaaaaaaaagaaaactgacagaatgacattccattagcataatatgtgattacttcagaataaatctcataaaattatgtaaatattcatttttgtggctaagtagacaacatttagaaaaggaaattaatttctcaagtgggagcattaaaatcttcatttacttttactctgaatattgtagatttctttcattgattcaaaatattcatactgtctttactaacagaatgctgggagaattagaactagatgaagtagagtagcagtgcttctcagggatcagctgatatttcttttaaatgcaagtgatgttaaaaaaaacaagtagatatgccgtaacattcttttcactgtcttttagttttataaacttggcagttttggcatgtggagatagtttgcaatcgaatatgattgtccttctgtgtaatttatcctctttacttatttgttgcttttctttttgcaggtagaagatgacggtgaaatgttccacacactggatgatggccacacaagatttacagatctaatacagctggtggagttctatcaactcaataagggcgttcttccttgcaagttgaaacattattgtgctaggattgctctctagacaagccagaagtgacttattaaactattgaaggaaaaggactcaagaaaaataataaaagaccataaataagggcgaaaacattaccatgtgaaaagaatgtatttcacctgcaagttacaaaaaaatagtttgtgcattgcaaataagcaaagacttggattgactttacattcatcatttaaaattcattagttaaaattaaaccttaggaaaaaaatgac

SEQ ID NO: 15609 - DNA, 48478 bp, Homo sapiens
gagagctaacttggggtcttttcccaaggtggatgtagaagcgggctccggcgtcccactctcccttccatatgggcttagcgtctgggtcactgagaacgacgtctgaatagggccctgggtccttgccatggatgaatgtggttcccgcatccgccggcgggtgtctctccccaaaaggaaccgtccaagcttggggtgtatttttggcgctcccaccgcggccgagctcgtgcccggagatgaggggaaagaggaggaggaaatggtggctgagaacaggaggcggaaaaccgcgggcgtactgccggttgaggtacagccccttctactctcagattccccggaatgtctcgtccttggaggtggtgatacaaacccggacctcctacgtcacatgcccactgacagaggggtgggagaccaggtacggaggacttggaacttgaaactgcaaacttttggcatccttcccagatgcaaagagttgaccagttttatcgccttcgtttacttctctcgtcttcgttaccactgttaatcggcacttaggaggtattgattgccttgttatttacatttctatataaatatgaaatgtaaaccccgagacataaaagttgtgcacgcagcagttaagtggcatgactgagacacaaatctaggcttccagataactgcagctcctactgtacaaataaaatctgctgtttattgaagacccgttatgttaagctagttatattatctagattttacgacagtaatcaggccctgaaaagttgagatagtacagttcttgctccaaatcctgttgtcttaatcactttactatattgctgcctccaggtttgtgtgtcttctgtgtagcagaccactccaagtcagtattcagtttctcagtctcaattccaaattcctaggaactccttggagtgtctagtggtacaaccatgtttctgttagaggccagtcactgtagattgtagtctgggagggaagcgctgcagttatcagaaacttcgaatgcgctgacatttcagtagacgtctaccagtcttcctgctgttttagtacagctttaagaattacaatctggccgtgtgcagtggctcatgcctataatcccagtgctttaggaggcagagatgggaggatcacttaagcccagaagttcgcgttcaaaaccagcctaggcaacagagacccagtctctacaaaaaaaaaaaaaaatttttttttcttaattagccgggtgtggtggcctgcacctgtagtcctagctacttgggaggctgaggcaggaggatcgcttgagcccaggatgtcaagactgcagtgagctgtgatcgtgcagtggctggagccactgtgctccagcctgggtgacagagccagaccctgtctcaaaaattagaatctcagtatcatcgtaacactcctgaacctgctgtttaggcaagtaatttaacctctttgggcctccatttcttcagctgtaagatatctatttacatataggtctgtgatccatatgtgaccatataattatatacttggtacagccctaggctgaagtgttttttgggggttttgtttgtttgtttgttttggtttttttgagacagagtcccactctgttgcccaggttggagtgcaatggcgcgatctgggcttaccgcaacctgcgcttcccaggttcaagcaattctcctgcctgagcctccgagtagctgggattacaggagcatgccactatgcccggctaatttttgtattttctgtagacacggggtttgaccatgttggccaggctggtgaagcttttattcttaatgaaactggaattgaccataagcgtttttgttctctttgcagcctaatgacagtgaagtggacatgtttggtgactatgatagctttactgaaaactcctttatagctcaagttgacgacctggaacaaaaatatatgcaactccctgaacataagaaacatgctacagactttgccactgaaaatctttgctcggaaagtatcaaaaacaaactcagcattactaccataggcaaccttactgaattacaaactgataagcacacagagaaccagagtggatatgaaggtgtcactattgaacctggagctgatcttttgtatgatgtaccttcctcacaggctatatactttgaaaatttgcagaactcttcaaatgatttgggtgatcattctatgaaagaaagggattggaagtcatcctctcacaacactgtgaatgaggaactgccccataattgcatagagcaaccccagcaaaatgatgagtcctcttccaaagtcagaactagttcagatatgaacaggagaaaaagtattaaagatcatctaaaaaatgccatgactggaaatgcgaaggcccagacaccaatattttctagaagtaaacagctcaaagacactctcctatctgaggaaattaatgttgctaagaaaacagttgagtcatcatcaaatgaccttggtcctttttattcattacccagcaaagtgagagacctttatgcccaattcaagggaattgaaaaattatatggtaatgctttttgctggaataaaaaaatttttttcctatcattaccataatattagtgcaagtaaatagaagcaaatgctttcatggtccatactgtttctcattttgaaaacaaaagatcagtgatctctcagccccttccattcctacctgtcctgctaccactgaacctctttccttccctcacagtcacacttatcaaaccagttatcctttctgtctgtttccttacctgacataattcctctaattcctcatctataagaaagggataataagttgttagcaagtcagattctggttcaaagacatgccaaattcaatgttggtaatgattttcaataattatattggtagcttctaagtaagaactttagtaaattaccccactctaattctgggttctgtgctctcattctctcacttaagatctgatgactgagacgtctaaacacagtgttacttttaatgtttaccttacctgacttctcaataacttacctgatgctattgactacacccttcttgaaattcttgtttctggatgtccttacaaccactcctgttttttgaccccgattgtctagtagagatcctcagctttcttagttgtatttccttggctggctctgtcttctctaccaaaacctagctgttgtggtatgtctttgacactcacatgtcttgagtgaaagaagtcagttattagtaatactgttgattaaaccaaacatctttccccccacaccagcagccgcagctacctctccccacgggtgcatccctgccaccacccagatgctctgccttgtgctgcctttcccaaagctagacatctttaaagacagctgcaattaagttttaagtcagggatgtccaatcttttggcttccttgggccactttggaaaaagtattgtcttgagccacaataaaatacagtaacacgatagctgatgagccaagaaaaaaaattgcaaaaaaaaaaatctcataatgttttaagaaagtttacaaatttgtgttgggccacattcaaagccattctgggcctcatgagggccgtgggttggacaaacttgttttaagtgcaaagaagcaataatattaagaaggtatcttgtaatgtttttcaaaaatccagggtccttgcatatatttcagatatgtgtcattttagaccaagaagggacagttgctgccatactggagggtcagccccatcaaccttccacttcgtaagttttctggaactcctgttaggatcttatgaatgatatgaaaacttgggttcttgcagagaagacaatcaggttggagaagcagaactacaggaaacaaagtctaataaaagactctacaagaatccaaattgtgaggttcatgacttaagagctaatggtgtgtgttgccctggaagtagacgttaactttcttccctctgttcttccctctgtttttctgctagcaccttgctttttgtttagtctgccagaatgaatatcctgaggacaaggctctatctaactcatctttttgtttttgtttttgtttttttgtttttttttgagacggagtctcgcgtgttgcccaggctggagtgcagtggcgcatctcagctcactgcaagctccgcctcctgggttcgcgccattttcctgcatcagactccccagtagctgggactacaggcgcccgccaccacgcccggctaattttttttttgtatttttagtagagacaaggtttcaccgtgttagccaggatggtctcgatctcctgaccttgtgatccgcctgcctcagcctcccaaagtgctgggattacaggcgtgagccaccgagcccggcctaactcatctttttcttaactagcactgtgcctggtatactctggtaggttctcaactgctggggattgtcacttaaaaatgcaaccttagcactttgggcctagttcctcatctataaaaagggataatttttttttgcaagttagagtctgtgttaaggacatgccaaattagatgttggtaatgattgtcagtaattacattggtagcttctaagtaagaacttcagtaaataacaactttttaaatctttttacctctaaatctggcttaataacatgaccagattaaagcataaatgcatgtgctactttttattaagctaaagcggtggttctcaagtgtggttcctggactgcagcatcaacatcacctggaaatttgttgaagtgcatgttctcagacacttccctagacctactgcgtcagaacctctaggaatacgacctggcaatctgtgatcgtggctcactacagcgtcaacctcccaggctcaagcaatcctcccacttcagcctcccaagtcgtggggactataggcatgcgccaccatacccagctaatttttttatattttgtagagatagggtctcattttgttgcctaggctggtcctgaactcctgggcttaagcagtcctgctgtctcagcctcccaaagggttggaattacagatatgagccattgtacccggctagtttttttttttttttttgatgtgaagattgtattcataaatattagttattttgtcatgttatgcttaaaaatctgaattggataaaatgtggctatggttaagttatactttggcataaacatctaatttgataactcgggtgataccaatctgaagtatttttcaatatttattgaatattaaatttaagtatttttgaaatatttttaaagaaaatattcacagtcacttgtagtatttgggaatcacccaaaagcacaataagttaaagttacttgtaactgtcattcagatataactttcttttttttttttaatagagatgggctcatcttgaaatcctggtctcaagtgatcctcttgccttaggctcccaaagtgctgggattacagacatgatccaccactccggggcaatgatctgcttttttttttttttttttttttttttttttttaaacttaactgtatattgaacatacatagatccatctattcttcatttttaaactgcaaagaatctcattggttgattgtacaataattcattcggcctttacccccaccaccatggcactttgttacctacaaacaatgctgtgttttatatgctttggcttccgttctatagatgtagaatcccaaaagtaatactaccagatcaaaggcaatgtgcagttctattttatactaggttactttccacaaggattctagcagtttatgttctcacaaccgtacatgaaaatggctgtttttccccacattagtcagctctggattttgcatgtgtggggctttttttttttttgatagttatttgttttttattttaaaaatttattttgccaacccagtagagaacagctgagcatcttctcatgtatttattggccatttgcatttctgctgcttattggccatgtatttattggccatttgccgtctgctgtgaaatgtcttaaattttttgcccatttttctagtgataaaacactgaagcacatttttaaagacttctgatgatttttattgtcagattatcctacagagtaattaatactagttttcacacggtatcttggatctgatctattttcatgaatcccgccttgccaaattgtgggaatcctaggcgtgtcagttaataatcctagtcttttgtggtttaaagagttttaacagtttaaaatggttttggacccattcgaagttcaggtctccatgagagctagttaaagtttttattagtttgtgtaaaacctaatagatttgtttccctccttcccctgcttctctctgagatggcttttggctgaatgaggaagggaagcttatataatctccttgcagaacataagaggaagacattcgaattcacacaggtccttgtactgtccctttgttcctctgatatctcagatggcactccttgtccacgaggctgctacctgccctgctgtaatattggacccaagtctgcagctggtgaataaatgggctggttgcccaccttgctgcctaggcctgaactaggctctcactggctgtactacttgcacatttgggatttttgacatgtaacattggttataattaaatttatccttatgagaggattgctccacaggaagggatttgattttttttcttagaaaacttttgagtttcaaagtttggaaggggaaaataatgcctttttttttttaattccacagaatggcaacatacttgtttaacattgaattctgtgcaagaaagaaaaaatttaatatattccttgccaacaagtggtggaaaaaccctcgtggctgagattttaatgctgcaagaactgctttgctgtcggaaagatgttttaatgattcttccatatgtggcaattgtccaagaaaaggtgtgtgtgtgtgtatgttttaaaacaaatgttatttgctagtactttgacgttaagatctgtaaatgtgataactttgtattgttgagaagtacctctttttttttttttttgagatggagtcttgctctgtcacccaggttggagtgcagtggcaccatcttggctcactgcaacctccgcctcccaggttcaagcgattctcctgcctcagcctcctgagtagctgggattacaggcccatgccaccatacccagccaatttttgtgtttttagtagaggcggggtttcaccatattggccaggctggtctcaaactcctgatctccagtgatccacccgcctcagcctcccaaagtgctggtattacaggcatgagccactgcgcctggtgagaagtacctcttaatgatggagaattaatatttttagaatgtataaaagcagtatacactacctaaaatatcttcaaatactaattaccagttgttgaaagttttactttttctaaactggtggattaaacatcatcttaaatgttctattactatttaccctgctttttcttttttgagatgtagtctccctctgtcgcccaggctggagtgcagtggcacaatctctgctcactgcaacctccgcctcttgggttcaagtgattctcctgcctcagcttcccaagtagctaggattgcaggtgtgtgccaccatgcctggctaatttttgtatttttagtagagatgggttttcatcatgttggacaggctggtctcgaacttctgacctaaagtgatcctcccacctcggccccccaaagtgctgggattacaggtgtgagccactgtgcccggccttaccttgctttttcaagcagaaactattactaaaatgagttattctgatgcttttttttttttttttgagacagtcttgctctatcacccaggctggagtgcagtggcatgatctcagctcactgcaacccccacctcccagactcaagtaattctcatgccccacgaccccacccagcagccagaatcgcaagcacacgccaccacgcccggctaatttttttatttttggtagagatgatgtctcgccatgttggccaggctgatctcaaacgcctgtcctcaagtgatccacctgcctcagcctcctaaaatgctgagattacaggcatgagccaacacacccctgatgctttttggtatcaaaggcgccagttgaaatttattttcacatgtattttagaagttgcatttattttgcaaagatcgagacattacagcatttcttacgtatgtcttgcctgtgaccttgttcctgttgatgggtattaaacactactttagcttttttgaaccccatgagcacctaatggggggttttttacttgtgttttttggttttgtttatttatttatttttgagtcagggtcttgctctgtcgcccaggctggagtgcagtggcatgaccaaggcttactgcagcctcaattctctggactcaggcagtcctcccacctcagcttcccaagtagctgagactacaggcctgtgccaccacagccagcgaattttttattttttatagagatgaggtctcactgtgttgcccaggctggtctcaccttcctgggctcaagtgatcttcccgcctcagcctcccaaggtactgggattacaggcattggccacaatgcctggccaatttttctttattttaactaatattctagatttcaggtttgtcaagttttggtatagaactcggtttctttgttgaagaatatgctggaagcaaaggaagatttcctccaactaaaagaagggaaaagaaatcactctatattgccactattgaaaaaggacatagcttggtgaactccttgattgaaactggaagaattgacagtctgggtctggttgttgtagacgaggttggttaatacttttgtaatttgtcaatatttttattatactaaatatttattattctggttattgtgtggatctacttagtaccttagtacctctataaaaataaatttatttgaaaatatagacaatataggtgaagacattctatgcttgataatcttaaatttggttttgtgtcaagtgtttcttgaagtgtgaacacgtatgtgtgtagtatacaattttattggctgggcgtggtggctcatgcctgtaatcctagcactttgggaggccgaggcaggtgaatcacttgatgttaggagttcaagaccagcctggccaacaggtgaaaccctgtctctactaaaaatacaaaaattagccgggcgtggtggtgggcgcctgtaatcccagccactcgggaggctgaggcaggagaatcgctgtaacccaggaggtggaggttgcagtgagctaggatcacgccattgcactccagcctgggggtcaagagccaaactccgtttaaaaaaaaaatttttttagtagtacttatgaatcccagatttataaggattttgtaccaaaagctcattaacctaaataccagtgaaataatatacatgtattatagttgttatattcaaaatacttaaaagttataagcaactctttacaaacaaatttcatatgaatatatgcatgttttatatgagcactatatgaagatttacttctctgtcctttttaaaaaaaatctcgaagttgcacatgattggtgaaggaagccgtggagctacactggaaatgaccctagcaaaaatcctctacactagcagtaagtattttttcaaatgaggtcatgaattgatttataatcaagagacttataaaatacttaattctatcactagctacagtatgtaacctaaagcaagatacttaagctttttgcctttgttttaaaatttctaatgaatagaattttgaaggtaaatgaaattggtatttgaagaagtcctctattattatccgccacttactagctatgtgtgcccaggcacatccctcaacctctatgtttctttatctgtaaaacaaggataataatggtaccagcctgatgggattgttgtaaggatagtgtgagttaacacatgtattgcattcagcagtgcttagcacactgcattcagtaagggtttgctgctgctactgtggccatcatcatcatcaccataataatacatataacataaatattataataataatattgtaaagcgatacatttaaataggtcagtttaaggagctattttgcagcatcaggtagtctttaaagtttatgaaaaatttattctaaatgtcataacctactattgatatgctattgcaatatttaccttatatatggaaaaattaactataaaggtcaaatcttaaaaagtatttaaaaaatttcaacagcaataatatttaagcaggttatagcattttataattgttcattcaaaaaaatattgatcacctactgtgtgctaggcactattttaagtgctagggatacagcagtgaataaaatagtccctgctttcatcaagcctgtattttagggcatccctatttgaatattctctgaacagctaagcctaactaaggcttagtctgagccaaactcatttccttcaaagccgttcttcagcctgaattctcagccaccactctccagccagccaagccagggtcctacatattctatcagcaaccaaatcctatctggtttacctcataaatatattgttacttctgtctctcctatccctcattaccactaagtctttagttcagtacctcatcctttctacctggattgccacagaaatcaccaagttcttctgtgtacccactgcccttcatccaccaaatccatctttctttagcgcaagaagaatgatctttcccaaatgcaaatccaattagtttattttactgtttaccattctttaatagctcccctttgctttctgcataaatccctaatttcttagcacagcctttcttgatttgaccccatgcccacctcttcagctttgtagtctatccttatggaatgagaaggatactcccacttattcctctttcagtgagtttcttgaatgatcatttcaagacataggagcaatgaagaaacatttgcaaagaaggcctatttgggttttcattcaatagttaagtctatagaaagcagccattttgtattgcccaggatgtcatatggcttcataagcttcactccacctttatttaaaacaacatcaacaaaaactatagtcccaactactcgggaggttggggcaaggagaactgcttgaacccaggaggtggaggttgcagtgagccgagatcatgccactgcactccagcctgggcaacagagcaagactctgtctcaaaaaaataaataaataaataaaattaaaagttagcttgatagcaagatctcatagaggacttttcatgggccaagagttcgagacgcatttagccctctatcctactacctctacatctgtctatagccatacctgtggaacatatcatagctcttcgtaaaggggatccagatagacagttataagcagatttatactcatttattattgtttagaagccttaatatcctagttcttgccaagtttgaaactctgtaaacttctaagtagtaactttcaggatacctgaaaaatttcattcttcaaatgccagattaatactctggtaatatatttgtagttttctttttttaagaggtcaggtctcactgttgcccaagctgcagtgcagtgacacaatcatggctcactgcagccttgacttcctgggctcaagcgatcctcccacctcagcctcctaagtagctgggactacaggcgtgcactaccatgcccaggtaatttttaatttttttgtagagatgaggtcttactatgttgcccaggctagtgttgaagtcctgccctcaagcgatcttcccacctcagcctccgaaagtgttgagattacagatgtgagccaggcacccagctatttgtatttttcttacttacctctcccacccctttcccaaatcactcaggaagaattcagagcacaaaagacttgctaaaattactttatgatatattaaataacatattttccttaacactttggcttttgtttgtttgtgttttagaaacgactcaaattattggtatgagtgcaacattaaacaatgttgaagacctacaaaagtttcttcaagcagaatattataccagtcaatttagaccagtatgtacctaaggtttgcactgtattgatttgtttcgtattcatctaacttagaaatgaaagtagtaaacataggatttaaagaattctgtagagtagtgaaggggcatattttactcaccatgactatatgctaataagaggttgtgtatagagaatttaagagtttgtgtataggtcagggatcttgggttgggtcactaatgtatctatagcctggcccacaggctgtcaatgaacgttcattgaatgagttttcccaaacccccattttattttttcacttcttattctgtaaactaaatttttttatttggcaaaattttagtgagacatgttttgagttattggcacattaaaaaatatatcttaaaatttaaaatatttttaaatatttatatgttagtagttataatacttttttaataagttaaggcttcacatggatttacatataaactcctcaacagcagcattcccaaaatgcttgaagaaagtaaacaaatgtaatttgtggttatttgaaaatagcttgtaatgtatatatatttttgtgtgcactactagtgtgtatgttttgtgcctcaatagtttttcagtgtctaaataggttttcagaaaatatttttttaattgccaaattttaatttgaaatttgatgttttagctgggtgcagtggctcacacctgcaatgccaacactttaagaggccggggcatgagaattgcttgagtccaggagttcaagaccagcctgggcaacatggcgagacccctgtctctacaaaaaattaaaaaattagggcagccaggcgcggtggctcacacctgtaatcccagcactttgggaggccgaggtgggcagatcacgaggtcaagagatcgagaccatcctggccaacatggtgaaaccccgactctactaaaaaatacaaaaattagcagggcatggtgacgcacgcctgtagtcccagctactctggaggctgaggcaggagaatcgcttgaacccagtggggcgaaggttgcagcaagccgagattgcgccactgcactccagccttgcaagagagagaaaaaaaaaattagagcatattagcactcacatatagtcccagctacttgagagggtgagatgggaggatcacttaagcccagaaggttgaggatacagtaagctgtgtttgtgccgctacaccccagcctggactacagagtgagaccctgtctcaaaaaaaaaaaaaaaaaaaaaaaaattgatgtttttacatttgaaccagataggaacattttcaagagatattttttaacttaattgccacagtagacattgttattgttattataaaatgcaatgagctgtgtttacaaactgtttttgtcgacaaataaagaaaaatagtgtggtggtatttagaattaaaactgatgaataataagacagaaagttttggctggacacggtggctcatgcatgtaatcctagcactttgagaggctgtggcaagaggatcgcttgagcccaggagttcaagaccagcctcagcaacatagaggaaccccatctctataaaaattagcctggcgtggtagcgcatgcctgtcatcccagctactcaggaggctgaggtaggaggatagcatgagccctggaggttgaggctgcagtgggctgtgatcatgctactgcactccaagcctgggtgatagagtgagaccctgtctcaaaaaaaaaaaaaaaaaaaagacaaagttttagatcttgagacataaaacagatgataccttagtaaaagttaagaacaccaagactcacactttttgtgacaaatacagaagtgtgtggtttcttttttggatatgatgtttactgaattcaaacatatttcttcaaggatattgatctctattttgattttaagggaaaaagagaccaaaacagaagaagaagaaatggtaaagcaagaacttttaagttgaagcatgttttatgtatcttagaaaagctaaactcttttatagctgtcctttcttaacctattttacaatatttaaaacactggaaagatgaatttatatgtcgtattaattgcaaatgtccttttaattcaaggttgagttaaaagaatatctgaaaataaatgatacaatatatgaagttgacagcaaagctgagaatggcatgactttttcacgtcttcttaattataaggtaacattgataacatttaaattccaggttaccagactttgtgtctggggcacaacaagagtttccaatggattccgtagaatagtctagatttttcagagaaacagctgatgcttgacatttgttggacaccatgcagactgccagttcaagatagctcgtttccagtttcaacattagatcacaccatattcttttctatgacatcatatctttgtgaagttggggtttttacagttgctgtaagcaagtaccgtgtgaaaatcaatctggaacagaagagaatagctgtgtccagtcttatttcagattttgaaagacagtaccaagttgtgcacacatcccattagtgagctgttgtggttatttaagaatgaaataaaaatattttttcactcaactgatgtgtattatttattctaacagctactaaattgtgaggaagtacgtatttattaagttgtttggacctcactatttaattaacaaaactgtaaagtatttctttgggccctggggctgtgaacaaagaaaatttggaaaactctcctgtaaatgtttattcatacaacaacaacaacaaaagaataatttatggaccatgtagttcagatattggtgtataaaatgttaatgtctactatgtaaattttagtgttttatgacttgtatgaaggatattaaaaaggggaagaagggattatacagtagttttagaattctgtgaagatgtgttattctacagctatgtctttagtaaagttgaagaaatagattttaaataacttcacattttttcttcatgttctttgtgttcctcatgtgactacaaaaattgtcataattcagtagtatgattgaatctgtgtttttgaaaacttaatggttgtaaagggcatgtcttatttacacagtccgttaactattattaggatcaatctgtgtttctctctgtggacttttttgttctgctgtggtggagatgggcatgtagtgaggctattaataacattaactattttcacttctttaattttctttaattcacttgtttaattctaggtttttttttagactaactagacctaagaaaatcataataacctaaaagaaaagtgagattgaacattttgatgtttaatatagatttcatcttttcttttaaatgatcagatttattaaattagaagtttagaattatagatggtttatttacctttcaaatcacactggtaaaaaattgacagggtttcatgtttactaaccactttgttcctacatcttgttgttttgcagtattctgataccctaaaaaagatggatcctgatcacttggtagcattggtgacagaagttattcccaattattcctgcttagttttttgtcctagtaagaagaactgtgaaaatgtagcagaaatgatatgcaaatttttaagcaagtatgttaatattttttaaatagcctgttttatttttattaggaattacagactatgtattaattttattgggcaaacactaattatgccttgcaaaacatcatattaagttgttttagtatactgaaggccttgaccttgaagaaagaaattttaactgtgaaaaatcacatgtgaaatagccagagaaacattctaaggtggctgggcaccatggctcatgcctgtaatcccagcactttgggaggccgaggtgggtggatcacttgaggtcaggagtttgagacgagcctggccaacacggtgaaaccccatctctactaaaaatacaaaaaattagctgggtgtggtgccttgcacctataatcccagctactggggaggctgagacatgagaatctgttggacccgggaggcggaggttgcagttagctgagatcgcactactgcactccagcctgcgtgacacagcgagactccatcaaaaaaaaaaaagaagaccaggcacggtggctcatgcctgtaatcccagcactttgggaagccaaggtgtgcggatcatgaggtcaggagttcaagaccagcctggccaacatagtgaaatcctgtctctactgaaaataccaaattagctgggtgtggtggcgtgcacctgtagtcctagctactcgggaggctaaggcgggagaatcacttgaacctgggaggcagaggttgcagtgagctgagaccacaccattgcactccagcctgggtgacagagggagactcagtctcaaaaagaaaaggaaaaaaaaaagacaaaaccctaagactatatgtatgagaatgttaagtaatattaggtcagtgattcaaaaccttgggtgcatagtgaatcatcttggaggcttttaaaaattccaaagtccaggctacatcttagacaaatcagaatctctgggagtgacacccagatatcattttgtaaagctccccaggcaagtccaacatatagccaaggacaggaacaactggcttagtcagtcaaaggactaatcactgttaccactgtggaaatgaattgtatcttccattgcctttttttctcttttccttttttttttttttttttcctgagacagggtctcactctgtcacctatgctggaatgcagtagcacaaattcagctagctcactgcagcctctgtctcctgggctcaagtgatcctcctacctcagcctcccaagtagctgggactacaggcacacaccaccactcccaactaattttttgtaattttcatggagatagtatttcaccatgttgcccaggctggtttcgaactcctgagctcaagcaatccgccccccatagcctcccaaagtgctggaattacaggcgtgagccactgcgcctggcctgcctttgttttcttagtaaacttcacacttagttgtatggacatttggatataatttcctgagtaagaaatgtgttgtcttataattttgtagtatcttaatattggctctgtcgtattcatagagataagtatgaagttactttaactactaacagttcagttttttatacacctgtttgtcccatgtgtggttttatcattttctgagatttctttcagccccttagctaatgctgtatcactattcatagtctattaacctgaatgctaatctagtcaacctctacctcctctttcaatcctactatcatggattggtctaagatagacttaaatttattgaatagcaaaatataaaaatgtttggaataagatgaaggagttgctcattttggtaacagtctgcttttacaatgattttgattataaaagcttaaggaaattaaattatcattaaaaaaattctcagtaaatcattcattttcttagagtaattcaaggtaataagatggagacactggctaagtgatggaaacattgtaggatgtgaagtttctaaagtgcaagtgtttaggcagtgttttaccatggaagtatgatttaataatatgtatgtttccatcttcagaaaagaaaatttatgtctttaaaaaaactatcccctataaagatatatgttataaagaaaaaaacagttataacatccagagcaaaggtctaaacctggtgtccatggattcaaaggaagtacaggaatgaattttaggaaatccacgaaccctctgaaattatatgtaaagtgttgtatttatgtaaatagttatatttttccttttttttttttttttttttagacaaggctttgctctttcacccaggctggtaggttcatagctcattgcaacctcaaactcccgggttcaagcaatcatcccacctcatcctcccccatagcctggaactgcaggtgcatgcaccaccatgcccggctaatttttgttattttttgtagaggtggtcttgcttcactgcccaagctgatcttgaactcttgggctcaagcaatccttctgcctctacctcccaaagtgctgagattacaggcatgagccatcgcatttcgcctttccttagttttgataagattttcacagggttctgtaatccacaaaaagattgagagactgcctaatagttaatgaagtcagaatcaaaattctaagaacatttaatgtacttaactcaatggaaatagtacattaaagaatgtttacattagcatctactaaaatgaaaatggtagaaattttgtcactaaaagatcaagggctcatatttctaacagatctttttcatagggaatatctgaaacataaggagaaagaaaaatgtgaggtgattaagaacttgaagaatattggcaatggcaacctgtgtcctgttttaaagcgcactatcccatttggagttgcctatcaccacagtggcttaacaagtgatgaaaggaaactcttggaggaggcctactccacaggagtgctctgtctttttacctgcacatctaccctagcggcaggtgtcaacctaccagctcgaaggtaagagataagtaagtgttgaccaggctcagaacttttccatttctagcttgcgaggagttttgttgttttatgctttctcagtagtggatgagaatttatcaaatgttcttttagcatatgctgagttgattggttggtttattttctttaatattttaatgaatatgtaatgaaatatgtaatgaaaaataacgttaatagatttcttgatattagaattccatcctttctgctctttatatctggttttgatgttagggtctattaatctggttttgtagaaatagttggcaagtgttttaccttttttatgatatgaaagagtttatttaacatagagatttccttgaaatcttggagagctgatccataggcaatttgtgtctaatatatgtattttaaagcaggcccttgattacctttccagttattaccaaaggtgtaggcctgtgtaattgacttctcccctttataatttatgatcatggggtattttgctaataaatgatcaatttttataaactttccatgagtgtttaaaaaaatatgtattttcagttgaatatgcagttttgtacatctcagcgagatcacagaggttcattgtgttatcggcttctctattttcttactatatttgattccttggtctatcaatttcagagaagtgtgttagtctcccactttaattatgtagttatcagtttctcctttttgcatctctagaagttattactttttatatttcaaaactatttagatatacaaaggtttacttcaaatatcttattgccgaattataccttttatcaatacaataaatacttgtttttctcatttaataattttgctttgaataccaggactcattttttttttttgccacgtatgtacctttttccattcttttattttcaatttctgtctctcattaagttttccatttttcagacaattgaagaaaaaaatgaaagttatatatcctgtttctattattccagtggttactcttaaaattttaagttgtaaccaaacattttttattactttagaattaatcaataactgtcctctcctgaacataaaaagaggcttagcatgtccttagtatattctactctgccccatgaatgttgcaattacttagaattttagtgccagatttaaacattttctttcatcttatgtagtatttaaacttacctgtaaatcatacttcttttttgcttaccactgcctcttatatcccacatctttcttctctgatttttttttttttaattttgccttccttgagtaatcctttttagaataccgctttagggggtaaaacattttgactctttgcatagttgaagatatctgtattttggcctcacacttttacacttcactagcaaaagaattctagattcaatttttttcctttagggattttgtaaatattgttccatattttctagaggccaatgttgctcatttttgtctctgcatggattttctgtttttcttttccagaaacttttagacttttctctttaacctcccaattttgtcatggtgtataataatagttgtaattactacattcccctccctttcatgtagtaacaactttacatgcattgacttgatacagcttcacaataactctgtgaggaaggtcatattttattacacacctattatagaaggggaaactgaggcactaaataattaaataattttcccaactttaaaaagttacataactttttcccaactcattttccaacaaatgagttttaaagccagtgtttgaacccaggaagtttgattttacaatcccaacagtactacttttcattcatagggcttagcacttgggtggatgcttttaatctaagctttatgcctttcttctttgagtaattttttttctgttatttctttttcttcccattatctctgttccttgcttttataatttcacttaggcagggttgaggcctcttagattcagctttcgtatctcttttcttacacatttttcagaatgtggaagaatgtaagcacacgtttgtgccatgtaatttttttcaactttaccttccatatcaaaaaatcagtttttttgtaatcccagcactttgggaggcaaaggtaggaggattgcttgagcccaggagtttgagaccagtctggacaacatagcaagacctcatctctactaaaaaattaaaaacttagctgggcatggtggcatacacttgtgatcccagctgctcgagaggctgaggtgggaagattgcttgagcccaggacatcgaggctgcagttagctatgattgtaccactgcactccagcctgggcaacagtgagaccctgtctcaaaaaaaaaaatgagtttttaactgatatccattaactacattaactgtatccattaactattttcattcattattcagttcttcaattgaattttcttttttgtgagacagagtcttactctgttgcccagtggccaggctggagtgcagtggtgcggtctcggctcactgcaacctctgtctcctgggttcaagcgattctcctgcctcagcctcccaagtagctgggattacaggcgcccaccaccacacctggctaatttttatatttttagtagagtcggggtttcgccatgttggccaggctggtctcaaactcctgacctcaggtgatctgcccaccgtggcctcccgaagtgctagattgacaggtgtgagccaccacacctggcccttcaaattttttatgaatttttaaataaagttaatttttttttatttctaagaactctcttttgttgttctttccttataatagtctactccttttttttttttttttgagacagagtctcgctttgtctccaggttggagtgcagtggcatgatatctgctcactgcaacctctgcctcccgggttcaagtgattctcctgcctcagcctcccaagtagctgggattacaggcacacaacacaatgttttttagtttttgtgtttttagtagagacggggtttcaccatgttggccagggtggtcttaatctattgacctcgtgatcctcctgccttcgccttccaaagtgctgggatttacaggcatgagctaccacacacggccaatagtctactccttttttttttttttttttttttgagacggagtctcgctctgtcacccaggctggagtgcagtggcgcaatctccgctcactgcaagctccgcctcctgggttcacaccagtctcctgcctcagcctcctgagtagctgggactacaggcgcctgccaccacgaccagctaatttttttatttttagtagagacggggtttcactgtgttagccaggatggtctccatctcctgacctcgtgatccgcccccctcagcctctcaaagtgctgggattacaggcgtgagccaccacgccccgccaatagtctactcttatattgtggatataatactctttggaattttctgttaatgctaattaggatttttaaaagttctcttctgatccctatattatctggttttgtggtcacttattctgtatattcatgttatgtttcttttatgttattagttttcttcaagtatttggtaatcttttctgcatatgagatttataaataaagaggaagttgactagtataggtaaacaataggttttttcttccctttggataagaaagctgactaactgactatagacttctgtatatatgaacataattgaaattgctttttttttttaagagatggggtttcactctgttgcccaggctggagtgcagtgatgtaatcacgatttactgcagcctcaacctcctaggctcaagtgatcctcccaccttagcctcccaagtatctgggactacaggggcacactaccatgcccagccagttttttgttgttgttgttgttgtttttgtagagactgcatctcactatattgcccaagctggtctcaaactcctggactcaagcaaacctcccacatcagccctccaaagtgctgggattacaggcatgagccactgagcctggctgaaatcaccatttttgtaggtcaaaaacagttgacatctgcaattttatacagttcaaaataataaaaattcataaatagatatgtatatgttagtggtgtatggtcatattttttatttatggagtataaagtccaaacgctttggagactactgctacagattgatcataggcattgcagctgggcagacttgagttcaaatgatagctctggtaattactaattttttagtttaggataagtcagttaactgagttgtaattaattcctttataaaaatgaaataaaaaagtatattataactaagagttttgtaagaattatagataatatgtgtaaaaacctaagaaatcatagattcttggtaaacactagttacctattattttgtgttagtatgtcattaaatttaatatcacaaatatataatgaaattaagaattttttaaattggtgctgtttgctgtagagtatcatttttcattaattccacagagttattttaagagctccctatgttgctaaggaatttttaaagaggaatcaatataaacagatgattggcagagctggtcgtgctggaatagatactattggggagagtatcctcatattgcaagaaaaagacaaacaacaggtaatactcaatttggttggttggttgtttttgtctttttcttggttgttggtctagcccttttatgaaatcatcttttaaaaattaattattaattttctttaaatgatgctttctttcctatatgattaagaattagagtggtttgaaaatgtatgtatttcagacaatgaaaaaatatttttcctatttgtttttcttccatttttaatgaagataaatgttaaattcttttgtctttacttttttggtctccttctggctccacaagatttatgtaaagtataaaatatttatattaaataccatttatttttaataataacacaaggcatggttttgctttaacctttataggtattggagttaataactaaaccattggaaaactgttacagccatcttgttcaggaattcaccaagggaatccaaacattatttctctctttgattggtttgaaggtatttttcttaaattttttatcttattactgttatctgagacaatagaggttaaaaagttatgcaataactttatatatgcaactgtgtagattttatactaattttttatttaataattttttcttttaatttttttctttttaattttgttttctcatccccttcagtgattaatgtaaataatttttaaaagatcatggaatggttaggtgcagtagctcacacctgtgatcccacctcttagggaggctgagacaggaggatcgtttgagcccaggagttcaagaccagcctgggcaacatagcaagaccccatctcaaaaaaaaaaagatcactgaatcctaatgcttggcaagtggttggcacttaataaatacttgaattaatgaaattggcttttttttttcttagagatggggtcttgctatgttggttagattggtcttgaactcttgtcctcaacagtcctcccaccttagcctcccaaagtgctaggattataggcatgagccactgcgcctggcctgttttgtttgtttgtttgtttgttttttctttaatctgggacatggtgatgaaattaactttggaactgagcgtgggtgaacttccaagttggggcatcagtggagaatctggatttgagaagccagaagcagaggctggcccagtgggtttcaattactatgtcaaaaactttttcagggaggaatagaaagataacatgatggtagatagagggatcaagtaaaggttcccctgcccccctgcactcttccacccccagtgttaactctaatcatttaggtaggaaacagtacaaaaacaaagtacattaataatccaaaaaccaagtatcagttcttaaatatcttaaaagtataattttagcttaattgaatactatattaataatgatttttattaaagtgggaagaagcaatagaaaatgtctgtgctccattatatttttcttaccccttatattggtttaatatgaaattacgacttaaattttccagttgaaatagcatcagaattgtaagagagagaaatatacttattgattgactatattttagtataacatgctgatttcattgaaattggctaataaaaattattctaattcagagtcagctctacatctgaatactaaatggagggttaagtattccttatgattgccattgtaagttataaatagtgaataacagtgaaagaacaagaaatggagataggaatgagagagacaaaaataggtagagatcaactatttttaggtaacattttaggcaaaatattgtctgacgctgttttagtggaaacttgtattttttttttcagttctttttttaatttattttgttttttgttttttttttattatactttaagttctagggtacatgtgcacaatgtgcaggtttgttacatatgtatacatgtgccatgttggtgtgctgcacccagaaactgttgtattttcctttttttttttttaatgcaacttttagagctaaaggatgtttttacagttgggtggaatgcagtgcagggaagatccctaaaggaggctgagtgagaattagtgaaaattggttggggagtaaatagcacagttctggagatattgtgaaaaattatttaaagatctatccaaaggagttttggaatgaaaaatgagtacatgttttcataaaaagcatgaatataataactatcatccccctaaattttttgttaatttttaattgccattataaatttatatatgcaactgtgtagatttaatactaattttttatttaaatagctttgaggtatggaaatgagttatcttgattaatatgcattcaaggtgatgccttgaattaaggaaaatgctccaatgatatcctgaattgtttcagattgcaacgaatcttgatgacatctatcatttcatgaatggtacattttttggtgttcagcaaaaggttttattgaaagaaaaaagtctctgggaaataactgttgaatcacttagatacctgacagaaaaaggactcctacaaaaagacactatttataagtctgaagaagaggtccaatataattttcatattacaaagttgggacgtgcttcatttaagggtaagagtttacctaaatcttattgatcataggaaacacattggaaaaaatgaaaattaaattatactttctttaagctgggcacagtggctcacgcctgtaatcccaacactctgggaggccaaggggagcggatcacttgaggttgggagtttgagaccagcctggccaatatagtaaaaccctgtctctactaaaatacaaaaaaaattagccaggcatggtgatacatgcctgtagtcccagctactcgggaggctgaggcacaggaattgtttgaacctgggaggcagaggttgcagtgagtcgagatcacaccactgcactccaggctgggcaacagagccgagactccatctcaaaaataaaaaaataaaaaattatactttctttaagttgtatttataattttatattaattacattaatcttattttataagctgataactccttcaactttcaaaagttgaaaaatgttttgaattataagtactgcagaagtatatagagaataaggtaggcatccctccttcatgcttccctcctagcaaccatacaaatcttaatattctaccaagaataacaatttggtgtatatctttccagacctttactgtacatttcatttcagtgcataatatgtacatatgtacagttttaagtttttgtctttaaacaaataatcatttatattattctgaaactttttataaattaaaaaaattttttttctttttttaaatatggaggcaaaatctcgctatgtttgccagggtggtctcaaacttctcacctaaagtaatcctcctgcctcccaaagtgctgagattacaggcatgagacaacacatttggcctgcaacttgctttttttcctgaatataatgtcttagagattgtttcatgacagtgaataaagtgttgtgggggttgttttggttggtttgtttgtttgcttgtttttgacagggtcttgctctgctgccgaggccaaaatgcagtggcgcaatctcagctcgctgcaaccttcgtctcctgggctcaaatgattctcccacctcagccccgcaagtagctgggactacaggggcatgtcaccatgcctgactaatttttgtatttttagtggagatggggtttcacgatggtgcccaggctgaggcttttttttaatgaaaaataatacatgtctgttgttaaaaaaaaaaaacctaagaactcagaattatgttaaggaaagtgccatattcctgtcccatttcaggagctactactaccagtttgatatgtattcttccaaatatttttatgtgtgtatttatttttcaaatggaatgatcatttaaatatttttttccaaattacatttctcataagatatcatgaacatcttaacagatgagtctctttaaatctatctcatttttcttttaatactacagtcatctatagtatggatgtaccataatttatttaaccattcgatgttgatggacacttgcattcttttttatttttctctgttataaacaaggcgcatggacatctctatgtattttggggtacatatggaaatgtttctctggattagattccccaaaatagttggttcagaaggtatgtacttataaagtgttgatgagtactatcaaaatgacctccaaaatagttatatagtaagatgttataagagattttgaagactttttgctatatttaagcaatttctacacaatatttaaagccatctctttgcccctctggtaattgtgaaagattgaatatttgtatctttcttttaggaactatagatttagcttattgtgacattctgtacagagacttgaagaaaggtcttgaaggacttgtgcttgaaagccttcttcatctaatctacctaacaaccccctatgatctggtttcacagtgtaaccctgattggatgatatacttcaggcaggtgagaatataacgtttttcaacttaggctacttcgtttatgaattattacatgctgttttgttttgttttttagagatgaggctttgccatgttgcccaggctggtctcaaactcctaggctcaagcagtcttcccacattgtcctcccaaagtgctaggattacaagtgtaagccactgtacccggcctattatatgctttttatgaagtgattattcactttttttctctattaaaatatatttggaattggatatttttttctttcagtttttaaaaattataatctggcaacagcatttatggttcgtttaactttaatgttacttttctcttaaatataaacatatttgttattgaaaaaagtaaaggttaaaaaaaagaaaaaaagattatccgtggtcctatttccccacagaaagttactgttatgatcactgcatttgataatgcctagaatgcaaagaaaacagtgaaaaccatctctgatgatttagagtttaattacatgaaagctcggtcagagccaagtatgataatacattaaacccaatgacgttaataactgaaaaggaatatttattttacaacccatcacaaagtagaactgtccatacttattataaagccaagtggtaacatacagtatattatgattttactgtgaacaggctagctgtataaatgtatattagggctgcatgtggtggctcatgcctgtaatcccagcactttgggaggccaaggtgggaggatcacttgaggtctggagtttgagaccagcctgggcaacacggtgaaaccccgtctcttctaaaagaatacagaaattagttggtcatggtggcgcacaccagtagtcccagctactcaggaggctgaggcagtagaatcgcttgaacccaggaggcggaggttgcagtaagctgagatcatgccactgcactccagcctgggtgacagaatgagactgtctcaaaaaaaaaaacaaaaacagaaacaaaaacgtatattagacagaggtagtatacatcttttaatcacaggaaattagctttctttttaatgtcatatttttaaatcattactgtttttttttcttttctccatctcttctcaacttcctgagtttacattactcaggaagtaagttttttttaagtagcactatataatgcaattactctcaaacctttccttctccttcccctcagccatctggtattaaatatagtcatatagtccatggaaaccagtacttgtggctatgcctttaagtaattctaaagtgtgttatatccttgttatatcctaatgatgtaactttaaaacctgcaacatttacaaatatatttatcttgttttttgtatcctgaatcatgagaatgtgatatcaaaagaaatactggatttggttcacatgacagattttttgatgtttccatctatttgctctttttccatgtagtttagccaactcagtccagcagaacaaaatgtagctgccattcttggagtctctgaaagctttattgggaagaaagcatcaggccaagccatcggaaaggtaccacattctttttttcttcctaaataataagttcactcaacacttagttcactcactaagttcactcaacaaaattagtaccattatattgatcttttttggtttacattttttcctttaaattagtataacgttcattttactacttaaaacatacctgagcacccaaaatgtatgaatatttttaaacaacatttatttctgggtagtgtgatgacctttttttgggtagcatgaaatgttttcataatattacacaatcctgatataagttcaattcaaacgaggaaatacattttctagaaactatattaggctttctatttggtatcaaggattctaagataggacaggtctgggttttttgttactgcttttgtcatcctcaaagaactcctagtctagtacttatattacataaagcattttagaaggttaaaggggataagctaatactcgttggtgtgatatattttggtgttttaaaattcagtctgcaggcatgaagcaagttatcaaatgcatacactaactttaagagaaattgaagtaattctttcataaccataccttcgatttccttaagagaatgttattttcccccttgtaatacacttttttttttcattttaaattttatttggcaatccaatttacattgaaacctagttaccttccattttcccccacaccttttttttttttttttttgaggtgcagtctcactctgtcgcccaggctggaatgcagtggcatgatcttgggtcactgacacctccaccttccaggttcaagcaattctcctgcctcagcctcctgagtcactgggattacaggcgcctgccaccacgcctagctaatttttgtatttttaggagagacagggtttcaccatgttggccaggctggtctcaaactcctgacctcaggtgatccacccgcctcgttctcccaaagcattgggattacaggtggctctcaggttgggagccaccacacccaacctcctctataccttttaaatttacatagacagtacagatttcattttgtaaaatggaagatgatgtttacatacacttaaattgatggtgcagtgtcccatgcatcactgtgtcataaaatcaaaaatattgggcccggcacagtggctcatgcctgtaatcccagcactttgggaggccgaggtgggcgaccatgaggtcaggagttcaagaccagcctgaccaacatggtgaaaccctatctccactaaaaatacaaaaattagctatgtgtggtggtgggcacctgtaatcccagctactcaggaggctgaggcaggagactcacgtgatctgggaggcagaggttgcagtaagctgagatcacaccactgcactccagcttgggtgacagagcaagactctgtctcaaaaaaaaattccatgagcccagcacagtggcacacacctgtactcctagcttctcaggaagctgaggcaaaggatttgcttgtactcaggagtttcaggatagcatgggcaacatagtgagaccctgtctcaaaaataaaaataaaagtatctgtagtacttaagcattcatgttatcacaatttttagattgggtcttttactttggaaatggctatgctgtttagaccttcaaaatgctgaataaaaatatttcttaaaacaaaccttttatatcaaactctgaaatgtaaaataaaaacaatatcattaatttggaactaattatcaaataataataaacatgcaaaaatcttattagaataatatatctttttaagcttgaatccagaatttatttttgttacatttaatgtaatatagtcaacaaatatttgccaaattgatacatatttaaaatagtatggacatgaacttatcttaattacaaatggattaattactagtttaatgttttggaggtataattttttaaaactctggagaacatatttaaatacttaaaatctaattgatttctccacattgaaaaagaggccccccacctgaccttttttgaacattcttgatttcttgcaaaagattttttttttttttgatacagagtctcgctcttgtcgcccaggctccaggctgcagtgcaatggcacgatctcagctcactgcaacctccgcctcccaagttcaagtgattttcctgccttagcctcccaagtagctgggattgcaggtgcccgccatcatatacagctaatttttgtatttttagtagagatggagtttcaccatgttggccaggctgatcttaaactcctgacctcaggtgatacgcctacctcaacctccaaaagtgctgggattacaagcgtgagccaccgtgccctgccacaaaagatcttgacattggcataaagcattgtattttgccatataataattatatcatttttcttggcttaggaaatacattctaagaaaaaacctacattgactcaatttatagttagtactgaagatgcactaaaattgggaaattaaatagctctcttttcctacttgatgttcagctgtcatactttttcagcttaatgcttttaaaaaagtgatccagtatcaacatgcagaatatgtaactcatacatccttcaatttgtcaccgtaagttctcatttcattcttttactatggtggaggatataattttatattttattttattttttattattttacagttttttttaaaatagagacaggttttcaccatgttgcccaagctggtcttgaactcctgaacttaagagatcctcctgcctcagccttccaaagtgctgggattacaggtgtgagctaccactcccaacctctattttattttttatacctactttttcttttttaagttcatctttttgccctcaattttaagaattgattagtttctaagctagctatgaaatcctttatgcacaaatgtggtcatcaggcaccacaggccaaagcaggtatacagaatcgaaatcatcaactacaggaagcatttttcaatctctttcaggtgttttagcttggaccatgtggaaatcataggatctaatatttactcttagtttataatatagacaagcttattaacatatttatctaaagtacatttgtctaatttataataataatcacatacgtacacaatttacaaataccaactaactgtaaaagtctctctcaccaattccttcctttcctgtattcattttctacaaccgccataacaaattaccacaaatgggtggcttaaaacaacagaaatttattctcccacagttcaggagaccaaaagtccaaaatcaaggtattagcaatgttgattccttcaggagcctctgaggaaaaagccatccgtgcctctttcctagcttctgatggttactggcagtccttggtgttccttggcttatagatgcatccctccaatctcagcctccatcttcacattgctgccttctctgtgtctctctgtgtcttctcctcttataaggacactaatcattgaatttagagcctactgtaaatccagggtgatttcacctagagatccttaactgattgtatctgcaaatatcttgtttccaagtaagatcacattcacaggtaccaggggttaggatttgtacatttctttttgtggagtgatggagagggggtacaattccttccctgtagaaggaagtttaatttagattggaaataatttggtttatcttttaacttttatttatttttatttttatttttttgagacagggtctcactctgtctcccaggctgagtgcagtggtgctatctcggctccctgcaacctctgtctcctgggctcaagtgatccctcagcctcccaagtagccaggactacaggtgcgcgccaccacacccggccacgttttttgtttgtttttttgtggagacggagttttgccacgttgtccaggctgatctcaaactcctgggctcttgtgatccatctgccacagcctcccaaagtgctgggattacaggcatgagccactctgcctggccttatctttttattgtagttggaaaaatgataataaattttaattaatctgaagtacatctgttagaaattagttttgtttctatggaattattctatccttgctattctgtaatacaacttcagttttccttttgtccaattttaataacatacatttttagcaggtctagtaaacgaatttatttgattgtgtctttctagaaggtggacaagaacgttgtcaacaggctatatctgtcttttgttctttataccttgctcaaagagaccaacatttggactgtatctgaaaaatttaatatgcctcgaggatatatacaaaatcttctcactggaactgcctcattctcatcttgtgtgttacatttctgtgaggtaatttcattgaatatatgatatgtactttgtgcatcttctggttttaactgttactaaactaataagccagttagtcagtatgtcagcattttctccttgttgacatattctgttattacagagcactaaaaaactatttaaaatgtacgtttgtttttatctgtttatgaaactactattatgtacttatggtaacaatacaaaaattcctgagtcaactaaaacacataatgaaaagtgtctttttgacccaactcttaaagccaccattaatagtttcaggtattcagaattaactgttaaaaacaacctattgatgtagattccatgtgaatgtctttcacctgagtaataaaaatgtcaggtgtttggttagaaagttacctatatccaacagctaccatgtgactatttagtaccatattctctttttaaaaaaatttaattttgactggatgccatggctcccgcctgtaatcctagcactttgggaggctgaggcaggtggatcacttgagcccaggagttcgagatcagctgcttgagcaatgtgggaaaactccatctctacaaaaaataagaaaaattagccaggcgtggtggcacacgcctgtggtcccagctacttgggtctcactctgacgcccaggctggagtgtagtggtgtaatccaggctcactgcagctttgacctccagagctcaggcagtccttctgcctcagcctcctgagtagctgggatcacagacatgtgccaccacacctggctaattttttttgtttttttgagatggagtctcaggctggagtacagtggcgcaatcttagctaactgcaacccccgcctcccgagttcatgcaattctcctgcctcaacctctagagtagctgggattatagtcacacaacaccactcccagttaacttatgtatttttagtagagatagggtttcaccatattggccaggctgatctcgaactccggacctcaagtgatccacctgcctgggcttcgcaaagtgttgggattacaggcatgagccacagcgcccaaccaattttttaaattttttttgtgcaaagggtgggcgggggtggggggtctcactatgatgcccagcctggtcttgaacttcaggctgaagcgatcctccaggttgcccttccaaagtgctgggattacaggcatgagccgccacgcctggcccatattctcttgattgccactgtaatttagtatatttgcttccagtgtcaggcagctatttaaagcttttacatcaaatgtgtattttatagaacaatttaagaaggaaaccttatactggtcatatgcatttgtgatggatttaagactttattaaaataagctttcagaattcctttaaatagcacaataaagcttaccaggcttttacatccagatactttttttatgtgtttataatataagccatttttgctgcatttagatttcttcttattgggtggcataataatcctttccatatttgtttccaagtcaattttctaaaacttttttcccatgaattgttttctaaatttaaaatttacttcattttccctttcttaaaccttcatattctgtatatgtatatggcaattaattctatcatatgtgctaatgaaaggagtaaataattcaaaaatacttggctttcaattgaatgataattattttaacaaatttagctttctaaatatcttttacttgtgctgatttttaaatgttggtttataccccctgagcacatgctagttaaacagaagacaaaaattatgggtaataagaagaagctagcctttaaaatgtattttcttaagtcttctatatttgttgttttgtatatttaaagatgctttccctaatattttttccctttgttttcattgcgactatgaggacttgagccttatagaattgtttaagtaaaaaactctatgaagcatcaagaaaaacagcaataatttgatgactaatcctaagaaaaatctagctgacaatttgtactctaattaatttacttcatttatatatatcataattatataattacatataatataaatatataattatatgatatatattacatgtatataatttttcaaattattatcaatagaggcagggatcttgctgtgttgcccaggctggcctcaaactcctggactcaagcagtcctcccaccttggcctcccagagtgctgggattacaggcatgagccaccacacctggtctactttcaatatttcaaggcaggggtgttcaatcttttggcttccctgggccacattggaagaagaatcgtcttgagccacacataaaatacactaacaatagcttatgagctagaaaaaaaaaaaaaaaaaaatctcatggtgttgtaagaaagtttaccaatttgttttgggtgacattcaaagccatcctgggccgcatgtggcctgtgggccacaggttggacaagcttgttttaaggtattttttattttaaaaagttataaatggtatgaaatggtacattaattgtgttagttaagatgcttttaactacaagttacagaaaaacccatcaaggtttaaacaataagaaaaaataattattttatataacaggcatgccagaactaaggcagcttcaggattgattgattcaatagttctgttcaaggttttcttctttttactctgccatcttcattacgttgatttctttcttagtagtcacaagatggctagctaatgctgttccattcatcatgtacattcacagtgatatccaaaggctagaaagggaactttaaaataaaataaactactataatagaatattgcaaatatctatgacaaaatattatattgaattcccatttacccttctagctttaacagttattgactcatggcttccagtatttttattattgtattgttgcattgaacatcatgttacatttgaatatttccatatttaatattcatcttccagataaattccagatgtaggaattgtttttagtcacttgggaaagaaaaactatgcattttcttccaggtattttgattaaaatgaccagaactctttttattgacttatttttcaattttcaatcttttcctcatcctaaaaccagttcctcaaattcctcagggtcctccccatgtttcttcacatctgttttgcttagaatcatctttcatctctggcttaactcaagttccagaacttatgtaaggaacattctctctgagccccctatcacacaaaccaaactttgaaataacttacaaaatttaaattttatatatttctttgtgttctacaggagcttgaggagttttgggtttacagagcccttttggtagaacttaccaagaagctgacttactgtgtaaaggcagaattaatccctctcatggaagttactggagttttagaggtcagtagcttgttggtttcccaattgaaattatgttgaattaatacagaagccaggttttattattttctgaagtcttaatacagaggaagtgatagcaagagccttaattgctcatttgtcatgggaatcttttatttaaaacaaatagctgttatggccttccagaaatccgctgttactagatggcatacctgatgaaaaatctcagttgtgaaaaaaaaaacataacaggaagggtgggagtgactgtctccaagtatgttgtgctaccggttgtccttaacacttcttccttcctccactcctttgaagaattaccttctgtcagtttggactcagtgcttgtttaagataatggtgattcagtggcagaaagggtcatttgtattttttctaagagagtaagaagaaagggttcgcaactggttttccagctttctattttcagccaaccctcaacttcagtttattctctgttattcagttcttgagtcagaggagttctgcttaggacacacgcacacacacagagagagacaccagtggtcccctgagtagatggtgagaacactgaaagatattggacttggcctgatgatgtggctcatgctgcaatcacagcactttgggaggccaaggtgggtggatcaattgaggtcaggagttcaaaaccaacctggcccacatggtgaaaccccatctttactaaaaatacaaaaattagccaagtatggtgtcgtgcgcctgtaatcccagctacttgggaggctgaggcaagaaaattttgtgaacgtgagtggtgcaggttgccataagccaagatcgcaccattgcactccagcctgggcaacagagcaagactctttctcaaaaaaaaaaaaaagaaaagaaaagaaaaagaagaaagaaagaaagatactggactagaacattttacttgaggatatgagatgatgccaccaacctaagtgggtttcttttcttgattgcagcacacatcagttgactcaagctgcatagaactatagttaccttgtagtcagtttggaaccacccaaatgcatttttaaaaattcctcagtattctcatgtcttgtctcttcatatttactttattttatcccagtctcttacatgcagtttttgttcttttcagtaaagtgcttaattttcttttttctaatcccaaactattatcctactgatttttgtaacacttttcagggtcgagcaaaacagttatacagtgcaggttacaaaagtctaatgcacttagctaatgcaaatcctgaagtgctcgtaaggacaattgatcatttatcaagacgccaagccaagcaaattgtttcatcagcaaaggtaagcaaacaaaccattttttaaccttaataatcttgcgtagtgttatttccttgtattatagacatcagaacaaaaacatttcacattgcataactgtttatttctatagatacaaaagtacatactcttatttgtgagtaaaaataatgcatctgttgtgacacaagccttgcaaaacaaaaaaaggacctgctaaaaaataaagaaaatttcagtggtggctcatgcctgtaatcccagctctttggaaggtcaagatggggaggatggcttgaaatcaggagtttgagaccagcctgggcaacataatgagactctgtttctgcaaaaaaatttaaaaactaactgggtgtggtggtttgtgctgtagttctagctactccggagactgaggcaagaggatcgcttgagcccaggagttcaaggctgcactgagctaggatgacagattgagaccctgtccccccgccccaaaaaaaatgccaggcatggtgcctcatgcctgtaatcccagcactttgggaggccgaggcaggtggattacctgaggtcaggagttcgagaccagcctggccaacatggtgaaaccccatctccactaaaaatacaaaaatttagccagacttggtggcacacgcctataatcccagctactcgggaggctgaggcaggagaattgcttgagcccaggagacggagatggcagtgagccgagatcataccactgcactccagcctggctgacagagcgagattctgtctcaaaaaaaaaaaaaaaaatggctgggttcggtggctcacacctataatcccagcactttgggaggccaaggcaggtggatcacttgaagccaggaatttgagaccagcctggccaacatggtaaaaccctgtctctactaaaagtataaaaattagccaggcgtggtggcccacacctgtaggcccacacctgtaatcccagctactcaggaagctgaggcatgagaatcacttgaacccaggaggtggaggttgtagtgagccaagattatgccactgcactccaacctgggtgacagagtgagagtctgtcttaaaaaaaaaaaaaagacaatttcaagggttcattgaagtataaagaaccctggaagtcactgagctctgtctcccaaagttctcttcacaggaatcctttcctcagcatcccagcatctggtctctccacctttgagcaccagcactgacaaggagcctgcatcatcaaaaattaggttgtctatttttgtacactcttagtgttacaaaaattatcctgatatactgaggctaaattttgccttcttaaaatttctaccattgcatcagagtactacctctggaactggactctttttttgtttgtatgctgtttttcacatattcaaaaacagctcttattgcccccaagggtttctcttttctgttgcttttatctgtattaaataatcaagttttaggccattcactgtcctagttaccctttgctagatgcaacccagtttgccattgccttctgctccctgtgggtaaagccattccacagcaatttgagattgtttccttcttgatctcaactgtggttctaagtctgaaattgcttggcttctttgaagcttcattgttttactattttcatatataaatcagaattagctttccatcattttttaatggtgctcacattgcttacattaccttaattgttctttacaacaaacctatgaggtggacaaagtcagtgttacccccaatttatagatgaaaccactaagattgaccttgtcccgttaaattaggagttcttggggttggtagggatgaagttatagtcatttcctttgctatagcacctaaaaaaaaaaggttcattaaactttcacacacttgtttcagcatttactagtgatgtttgcctaactccattatttccatgatgcttatcaagaggtgattttctaacttcattatcccttctggatttatttactgatgttttactgtgaggaaaagcttttcctttatttattcatttatcagtatgtgctcataggttcaaacatattcaatgggttataacccattaataacattacttattttggtgctcaaatggcctcagatttggccagtggaagcccctgaaaactggtttgtgtggctttttgacctgtcatcatcattcttgaagtattttcttactttctggctgtgtctgtcagcatctaatcattaggaggcagaaaccacacagtaatttgaacaggcgtctaaggggtcaacagaactttaaagaattcaggaaggaatacatttgagagacggtccacccccaccccacagcacccctgtggatgggatccggacttcattgccactggatgctgggaagtttgttgtggtgctacagccaaggctaataagcagaaactgcccacggagtgctgacaaaactgcaaggaagctgcctacaatgtactgttgaacttgcccagaagtcagctctagggcccatggaactagggcactagctaggaccaccctagctgatgtatgtctatgtatttttctatacttatgtgtaaattactgaaggccatgagctcatactgataaccctaattctgatttttccacgtacatacgctacataacagagtctaactccaaaatttagtggcttaaaacagccatcttattttgctcatgtttttgtagattaggaattctggaggggtgcagctgggtgcttctcacttgggtctcaggcaactgtagtcagaagttgactggagctatagtcataaggcccagcagagctggatgacccaggtgactcactcacatgaccaacagctgataattggaggcaactggggcttttcagcttttgactggagcaactacatatggcctttccatgtggcttcagtctttatggcatagaaactaggttttgagagggaatgtccagaaaatgagcattttaagatatccaggcagaaaatgcaagaagtcttctgagccaacctcagaagttatacagtgtcatttccgctgcatactgttggttactagaaaaccgttaagacctagattgaaaggaaaggggatcagaccacctcttcatgagaagagtgtcaaataatttgtggtcatctttaaaatctgccctctggtcacaaattgtttctgttcctcccacatgcaaaatatattaacccccaaaaggcttttccattatagtttctattaggaaaaactcaaagtcttttttgttgttgttgttcccccactcaacactcaacaaacacaacacagacagaagatttctgtgaccaaatgtgagggatttctccccaaaaaaacaagcaatcatttctgtagcagacatcagctgggtgtcctgacactatctagctggagtctgggcttctaaaacttcttaccaattcaagttggggttccctcaacctcttctctgggttcagtcagctcacgaaactcaggaaaacatgcgtataataaaggatatcacaaagatacagatgaagagattcataggtcaaggtatgggggaagtggcacagagctttcatgccctccctgggcacagcaccctccatgtgttcagctgtctggaagctctgtgaatcctgtactcttagacctcttatggaaactttattgggttggcatgattgacaatcatgtagaaatgtgactggacagaaagggtatgatttattaataatactaacagattgagtggggaaacccagcaagacccgtctgttcagattcttctggcctctctgtgcagcattcctttcttcagagtatggggcaggacactctgggatgagggtctttttacttgtttttggagacagggtcttgctctgttgcccaggctggagtgcaatggcacaatcatagatcactgcagccttcccctcccaggctcaagcagttctcccatctcagcctcatgagtagctaggaatagagacaggtgccacgcctggctaatgtttttaatttttaatagagacaaggttttgctatgttgcccaggctggtcttgaactccgggcctcaagcaatccttccatcttggcttcccaaagtgttgggattacaacatgagccactgcacccagcctggaatgagggttttaagacccaatgatcagattagagttctgccttaggcaggcaaaaggagggcagaagaaggtcagagagagaaattctgttttctgaggtctaaagtgccccatcattgtaagaagggctgtgggagttatgagccaggaaccgtggatgaagaccaatatatgtctatcataatatcacagcatcagactcagatccagtattctaaatcaagtccgagtgtgagtgatacaccttcagtacagtttcacaagttacagttcttcttaatctgaagaccagtgaactaaagagacactacataaaacagtgaaactagaaataggataaccatagtatactctcattcataaagaaggaaaatgggtagtgcacagcagcagttctgaaatccagccagtcatatgtggccagttccttaattatgtcccagttcttctctctgggaatggtttttcttggctttgggttctctcatttgagtcattctcccttttccataagcaataaacccatgtttgctgctaggtagctttctcaatgtgcttcctatatgtagttcaagaatattgaagttcaagagttcaggctcaggtgtagtggctcacacctgtaatcccagcactttgagagaccagagtgggagaatcacttaaggccaggagtttgaggtcagcctgggcaacatagcaagaccctgttcctacaaaagaaatttttttttttaattagccaggcatggtgatgtgtgcctgtggtactcatgaggctgcaatgggaggatcatttgagcctgggagatgaaggctgcaatcagctatgatcatgccactgcactccaacctgggcaacaaagcgagaccttatctctattttatttttaatttaattaaattaattaattttatttatttatttatttattttgagacagggtctgactctgtcacccaggctggagtgcagtagcatgatcttggcttgctgcagccttaacctcccaggctcaagcaatcctcctacttcagcctcccaagtaactgcgaccacaggcgggcaccactatgcctaactaaattacctttttaaatttatttttcaccatgctgcccaggctggtctccaactcctgagctcaagtgatccaccctcctcagcctcccaaaatgctgggattacgagtgagccaccatgcctgggggagaccctatctctaaatttaaaaaaaaaaaagttcaaaggcacttgatgttttgtattgtctgtctctttttattcaatctagtataatatcttttaaaacactgcagtttcttatttgtctatttataatctctatgttgcttgactttcttttttttttttttttttttgagacaaggtctccctctcactccaactggaatgcagtggcacaatcatgcctcactgcaaccttagcctcccaagctcaggtgatcctcccacttcagcctcccaagtagctgggaccacaggcatgcaccaccacacccagctaatttatgtaattttttttttttttttagagatggggtttctccatgttgcccggtttggtctcgaactcctgggctcaagcaatctgcccaccttggcctcccaaagtgctggggttacaagtgtgagccaccttgcctatcctagcttggctttcttacagtgtggatgctaggatctgagggggaggattcacatgaccttggaatgatctcatttcaagaccccaaggcctttcttaaactgagacctgtcatgtggcatcatttcttctgcattctattagttataagtgaatcacaaaggctagcacagattcaagaggagaattagatcccgtctctcaatgaaggtgtcaaagaatttccaatcatctttaatttgccacactaatcccatacaggacttgctatatagtcttcctctttttcatatttgtacttcctttctccaataatgagaaacctcatccctgtgtttattaatatatttctgttttcctcaatcttagaatgcactgaaagtaactgcagaattgttaaattataccactccaaaaaaaacaaacattcagtatttatttacagcactttttgtcttcagtctgagagtatataattaaaataatgtgttaaaatgttacttggtttggggtttaaaaaaatctgcttcagtgtggctgttatacatttgaaacacaaattctactggtattccattttatttcctctccttccctcacagatatttttttagggggagtggggaggaactaggtctctgtcacccaggctagagtgcagtagcaccatcatagctcactgcagccttgaactcccaggctcaggtgatcccaccttagcctcctgagtggctgggactataggtatgggccaccattcctggctaattttttgttgttgttgtagaggcttggtctcactgcattgcccaggctggtctctaacttctggcctcaagcaatcctcctgcctcaacctcccaaagtgctgggattataggtctgagccaccatgcccggcctatctcgtttttattctctttattgttttcctgctttttaaattttttcagtggccctaattaggttttttatttaaatctgtttttctatggacacccagttatttagttatagttattagtttttatttctaatatgattttgcctttttcttttatttcattcctgagctcagtcaacttttgtatcatttcttccagtttttgtccatgtcggttcttagttttttaacttcttatttagagagcatttctactcctcctcatatctccagatttttatttgagaatatttaattttgtttggagtgttgtgttacagtttttctgcttcatggtttgctttcaggaagggaaatttttatgagatgaagagtttgggttcttattggttttcttttctctttttttttttgagacagagtatcgctctcttgcccaggctggagtgcagtggtgcaatcttggctcactgcaagctccgcctcccaggttcacgccattctcctgcctcagcctcctaagtagctcggactacaggcgccggccaccttgcctggctaaatttttttttgtatttttagtagagatggggtttcactgtgttagccaggatggtctcgatctcctgacctcatggtctgcccaccttggcctctcaaagtgctgggattacaggcatgagctaccatgcccagccttgttttctttttatatagtagttttgtatagatgagaactgcttgtgcctctgcatatcttggacaacacagtcatttggaatgatttatgagatcccagttcaagagtgttctcttctgtcagagtagcaaagtatttttctttaatggatgacttggggtgggagaggaatgcaagtttgtttgtttgtttgtttaatttccttttgccctacaagattgtaaattttgtccttttttcctcttcctctcatggctgagcttccaaaaggcacctcccttttcacccattctctcccctaaaagcattgcctttcgaagactgcctcctagagtcccacatgcattttaaatatcttcctataaacaatgctttaatcaaccaacattcttttttcagtatttttatatttgggtaggctttttctctctggaggtgatcttatttcattttagaccctctatttccctcttatcttgttcatgtgttttttttttctcaaccccatctggatctctgcaaacacttgggtgggagctcaagaaactggttttggctgagtgtagtggctcacactataatcccagcactttgggaggccaaggcaggaggatcgtttgagcccaagagtttgagaacagcctggacaacatagggagatccagtctctacaaaaaaagctttttaaattttttctaattaaaaaaaaaaaaagaggctgggcatggtggctcacacctgtaatcccagcactttgggaggctgaggcaggcagatgatgaggtcaagcagtggagaccatcctggccaacatggtgaaaccccatctctactaaaaatacaaaaattagctgggtgtggtggtgcatgcctgtagtcccagctactcagaaggctgaggccttctgaatcacttgaacctgggaggcggaggttgcagtgagctgagatcacgccaccgtgctccagccaggcgacagaacaagactccgtctaaaaaagaaaaaaaggcgggtgggggggagcggaatttattcttccacaaattggtgggcttttttaaacaagtaatttgaggttcttgatattctctgtattatagtaatactaacacaagggttttgtgtagtttacttattattcttattgatctatatagcttattatttggtaaaaattcattgacatctttcatatgccatgtttggaaatactttttttgctcattatgttgcttttgaaattaacagttttaagtttaggaacttgaataaaacttttatttgaaatactggtagctttttaaagcatactaaattttgaggaataataaaatgcatatatataaaggataacatttttcaggagctaattaaatttttgcaaaattgtcttagattttatagattaaaagttaatttttaagtggctgagtcttcaataaaacaaatctttgggagaattaaagctcctttatttttggtatactaaaaggcagtgatcagctaaaatggttttaactaaatgcctcatcttcattgactataatcgtttattcttaagtggccatttttcaatctcattatagttttaatgtctagatttctgatgtgtaaggattcaggtgttcaatggacagtggtaaaattgttggcaattctctagcaatgcatattttggcctcacgtcttaattttttaatgtagatgctgttgcatgaaaaagcagaagccctgcaagaagaggtagaagagttactaagattgccttctgatttccctggtgctgtggcttcttccactgacaaagcatgaagctatctgatgagaattttcatatatgaattatttattgtacatgtgtgttattaaagataacttatactttataaatgaaaaaatacatttcagttatacattaa

SEQ ID NO: 15610 - DNA, 48462 bp, Homo sapiens
tttcccaaggtggatgtagaagcgggctccggcgtcccactctcccttccatatgggcttagcgtctgggtcactgagaacgacgtctgaatagggccctgggtccttgccatggatgaatgtggttcccgcatccgccggcgggtgtctctccccaaaaggaaccgtccaagcttggggtgtatttttggcgctcccaccgcggccgagctcgtgcccggagatgaggggaaagaggaggaggaaatggtggctgagaacaggaggcggaaaaccgcgggcgtactgccggttgaggtacagccccttctactctcagattccccggaatgtctcgtccttggaggtggtgatacaaacccggacctcctacgtcacatgcccactgacagaggggtgggagaccaggtacggaggacttggaacttgaaactgcaaacttttggcatccttcccagatgcaaagagttgaccagttttatcgccttcgtttacttctctcgtcttcgttaccactgttaatcggcacttaggaggtattgattgccttgttatttacatttctatataaatatgaaatgtaaaccccgagacataaaagttgtgcacgcagcagttaagtggcatgactgagacacaaatctaggcttccagataactgcagctcctactgtacaaataaaatctgctgtttattgaagacccgttatgttaagctagttatattatctagattttacgacagtaatcaggccctgaaaagttgagatagtacagttcttgctccaaatcctgttgtcttaatcactttactatattgctgcctccaggtttgtgtgtcttctgtgtagcagaccactccaagtcagtattcagtttctcagtctcaattccaaattcctaggaactccttggagtgtctagtggtacaaccatgtttctgttagaggccagtcactgtagattgtagtctgggagggaagcgctgcagttatcagaaacttcgaatgcgctgacatttcagtagacgtctaccagtcttcctgctgttttagtacagctttaagaattacaatctggccgtgtgcagtggctcatgcctataatcccagtgctttaggaggcagagatgggaggatcacttaagcccagaagttcgcgttcaaaaccagcctaggcaacagagacccagtctctacaaaaaaaaaaaaaaatttttttttcttaattagccgggtgtggtggcctgcacctgtagtcctagctacttgggaggctgaggcaggaggatcgcttgagcccaggatgtcaagactgcagtgagctgtgatcgtgcagtggctggagccactgtgctccagcctgggtgacagagccagaccctgtctcaaaaattagaatctcagtatcatcgtaacactcctgaacctgctgtttaggcaagtaatttaacctctttgggcctccatttcttcagctgtaagatatctatttacatataggtctgtgatccatatgtgaccatataattatatacttggtacagccctaggctgaagtgttttttgggggttttgtttgtttgtttgttttggtttttttgagacagagtcccactctgttgcccaggttggagtgcaatggcgcgatctgggcttaccgcaacctgcgcttcccaggttcaagcaattctcctgcctgagcctccgagtagctgggattacaggagcatgccactatgcccggctaatttttgtattttctgtagacacggggtttgaccatgttggccaggctggtgaagcttttattcttaatgaaactggaattgaccataagcgtttttgttctctttgcagcctaatgacagtgaagtggacatgtttggtgactatgatagctttactgaaaactcctttatagctcaagttgacgacctggaacaaaaatatatgcaactccctgaacataagaaacatgctacagactttgccactgaaaatctttgctcggaaagtatcaaaaacaaactcagcattactaccataggcaaccttactgaattacaaactgataagcacacagagaaccagagtggatatgaaggtgtcactattgaacctggagctgatcttttgtatgatgtaccttcctcacaggctatatactttgaaaatttgcagaactcttcaaatgatttgggtgatcattctatgaaagaaagggattggaagtcatcctctcacaacactgtgaatgaggaactgccccataattgcatagagcaaccccagcaaaatgatgagtcctcttccaaagtcagaactagttcagatatgaacaggagaaaaagtattaaagatcatctaaaaaatgccatgactggaaatgcgaaggcccagacaccaatattttctagaagtaaacagctcaaagacactctcctatctgaggaaattaatgttgctaagaaaacagttgagtcatcatcaaatgaccttggtcctttttattcattacccagcaaagtgagagacctttatgcccaattcaagggaattgaaaaattatatggtaatgctttttgctggaataaaaaaatttttttcctatcattaccataatattagtgcaagtaaatagaagcaaatgctttcatggtccatactgtttctcattttgaaaacaaaagatcagtgatctctcagccccttccattcctacctgtcctgctaccactgaacctctttccttccctcacagtcacacttatcaaaccagttatcctttctgtctgtttccttacctgacataattcctctaattcctcatctataagaaagggataataagttgttagcaagtcagattctggttcaaagacatgccaaattcaatgttggtaatgattttcaataattatattggtagcttctaagtaagaactttagtaaattaccccactctaattctgggttctgtgctctcattctctcacttaagatctgatgactgagacgtctaaacacagtgttacttttaatgtttaccttacctgacttctcaataacttacctgatgctattgactacacccttcttgaaattcttgtttctggatgtccttacaaccactcctgttttttgaccccgattgtctagtagagatcctcagctttcttagttgtatttccttggctggctctgtcttctctaccaaaacctagctgttgtggtatgtctttgacactcacatgtcttgagtgaaagaagtcagttattagtaatactgttgattaaaccaaacatctttccccccacaccagcagccgcagctacctctccccacgggtgcatccctgccaccacccagatgctctgccttgtgctgcctttcccaaagctagacatctttaaagacagctgcaattaagttttaagtcagggatgtccaatcttttggcttccttgggccactttggaaaaagtattgtcttgagccacaataaaatacagtaacacgatagctgatgagccaagaaaaaaaattgcaaaaaaaaaaatctcataatgttttaagaaagtttacaaatttgtgttgggccacattcaaagccattctgggcctcatgagggccgtgggttggacaaacttgttttaagtgcaaagaagcaataatattaagaaggtatcttgtaatgtttttcaaaaatccagggtccttgcatatatttcagatatgtgtcattttagaccaagaagggacagttgctgccatactggagggtcagccccatcaaccttccacttcgtaagttttctggaactcctgttaggatcttatgaatgatatgaaaacttgggttcttgcagagaagacaatcaggttggagaagcagaactacaggaaacaaagtctaataaaagactctacaagaatccaaattgtgaggttcatgacttaagagctaatggtgtgtgttgccctggaagtagacgttaactttcttccctctgttcttccctctgtttttctgctagcaccttgctttttgtttagtctgccagaatgaatatcctgaggacaaggctctatctaactcatctttttgtttttgtttttgtttttttgtttttttttgagacggagtctcgcgtgttgcccaggctggagtgcagtggcgcatctcagctcactgcaagctccgcctcctgggttcgcgccattttcctgcatcagactccccagtagctgggactacaggcgcccgccaccacgcccggctaattttttttttgtatttttagtagagacaaggtttcaccgtgttagccaggatggtctcgatctcctgaccttgtgatccgcctgcctcagcctcccaaagtgctgggattacaggcgtgagccaccgagcccggcctaactcatctttttcttaactagcactgtgcctggtatactctggtaggttctcaactgctggggattgtcacttaaaaatgcaaccttagcactttgggcctagttcctcatctataaaaagggataatttttttttgcaagttagagtctgtgttaaggacatgccaaattagatgttggtaatgattgtcagtaattacattggtagcttctaagtaagaacttcagtaaataacaactttttaaatctttttacctctaaatctggcttaataacatgaccagattaaagcataaatgcatgtgctactttttattaagctaaagcggtggttctcaagtgtggttcctggactgcagcatcaacatcacctggaaatttgttgaagtgcatgttctcagacacttccctagacctactgcgtcagaacctctaggaatacgacctggcaatctgtgatcgtggctcactacagcgtcaacctcccaggctcaagcaatcctcccacttcagcctcccaagtcgtggggactataggcatgcgccaccatacccagctaatttttttatattttgtagagatagggtctcattttgttgcctaggctggtcctgaactcctgggcttaagcagtcctgctgtctcagcctcccaaagggttggaattacagatatgagccattgtacccggctagtttttttttttttttttgatgtgaagattgtattcataaatattagttattttgtcatgttatgcttaaaaatctgaattggataaaatgtggctatggttaagttatactttggcataaacatctaatttgataactcgggtgataccaatctgaagtatttttcaatatttattgaatattaaatttaagtatttttgaaatatttttaaagaaaatattcacagtcacttgtagtatttgggaatcacccaaaagcacaataagttaaagttacttgtaactgtcattcagatataactttcttttttttttttaatagagatgggctcatcttgaaatcctggtctcaagtgatcctcttgccttaggctcccaaagtgctgggattacagacatgatccaccactccggggcaatgatctgcttttttttttttttttttttttttttttttttaaacttaactgtatattgaacatacatagatccatctattcttcatttttaaactgcaaagaatctcattggttgattgtacaataattcattcggcctttacccccaccaccatggcactttgttacctacaaacaatgctgtgttttatatgctttggcttccgttctatagatgtagaatcccaaaagtaatactaccagatcaaaggcaatgtgcagttctattttatactaggttactttccacaaggattctagcagtttatgttctcacaaccgtacatgaaaatggctgtttttccccacattagtcagctctggattttgcatgtgtggggctttttttttttttgatagttatttgttttttattttaaaaatttattttgccaacccagtagagaacagctgagcatcttctcatgtatttattggccatttgcatttctgctgcttattggccatgtatttattggccatttgccgtctgctgtgaaatgtcttaaattttttgcccatttttctagtgataaaacactgaagcacatttttaaagacttctgatgatttttattgtcagattatcctacagagtaattaatactagttttcacacggtatcttggatctgatctattttcatgaatcccgccttgccaaattgtgggaatcctaggcgtgtcagttaataatcctagtcttttgtggtttaaagagttttaacagtttaaaatggttttggacccattcgaagttcaggtctccatgagagctagttaaagtttttattagtttgtgtaaaacctaatagatttgtttccctccttcccctgcttctctctgagatggcttttggctgaatgaggaagggaagcttatataatctccttgcagaacataagaggaagacattcgaattcacacaggtccttgtactgtccctttgttcctctgatatctcagatggcactccttgtccacgaggctgctacctgccctgctgtaatattggacccaagtctgcagctggtgaataaatgggctggttgcccaccttgctgcctaggcctgaactaggctctcactggctgtactacttgcacatttgggatttttgacatgtaacattggttataattaaatttatccttatgagaggattgctccacaggaagggatttgattttttttcttagaaaacttttgagtttcaaagtttggaaggggaaaataatgcctttttttttttaattccacagaatggcaacatacttgtttaacattgaattctgtgcaagaaagaaaaaatttaatatattccttgccaacaagtggtggaaaaaccctcgtggctgagattttaatgctgcaagaactgctttgctgtcggaaagatgttttaatgattcttccatatgtggcaattgtccaagaaaaggtgtgtgtgtgtgtatgttttaaaacaaatgttatttgctagtactttgacgttaagatctgtaaatgtgataactttgtattgttgagaagtacctctttttttttttttttgagatggagtcttgctctgtcacccaggttggagtgcagtggcaccatcttggctcactgcaacctccgcctcccaggttcaagcgattctcctgcctcagcctcctgagtagctgggattacaggcccatgccaccatacccagccaatttttgtgtttttagtagaggcggggtttcaccatattggccaggctggtctcaaactcctgatctccagtgatccacccgcctcagcctcccaaagtgctggtattacaggcatgagccactgcgcctggtgagaagtacctcttaatgatggagaattaatatttttagaatgtataaaagcagtatacactacctaaaatatcttcaaatactaattaccagttgttgaaagttttactttttctaaactggtggattaaacatcatcttaaatgttctattactatttaccctgctttttcttttttgagatgtagtctccctctgtcgcccaggctggagtgcagtggcacaatctctgctcactgcaacctccgcctcttgggttcaagtgattctcctgcctcagcttcccaagtagctaggattgcaggtgtgtgccaccatgcctggctaatttttgtatttttagtagagatgggttttcatcatgttggacaggctggtctcgaacttctgacctaaagtgatcctcccacctcggccccccaaagtgctgggattacaggtgtgagccactgtgcccggccttaccttgctttttcaagcagaaactattactaaaatgagttattctgatgcttttttttttttttttgagacagtcttgctctatcacccaggctggagtgcagtggcatgatctcagctcactgcaacccccacctcccagactcaagtaattctcatgccccacgaccccacccagcagccagaatcgcaagcacacgccaccacgcccggctaatttttttatttttggtagagatgatgtctcgccatgttggccaggctgatctcaaacgcctgtcctcaagtgatccacctgcctcagcctcctaaaatgctgagattacaggcatgagccaacacacccctgatgctttttggtatcaaaggcgccagttgaaatttattttcacatgtattttagaagttgcatttattttgcaaagatcgagacattacagcatttcttacgtatgtcttgcctgtgaccttgttcctgttgatgggtattaaacactactttagcttttttgaaccccatgagcacctaatggggggttttttacttgtgttttttggttttgtttatttatttatttttgagtcagggtcttgctctgtcgcccaggctggagtgcagtggcatgaccaaggcttactgcagcctcaattctctggactcaggcagtcctcccacctcagcttcccaagtagctgagactacaggcctgtgccaccacagccagcgaattttttattttttatagagatgaggtctcactgtgttgcccaggctggtctcaccttcctgggctcaagtgatcttcccgcctcagcctcccaaggtactgggattacaggcattggccacaatgcctggccaatttttctttattttaactaatattctagatttcaggtttgtcaagttttggtatagaactcggtttctttgttgaagaatatgctggaagcaaaggaagatttcctccaactaaaagaagggaaaagaaatcactctatattgccactattgaaaaaggacatagcttggtgaactccttgattgaaactggaagaattgacagtctgggtctggttgttgtagacgaggttggttaatacttttgtaatttgtcaatatttttattatactaaatatttattattctggttattgtgtggatctacttagtaccttagtacctctataaaaataaatttatttgaaaatatagacaatataggtgaagacattctatgcttgataatcttaaatttggttttgtgtcaagtgtttcttgaagtgtgaacacgtatgtgtgtagtatacaattttattggctgggcgtggtggctcatgcctgtaatcctagcactttgggaggccgaggcaggtgaatcacttgatgttaggagttcaagaccagcctggccaacaggtgaaaccctgtctctactaaaaatacaaaaattagccgggcgtggtggtgggcgcctgtaatcccagccactcgggaggctgaggcaggagaatcgctgtaacccaggaggtggaggttgcagtgagctaggatcacgccattgcactccagcctgggggtcaagagccaaactccgtttaaaaaaaaaatttttttagtagtacttatgaatcccagatttataaggattttgtaccaaaagctcattaacctaaataccagtgaaataatatacatgtattatagttgttatattcaaaatacttaaaagttataagcaactctttacaaacaaatttcatatgaatatatgcatgttttatatgagcactatatgaagatttacttctctgtcctttttaaaaaaaatctcgaagttgcacatgattggtgaaggaagccgtggagctacactggaaatgaccctagcaaaaatcctctacactagcagtaagtattttttcaaatgaggtcatgaattgatttataatcaagagacttataaaatacttaattctatcactagctacagtatgtaacctaaagcaagatacttaagctttttgcctttgttttaaaatttctaatgaatagaattttgaaggtaaatgaaattggtatttgaagaagtcctctattattatccgccacttactagctatgtgtgcccaggcacatccctcaacctctatgtttctttatctgtaaaacaaggataataatggtaccagcctgatgggattgttgtaaggatagtgtgagttaacacatgtattgcattcagcagtgcttagcacactgcattcagtaagggtttgctgctgctactgtggccatcatcatcatcaccataataatacatataacataaatattataataataatattgtaaagcgatacatttaaataggtcagtttaaggagctattttgcagcatcaggtagtctttaaagtttatgaaaaatttattctaaatgtcataacctactattgatatgctattgcaatatttaccttatatatggaaaaattaactataaaggtcaaatcttaaaaagtatttaaaaaatttcaacagcaataatatttaagcaggttatagcattttataattgttcattcaaaaaaatattgatcacctactgtgtgctaggcactattttaagtgctagggatacagcagtgaataaaatagtccctgctttcatcaagcctgtattttagggcatccctatttgaatattctctgaacagctaagcctaactaaggcttagtctgagccaaactcatttccttcaaagccgttcttcagcctgaattctcagccaccactctccagccagccaagccagggtcctacatattctatcagcaaccaaatcctatctggtttacctcataaatatattgttacttctgtctctcctatccctcattaccactaagtctttagttcagtacctcatcctttctacctggattgccacagaaatcaccaagttcttctgtgtacccactgcccttcatccaccaaatccatctttctttagcgcaagaagaatgatctttcccaaatgcaaatccaattagtttattttactgtttaccattctttaatagctcccctttgctttctgcataaatccctaatttcttagcacagcctttcttgatttgaccccatgcccacctcttcagctttgtagtctatccttatggaatgagaaggatactcccacttattcctctttcagtgagtttcttgaatgatcatttcaagacataggagcaatgaagaaacatttgcaaagaaggcctatttgggttttcattcaatagttaagtctatagaaagcagccattttgtattgcccaggatgtcatatggcttcataagcttcactccacctttatttaaaacaacatcaacaaaaactatagtcccaactactcgggaggttggggcaaggagaactgcttgaacccaggaggtggaggttgcagtgagccgagatcatgccactgcactccagcctgggcaacagagcaagactctgtctcaaaaaaataaataaataaataaaattaaaagttagcttgatagcaagatctcatagaggacttttcatgggccaagagttcgagacgcatttagccctctatcctactacctctacatctgtctatagccatacctgtggaacatatcatagctcttcgtaaaggggatccagatagacagttataagcagatttatactcatttattattgtttagaagccttaatatcctagttcttgccaagtttgaaactctgtaaacttctaagtagtaactttcaggatacctgaaaaatttcattcttcaaatgccagattaatactctggtaatatatttgtagttttctttttttaagaggtcaggtctcactgttgcccaagctgcagtgcagtgacacaatcatggctcactgcagccttgacttcctgggctcaagcgatcctcccacctcagcctcctaagtagctgggactacaggcgtgcactaccatgcccaggtaatttttaatttttttgtagagatgaggtcttactatgttgcccaggctagtgttgaagtcctgccctcaagcgatcttcccacctcagcctccgaaagtgttgagattacagatgtgagccaggcacccagctatttgtatttttcttacttacctctcccacccctttcccaaatcactcaggaagaattcagagcacaaaagacttgctaaaattactttatgatatattaaataacatattttccttaacactttggcttttgtttgtttgtgttttagaaacgactcaaattattggtatgagtgcaacattaaacaatgttgaagacctacaaaagtttcttcaagcagaatattataccagtcaatttagaccagtatgtacctaaggtttgcactgtattgatttgtttcgtattcatctaacttagaaatgaaagtagtaaacataggatttaaagaattctgtagagtagtgaaggggcatattttactcaccatgactatatgctaataagaggttgtgtatagagaatttaagagtttgtgtataggtcagggatcttgggttgggtcactaatgtatctatagcctggcccacaggctgtcaatgaacgttcattgaatgagttttcccaaacccccattttattttttcacttcttattctgtaaactaaatttttttatttggcaaaattttagtgagacatgttttgagttattggcacattaaaaaatatatcttaaaatttaaaatatttttaaatatttatatgttagtagttataatacttttttaataagttaaggcttcacatggatttacatataaactcctcaacagcagcattcccaaaatgcttgaagaaagtaaacaaatgtaatttgtggttatttgaaaatagcttgtaatgtatatatatttttgtgtgcactactagtgtgtatgttttgtgcctcaatagtttttcagtgtctaaataggttttcagaaaatatttttttaattgccaaattttaatttgaaatttgatgttttagctgggtgcagtggctcacacctgcaatgccaacactttaagaggccggggcatgagaattgcttgagtccaggagttcaagaccagcctgggcaacatggcgagacccctgtctctacaaaaaattaaaaaattagggcagccaggcgcggtggctcacacctgtaatcccagcactttgggaggccgaggtgggcagatcacgaggtcaagagatcgagaccatcctggccaacatggtgaaaccccgactctactaaaaaatacaaaaattagcagggcatggtgacgcacgcctgtagtcccagctactctggaggctgaggcaggagaatcgcttgaacccagtggggcgaaggttgcagcaagccgagattgcgccactgcactccagccttgcaagagagagaaaaaaaaaattagagcatattagcactcacatatagtcccagctacttgagagggtgagatgggaggatcacttaagcccagaaggttgaggatacagtaagctgtgtttgtgccgctacaccccagcctggactacagagtgagaccctgtctcaaaaaaaaaaaaaaaaaaaaaaaaattgatgtttttacatttgaaccagataggaacattttcaagagatattttttaacttaattgccacagtagacattgttattgttattataaaatgcaatgagctgtgtttacaaactgtttttgtcgacaaataaagaaaaatagtgtggtggtatttagaattaaaactgatgaataataagacagaaagttttggctggacacggtggctcatgcatgtaatcctagcactttgagaggctgtggcaagaggatcgcttgagcccaggagttcaagaccagcctcagcaacatagaggaaccccatctctataaaaattagcctggcgtggtagcgcatgcctgtcatcccagctactcaggaggctgaggtaggaggatagcatgagccctggaggttgaggctgcagtgggctgtgatcatgctactgcactccaagcctgggtgatagagtgagaccctgtctcaaaaaaaaaaaaaaaaaaaagacaaagttttagatcttgagacataaaacagatgataccttagtaaaagttaagaacaccaagactcacactttttgtgacaaatacagaagtgtgtggtttcttttttggatatgatgtttactgaattcaaacatatttcttcaaggatattgatctctattttgattttaagggaaaaagagaccaaaacagaagaagaagaaatggtaaagcaagaacttttaagttgaagcatgttttatgtatcttagaaaagctaaactcttttatagctgtcctttcttaacctattttacaatatttaaaacactggaaagatgaatttatatgtcgtattaattgcaaatgtccttttaattcaaggttgagttaaaagaatatctgaaaataaatgatacaatatatgaagttgacagcaaagctgagaatggcatgactttttcacgtcttcttaattataaggtaacattgataacatttaaattccaggttaccagactttgtgtctggggcacaacaagagtttccaatggattccgtagaatagtctagatttttcagagaaacagctgatgcttgacatttgttggacaccatgcagactgccagttcaagatagctcgtttccagtttcaacattagatcacaccatattcttttctatgacatcatatctttgtgaagttggggtttttacagttgctgtaagcaagtaccgtgtgaaaatcaatctggaacagaagagaatagctgtgtccagtcttatttcagattttgaaagacagtaccaagttgtgcacacatcccattagtgagctgttgtggttatttaagaatgaaataaaaatattttttcactcaactgatgtgtattatttattctaacagctactaaattgtgaggaagtacgtatttattaagttgtttggacctcactatttaattaacaaaactgtaaagtatttctttgggccctggggctgtgaacaaagaaaatttggaaaactctcctgtaaatgtttattcatacaacaacaacaacaaaagaataatttatggaccatgtagttcagatattggtgtataaaatgttaatgtctactatgtaaattttagtgttttatgacttgtatgaaggatattaaaaaggggaagaagggattatacagtagttttagaattctgtgaagatgtgttattctacagctatgtctttagtaaagttgaagaaatagattttaaataacttcacattttttcttcatgttctttgtgttcctcatgtgactacaaaaattgtcataattcagtagtatgattgaatctgtgtttttgaaaacttaatggttgtaaagggcatgtcttatttacacagtccgttaactattattaggatcaatctgtgtttctctctgtggacttttttgttctgctgtggtggagatgggcatgtagtgaggctattaataacattaactattttcacttctttaattttctttaattcacttgtttaattctaggtttttttttagactaactagacctaagaaaatcataataacctaaaagaaaagtgagattgaacattttgatgtttaatatagatttcatcttttcttttaaatgatcagatttattaaattagaagtttagaattatagatggtttatttacctttcaaatcacactggtaaaaaattgacagggtttcatgtttactaaccactttgttcctacatcttgttgttttgcagtattctgataccctaaaaaagatggatcctgatcacttggtagcattggtgacagaagttattcccaattattcctgcttagttttttgtcctagtaagaagaactgtgaaaatgtagcagaaatgatatgcaaatttttaagcaagtatgttaatattttttaaatagcctgttttatttttattaggaattacagactatgtattaattttattgggcaaacactaattatgccttgcaaaacatcatattaagttgttttagtatactgaaggccttgaccttgaagaaagaaattttaactgtgaaaaatcacatgtgaaatagccagagaaacattctaaggtggctgggcaccatggctcatgcctgtaatcccagcactttgggaggccgaggtgggtggatcacttgaggtcaggagtttgagacgagcctggccaacacggtgaaaccccatctctactaaaaatacaaaaaattagctgggtgtggtgccttgcacctataatcccagctactggggaggctgagacatgagaatctgttggacccgggaggcggaggttgcagttagctgagatcgcactactgcactccagcctgcgtgacacagcgagactccatcaaaaaaaaaaaagaagaccaggcacggtggctcatgcctgtaatcccagcactttgggaagccaaggtgtgcggatcatgaggtcaggagttcaagaccagcctggccaacatagtgaaatcctgtctctactgaaaataccaaattagctgggtgtggtggcgtgcacctgtagtcctagctactcgggaggctaaggcgggagaatcacttgaacctgggaggcagaggttgcagtgagctgagaccacaccattgcactccagcctgggtgacagagggagactcagtctcaaaaagaaaaggaaaaaaaaaagacaaaaccctaagactatatgtatgagaatgttaagtaatattaggtcagtgattcaaaaccttgggtgcatagtgaatcatcttggaggcttttaaaaattccaaagtccaggctacatcttagacaaatcagaatctctgggagtgacacccagatatcattttgtaaagctccccaggcaagtccaacatatagccaaggacaggaacaactggcttagtcagtcaaaggactaatcactgttaccactgtggaaatgaattgtatcttccattgcctttttttctcttttccttttttttttttttttttcctgagacagggtctcactctgtcacctatgctggaatgcagtagcacaaattcagctagctcactgcagcctctgtctcctgggctcaagtgatcctcctacctcagcctcccaagtagctgggactacaggcacacaccaccactcccaactaattttttgtaattttcatggagatagtatttcaccatgttgcccaggctggtttcgaactcctgagctcaagcaatccgccccccatagcctcccaaagtgctggaattacaggcgtgagccactgcgcctggcctgcctttgttttcttagtaaacttcacacttagttgtatggacatttggatataatttcctgagtaagaaatgtgttgtcttataattttgtagtatcttaatattggctctgtcgtattcatagagataagtatgaagttactttaactactaacagttcagttttttatacacctgtttgtcccatgtgtggttttatcattttctgagatttctttcagccccttagctaatgctgtatcactattcatagtctattaacctgaatgctaatctagtcaacctctacctcctctttcaatcctactatcatggattggtctaagatagacttaaatttattgaatagcaaaatataaaaatgtttggaataagatgaaggagttgctcattttggtaacagtctgcttttacaatgattttgattataaaagcttaaggaaattaaattatcattaaaaaaattctcagtaaatcattcattttcttagagtaattcaaggtaataagatggagacactggctaagtgatggaaacattgtaggatgtgaagtttctaaagtgcaagtgtttaggcagtgttttaccatggaagtatgatttaataatatgtatgtttccatcttcagaaaagaaaatttatgtctttaaaaaaactatcccctataaagatatatgttataaagaaaaaaacagttataacatccagagcaaaggtctaaacctggtgtccatggattcaaaggaagtacaggaatgaattttaggaaatccacgaaccctctgaaattatatgtaaagtgttgtatttatgtaaatagttatatttttccttttttttttttttttttttagacaaggctttgctctttcacccaggctggtaggttcatagctcattgcaacctcaaactcccgggttcaagcaatcatcccacctcatcctcccccatagcctggaactgcaggtgcatgcaccaccatgcccggctaatttttgttattttttgtagaggtggtcttgcttcactgcccaagctgatcttgaactcttgggctcaagcaatccttctgcctctacctcccaaagtgctgagattacaggcatgagccatcgcatttcgcctttccttagttttgataagattttcacagggttctgtaatccacaaaaagattgagagactgcctaatagttaatgaagtcagaatcaaaattctaagaacatttaatgtacttaactcaatggaaatagtacattaaagaatgtttacattagcatctactaaaatgaaaatggtagaaattttgtcactaaaagatcaagggctcatatttctaacagatctttttcatagggaatatctgaaacataaggagaaagaaaaatgtgaggtgattaagaacttgaagaatattggcaatggcaacctgtgtcctgttttaaagcgcactatcccatttggagttgcctatcaccacagtggcttaacaagtgatgaaaggaaactcttggaggaggcctactccacaggagtgctctgtctttttacctgcacatctaccctagcggcaggtgtcaacctaccagctcgaaggtaagagataagtaagtgttgaccaggctcagaacttttccatttctagcttgcgaggagttttgttgttttatgctttctcagtagtggatgagaatttatcaaatgttcttttagcatatgctgagttgattggttggtttattttctttaatattttaatgaatatgtaatgaaatatgtaatgaaaaataacgttaatagatttcttgatattagaattccatcctttctgctctttatatctggttttgatgttagggtctattaatctggttttgtagaaatagttggcaagtgttttaccttttttatgatatgaaagagtttatttaacatagagatttccttgaaatcttggagagctgatccataggcaatttgtgtctaatatatgtattttaaagcaggcccttgattacctttccagttattaccaaaggtgtaggcctgtgtaattgacttctcccctttataatttatgatcatggggtattttgctaataaatgatcaatttttataaactttccatgagtgtttaaaaaaatatgtattttcagttgaatatgcagttttgtacatctcagcgagatcacagaggttcattgtgttatcggcttctctattttcttactatatttgattccttggtctatcaatttcagagaagtgtgttagtctcccactttaattatgtagttatcagtttctcctttttgcatctctagaagttattactttttatatttcaaaactatttagatatacaaaggtttacttcaaatatcttattgccgaattataccttttatcaatacaataaatacttgtttttctcatttaataattttgctttgaataccaggactcattttttttttttgccacgtatgtacctttttccattcttttattttcaatttctgtctctcattaagttttccatttttcagacaattgaagaaaaaaatgaaagttatatatcctgtttctattattccagtggttactcttaaaattttaagttgtaaccaaacattttttattactttagaattaatcaataactgtcctctcctgaacataaaaagaggcttagcatgtccttagtatattctactctgccccatgaatgttgcaattacttagaattttagtgccagatttaaacattttctttcatcttatgtagtatttaaacttacctgtaaatcatacttcttttttgcttaccactgcctcttatatcccacatctttcttctctgatttttttttttttaattttgccttccttgagtaatcctttttagaataccgctttagggggtaaaacattttgactctttgcatagttgaagatatctgtattttggcctcacacttttacacttcactagcaaaagaattctagattcaatttttttcctttagggattttgtaaatattgttccatattttctagaggccaatgttgctcatttttgtctctgcatggattttctgtttttcttttccagaaacttttagacttttctctttaacctcccaattttgtcatggtgtataataatagttgtaattactacattcccctccctttcatgtagtaacaactttacatgcattgacttgatacagcttcacaataactctgtgaggaaggtcatattttattacacacctattatagaaggggaaactgaggcactaaataattaaataattttcccaactttaaaaagttacataactttttcccaactcattttccaacaaatgagttttaaagccagtgtttgaacccaggaagtttgattttacaatcccaacagtactacttttcattcatagggcttagcacttgggtggatgcttttaatctaagctttatgcctttcttctttgagtaattttttttctgttatttctttttcttcccattatctctgttccttgcttttataatttcacttaggcagggttgaggcctcttagattcagctttcgtatctcttttcttacacatttttcagaatgtggaagaatgtaagcacacgtttgtgccatgtaatttttttcaactttaccttccatatcaaaaaatcagtttttttgtaatcccagcactttgggaggcaaaggtaggaggattgcttgagcccaggagtttgagaccagtctggacaacatagcaagacctcatctctactaaaaaattaaaaacttagctgggcatggtggcatacacttgtgatcccagctgctcgagaggctgaggtgggaagattgcttgagcccaggacatcgaggctgcagttagctatgattgtaccactgcactccagcctgggcaacagtgagaccctgtctcaaaaaaaaaaatgagtttttaactgatatccattaactacattaactgtatccattaactattttcattcattattcagttcttcaattgaattttcttttttgtgagacagagtcttactctgttgcccagtggccaggctggagtgcagtggtgcggtctcggctcactgcaacctctgtctcctgggttcaagcgattctcctgcctcagcctcccaagtagctgggattacaggcgcccaccaccacacctggctaatttttatatttttagtagagtcggggtttcgccatgttggccaggctggtctcaaactcctgacctcaggtgatctgcccaccgtggcctcccgaagtgctagattgacaggtgtgagccaccacacctggcccttcaaattttttatgaatttttaaataaagttaatttttttttatttctaagaactctcttttgttgttctttccttataatagtctactccttttttttttttttttgagacagagtctcgctttgtctccaggttggagtgcagtggcatgatatctgctcactgcaacctctgcctcccgggttcaagtgattctcctgcctcagcctcccaagtagctgggattacaggcacacaacacaatgttttttagtttttgtgtttttagtagagacggggtttcaccatgttggccagggtggtcttaatctattgacctcgtgatcctcctgccttcgccttccaaagtgctgggatttacaggcatgagctaccacacacggccaatagtctactccttttttttttttttttttttttgagacggagtctcgctctgtcacccaggctggagtgcagtggcgcaatctccgctcactgcaagctccgcctcctgggttcacaccagtctcctgcctcagcctcctgagtagctgggactacaggcgcctgccaccacgaccagctaatttttttatttttagtagagacggggtttcactgtgttagccaggatggtctccatctcctgacctcgtgatccgcccccctcagcctctcaaagtgctgggattacaggcgtgagccaccacgccccgccaatagtctactcttatattgtggatataatactctttggaattttctgttaatgctaattaggatttttaaaagttctcttctgatccctatattatctggttttgtggtcacttattctgtatattcatgttatgtttcttttatgttattagttttcttcaagtatttggtaatcttttctgcatatgagatttataaataaagaggaagttgactagtataggtaaacaataggttttttcttccctttggataagaaagctgactaactgactatagacttctgtatatatgaacataattgaaattgctttttttttttaagagatggggtttcactctgttgcccaggctggagtgcagtgatgtaatcacgatttactgcagcctcaacctcctaggctcaagtgatcctcccaccttagcctcccaagtatctgggactacaggggcacactaccatgcccagccagttttttgttgttgttgttgttgtttttgtagagactgcatctcactatattgcccaagctggtctcaaactcctggactcaagcaaacctcccacatcagccctccaaagtgctgggattacaggcatgagccactgagcctggctgaaatcaccatttttgtaggtcaaaaacagttgacatctgcaattttatacagttcaaaataataaaaattcataaatagatatgtatatgttagtggtgtatggtcatattttttatttatggagtataaagtccaaacgctttggagactactgctacagattgatcataggcattgcagctgggcagacttgagttcaaatgatagctctggtaattactaattttttagtttaggataagtcagttaactgagttgtaattaattcctttataaaaatgaaataaaaaagtatattataactaagagttttgtaagaattatagataatatgtgtaaaaacctaagaaatcatagattcttggtaaacactagttacctattattttgtgttagtatgtcattaaatttaatatcacaaatatataatgaaattaagaattttttaaattggtgctgtttgctgtagagtatcatttttcattaattccacagagttattttaagagctccctatgttgctaaggaatttttaaagaggaatcaatataaacagatgattggcagagctggtcgtgctggaatagatactattggggagagtatcctcatattgcaagaaaaagacaaacaacaggtaatactcaatttggttggttggttgtttttgtctttttcttggttgttggtctagcccttttatgaaatcatcttttaaaaattaattattaattttctttaaatgatgctttctttcctatatgattaagaattagagtggtttgaaaatgtatgtatttcagacaatgaaaaaatatttttcctatttgtttttcttccatttttaatgaagataaatgttaaattcttttgtctttacttttttggtctccttctggctccacaagatttatgtaaagtataaaatatttatattaaataccatttatttttaataataacacaaggcatggttttgctttaacctttataggtattggagttaataactaaaccattggaaaactgttacagccatcttgttcaggaattcaccaagggaatccaaacattatttctctctttgattggtttgaaggtatttttcttaaattttttatcttattactgttatctgagacaatagaggttaaaaagttatgcaataactttatatatgcaactgtgtagattttatactaattttttatttaataattttttcttttaatttttttctttttaattttgttttctcatccccttcagtgattaatgtaaataatttttaaaagatcatggaatggttaggtgcagtagctcacacctgtgatcccacctcttagggaggctgagacaggaggatcgtttgagcccaggagttcaagaccagcctgggcaacatagcaagaccccatctcaaaaaaaaaaagatcactgaatcctaatgcttggcaagtggttggcacttaataaatacttgaattaatgaaattggcttttttttttcttagagatggggtcttgctatgttggttagattggtcttgaactcttgtcctcaacagtcctcccaccttagcctcccaaagtgctaggattataggcatgagccactgcgcctggcctgttttgtttgtttgtttgtttgttttttctttaatctgggacatggtgatgaaattaactttggaactgagcgtgggtgaacttccaagttggggcatcagtggagaatctggatttgagaagccagaagcagaggctggcccagtgggtttcaattactatgtcaaaaactttttcagggaggaatagaaagataacatgatggtagatagagggatcaagtaaaggttcccctgcccccctgcactcttccacccccagtgttaactctaatcatttaggtaggaaacagtacaaaaacaaagtacattaataatccaaaaaccaagtatcagttcttaaatatcttaaaagtataattttagcttaattgaatactatattaataatgatttttattaaagtgggaagaagcaatagaaaatgtctgtgctccattatatttttcttaccccttatattggtttaatatgaaattacgacttaaattttccagttgaaatagcatcagaattgtaagagagagaaatatacttattgattgactatattttagtataacatgctgatttcattgaaattggctaataaaaattattctaattcagagtcagctctacatctgaatactaaatggagggttaagtattccttatgattgccattgtaagttataaatagtgaataacagtgaaagaacaagaaatggagataggaatgagagagacaaaaataggtagagatcaactatttttaggtaacattttaggcaaaatattgtctgacgctgttttagtggaaacttgtattttttttttcagttctttttttaatttattttgttttttgttttttttttattatactttaagttctagggtacatgtgcacaatgtgcaggtttgttacatatgtatacatgtgccatgttggtgtgctgcacccagaaactgttgtattttcctttttttttttttaatgcaacttttagagctaaaggatgtttttacagttgggtggaatgcagtgcagggaagatccctaaaggaggctgagtgagaattagtgaaaattggttggggagtaaatagcacagttctggagatattgtgaaaaattatttaaagatctatccaaaggagttttggaatgaaaaatgagtacatgttttcataaaaagcatgaatataataactatcatccccctaaattttttgttaatttttaattgccattataaatttatatatgcaactgtgtagatttaatactaattttttatttaaatagctttgaggtatggaaatgagttatcttgattaatatgcattcaaggtgatgccttgaattaaggaaaatgctccaatgatatcctgaattgtttcagattgcaacgaatcttgatgacatctatcatttcatgaatggtacattttttggtgttcagcaaaaggttttattgaaagaaaaaagtctctgggaaataactgttgaatcacttagatacctgacagaaaaaggactcctacaaaaagacactatttataagtctgaagaagaggtccaatataattttcatattacaaagttgggacgtgcttcatttaagggtaagagtttacctaaatcttattgatcataggaaacacattggaaaaaatgaaaattaaattatactttctttaagctgggcacagtggctcacgcctgtaatcccaacactctgggaggccaaggggagcggatcacttgaggttgggagtttgagaccagcctggccaatatagtaaaaccctgtctctactaaaatacaaaaaaaattagccaggcatggtgatacatgcctgtagtcccagctactcgggaggctgaggcacaggaattgtttgaacctgggaggcagaggttgcagtgagtcgagatcacaccactgcactccaggctgggcaacagagccgagactccatctcaaaaataaaaaaataaaaaattatactttctttaagttgtatttataattttatattaattacattaatcttattttataagctgataactccttcaactttcaaaagttgaaaaatgttttgaattataagtactgcagaagtatatagagaataaggtaggcatccctccttcatgcttccctcctagcaaccatacaaatcttaatattctaccaagaataacaatttggtgtatatctttccagacctttactgtacatttcatttcagtgcataatatgtacatatgtacagttttaagtttttgtctttaaacaaataatcatttatattattctgaaactttttataaattaaaaaaattttttttctttttttaaatatggaggcaaaatctcgctatgtttgccagggtggtctcaaacttctcacctaaagtaatcctcctgcctcccaaagtgctgagattacaggcatgagacaacacatttggcctgcaacttgctttttttcctgaatataatgtcttagagattgtttcatgacagtgaataaagtgttgtgggggttgttttggttggtttgtttgtttgcttgtttttgacagggtcttgctctgctgccgaggccaaaatgcagtggcgcaatctcagctcgctgcaaccttcgtctcctgggctcaaatgattctcccacctcagccccgcaagtagctgggactacaggggcatgtcaccatgcctgactaatttttgtatttttagtggagatggggtttcacgatggtgcccaggctgaggcttttttttaatgaaaaataatacatgtctgttgttaaaaaaaaaaaacctaagaactcagaattatgttaaggaaagtgccatattcctgtcccatttcaggagctactactaccagtttgatatgtattcttccaaatatttttatgtgtgtatttatttttcaaatggaatgatcatttaaatatttttttccaaattacatttctcataagatatcatgaacatcttaacagatgagtctctttaaatctatctcatttttcttttaatactacagtcatctatagtatggatgtaccataatttatttaaccattcgatgttgatggacacttgcattcttttttatttttctctgttataaacaaggcgcatggacatctctatgtattttggggtacatatggaaatgtttctctggattagattccccaaaatagttggttcagaaggtatgtacttataaagtgttgatgagtactatcaaaatgacctccaaaatagttatatagtaagatgttataagagattttgaagactttttgctatatttaagcaatttctacacaatatttaaagccatctctttgcccctctggtaattgtgaaagattgaatatttgtatctttcttttaggaactatagatttagcttattgtgacattctgtacagagacttgaagaaaggtcttgaaggacttgtgcttgaaagccttcttcatctaatctacctaacaaccccctatgatctggtttcacagtgtaaccctgattggatgatatacttcaggcaggtgagaatataacgtttttcaacttaggctacttcgtttatgaattattacatgctgttttgttttgttttttagagatgaggctttgccatgttgcccaggctggtctcaaactcctaggctcaagcagtcttcccacattgtcctcccaaagtgctaggattacaagtgtaagccactgtacccggcctattatatgctttttatgaagtgattattcactttttttctctattaaaatatatttggaattggatatttttttctttcagtttttaaaaattataatctggcaacagcatttatggttcgtttaactttaatgttacttttctcttaaatataaacatatttgttattgaaaaaagtaaaggttaaaaaaaagaaaaaaagattatccgtggtcctatttccccacagaaagttactgttatgatcactgcatttgataatgcctagaatgcaaagaaaacagtgaaaaccatctctgatgatttagagtttaattacatgaaagctcggtcagagccaagtatgataatacattaaacccaatgacgttaataactgaaaaggaatatttattttacaacccatcacaaagtagaactgtccatacttattataaagccaagtggtaacatacagtatattatgattttactgtgaacaggctagctgtataaatgtatattagggctgcatgtggtggctcatgcctgtaatcccagcactttgggaggccaaggtgggaggatcacttgaggtctggagtttgagaccagcctgggcaacacggtgaaaccccgtctcttctaaaagaatacagaaattagttggtcatggtggcgcacaccagtagtcccagctactcaggaggctgaggcagtagaatcgcttgaacccaggaggcggaggttgcagtaagctgagatcatgccactgcactccagcctgggtgacagaatgagactgtctcaaaaaaaaaaacaaaaacagaaacaaaaacgtatattagacagaggtagtatacatcttttaatcacaggaaattagctttctttttaatgtcatatttttaaatcattactgtttttttttcttttctccatctcttctcaacttcctgagtttacattactcaggaagtaagttttttttaagtagcactatataatgcaattactctcaaacctttccttctccttcccctcagccatctggtattaaatatagtcatatagtccatggaaaccagtacttgtggctatgcctttaagtaattctaaagtgtgttatatccttgttatatcctaatgatgtaactttaaaacctgcaacatttacaaatatatttatcttgttttttgtatcctgaatcatgagaatgtgatatcaaaagaaatactggatttggttcacatgacagattttttgatgtttccatctatttgctctttttccatgtagtttagccaactcagtccagcagaacaaaatgtagctgccattcttggagtctctgaaagctttattgggaagaaagcatcaggccaagccatcggaaaggtaccacattctttttttcttcctaaataataagttcactcaacacttagttcactcactaagttcactcaacaaaattagtaccattatattgatcttttttggtttacattttttcctttaaattagtataacgttcattttactacttaaaacatacctgagcacccaaaatgtatgaatatttttaaacaacatttatttctgggtagtgtgatgacctttttttgggtagcatgaaatgttttcataatattacacaatcctgatataagttcaattcaaacgaggaaatacattttctagaaactatattaggctttctatttggtatcaaggattctaagataggacaggtctgggttttttgttactgcttttgtcatcctcaaagaactcctagtctagtacttatattacataaagcattttagaaggttaaaggggataagctaatactcgttggtgtgatatattttggtgttttaaaattcagtctgcaggcatgaagcaagttatcaaatgcatacactaactttaagagaaattgaagtaattctttcataaccataccttcgatttccttaagagaatgttattttcccccttgtaatacacttttttttttcattttaaattttatttggcaatccaatttacattgaaacctagttaccttccattttcccccacaccttttttttttttttttttgaggtgcagtctcactctgtcgcccaggctggaatgcagtggcatgatcttgggtcactgacacctccaccttccaggttcaagcaattctcctgcctcagcctcctgagtcactgggattacaggcgcctgccaccacgcctagctaatttttgtatttttaggagagacagggtttcaccatgttggccaggctggtctcaaactcctgacctcaggtgatccacccgcctcgttctcccaaagcattgggattacaggtggctctcaggttgggagccaccacacccaacctcctctataccttttaaatttacatagacagtacagatttcattttgtaaaatggaagatgatgtttacatacacttaaattgatggtgcagtgtcccatgcatcactgtgtcataaaatcaaaaatattgggcccggcacagtggctcatgcctgtaatcccagcactttgggaggccgaggtgggcgaccatgaggtcaggagttcaagaccagcctgaccaacatggtgaaaccctatctccactaaaaatacaaaaattagctatgtgtggtggtgggcacctgtaatcccagctactcaggaggctgaggcaggagactcacgtgatctgggaggcagaggttgcagtaagctgagatcacaccactgcactccagcttgggtgacagagcaagactctgtctcaaaaaaaaattccatgagcccagcacagtggcacacacctgtactcctagcttctcaggaagctgaggcaaaggatttgcttgtactcaggagtttcaggatagcatgggcaacatagtgagaccctgtctcaaaaataaaaataaaagtatctgtagtacttaagcattcatgttatcacaatttttagattgggtcttttactttggaaatggctatgctgtttagaccttcaaaatgctgaataaaaatatttcttaaaacaaaccttttatatcaaactctgaaatgtaaaataaaaacaatatcattaatttggaactaattatcaaataataataaacatgcaaaaatcttattagaataatatatctttttaagcttgaatccagaatttatttttgttacatttaatgtaatatagtcaacaaatatttgccaaattgatacatatttaaaatagtatggacatgaacttatcttaattacaaatggattaattactagtttaatgttttggaggtataattttttaaaactctggagaacatatttaaatacttaaaatctaattgatttctccacattgaaaaagaggccccccacctgaccttttttgaacattcttgatttcttgcaaaagattttttttttttttgatacagagtctcgctcttgtcgcccaggctccaggctgcagtgcaatggcacgatctcagctcactgcaacctccgcctcccaagttcaagtgattttcctgccttagcctcccaagtagctgggattgcaggtgcccgccatcatatacagctaatttttgtatttttagtagagatggagtttcaccatgttggccaggctgatcttaaactcctgacctcaggtgatacgcctacctcaacctccaaaagtgctgggattacaagcgtgagccaccgtgccctgccacaaaagatcttgacattggcataaagcattgtattttgccatataataattatatcatttttcttggcttaggaaatacattctaagaaaaaacctacattgactcaatttatagttagtactgaagatgcactaaaattgggaaattaaatagctctcttttcctacttgatgttcagctgtcatactttttcagcttaatgcttttaaaaaagtgatccagtatcaacatgcagaatatgtaactcatacatccttcaatttgtcaccgtaagttctcatttcattcttttactatggtggaggatataattttatattttattttattttttattattttacagttttttttaaaatagagacaggttttcaccatgttgcccaagctggtcttgaactcctgaacttaagagatcctcctgcctcagccttccaaagtgctgggattacaggtgtgagctaccactcccaacctctattttattttttatacctactttttcttttttaagttcatctttttgccctcaattttaagaattgattagtttctaagctagctatgaaatcctttatgcacaaatgtggtcatcaggcaccacaggccaaagcaggtatacagaatcgaaatcatcaactacaggaagcatttttcaatctctttcaggtgttttagcttggaccatgtggaaatcataggatctaatatttactcttagtttataatatagacaagcttattaacatatttatctaaagtacatttgtctaatttataataataatcacatacgtacacaatttacaaataccaactaactgtaaaagtctctctcaccaattccttcctttcctgtattcattttctacaaccgccataacaaattaccacaaatgggtggcttaaaacaacagaaatttattctcccacagttcaggagaccaaaagtccaaaatcaaggtattagcaatgttgattccttcaggagcctctgaggaaaaagccatccgtgcctctttcctagcttctgatggttactggcagtccttggtgttccttggcttatagatgcatccctccaatctcagcctccatcttcacattgctgccttctctgtgtctctctgtgtcttctcctcttataaggacactaatcattgaatttagagcctactgtaaatccagggtgatttcacctagagatccttaactgattgtatctgcaaatatcttgtttccaagtaagatcacattcacaggtaccaggggttaggatttgtacatttctttttgtggagtgatggagagggggtacaattccttccctgtagaaggaagtttaatttagattggaaataatttggtttatcttttaacttttatttatttttatttttatttttttgagacagggtctcactctgtctcccaggctgagtgcagtggtgctatctcggctccctgcaacctctgtctcctgggctcaagtgatccctcagcctcccaagtagccaggactacaggtgcgcgccaccacacccggccacgttttttgtttgtttttttgtggagacggagttttgccacgttgtccaggctgatctcaaactcctgggctcttgtgatccatctgccacagcctcccaaagtgctgggattacaggcatgagccactctgcctggccttatctttttattgtagttggaaaaatgataataaattttaattaatctgaagtacatctgttagaaattagttttgtttctatggaattattctatccttgctattctgtaatacaacttcagttttccttttgtccaattttaataacatacatttttagcaggtctagtaaacgaatttatttgattgtgtctttctagaaggtggacaagaacgttgtcaacaggctatatctgtcttttgttctttataccttgctcaaagagaccaacatttggactgtatctgaaaaatttaatatgcctcgaggatatatacaaaatcttctcactggaactgcctcattctcatcttgtgtgttacatttctgtgaggtaatttcattgaatatatgatatgtactttgtgcatcttctggttttaactgttactaaactaataagccagttagtcagtatgtcagcattttctccttgttgacatattctgttattacagagcactaaaaaactatttaaaatgtacgtttgtttttatctgtttatgaaactactattatgtacttatggtaacaatacaaaaattcctgagtcaactaaaacacataatgaaaagtgtctttttgacccaactcttaaagccaccattaatagtttcaggtattcagaattaactgttaaaaacaacctattgatgtagattccatgtgaatgtctttcacctgagtaataaaaatgtcaggtgtttggttagaaagttacctatatccaacagctaccatgtgactatttagtaccatattctctttttaaaaaaatttaattttgactggatgccatggctcccgcctgtaatcctagcactttgggaggctgaggcaggtggatcacttgagcccaggagttcgagatcagctgcttgagcaatgtgggaaaactccatctctacaaaaaataagaaaaattagccaggcgtggtggcacacgcctgtggtcccagctacttgggtctcactctgacgcccaggctggagtgtagtggtgtaatccaggctcactgcagctttgacctccagagctcaggcagtccttctgcctcagcctcctgagtagctgggatcacagacatgtgccaccacacctggctaattttttttgtttttttgagatggagtctcaggctggagtacagtggcgcaatcttagctaactgcaacccccgcctcccgagttcatgcaattctcctgcctcaacctctagagtagctgggattatagtcacacaacaccactcccagttaacttatgtatttttagtagagatagggtttcaccatattggccaggctgatctcgaactccggacctcaagtgatccacctgcctgggcttcgcaaagtgttgggattacaggcatgagccacagcgcccaaccaattttttaaattttttttgtgcaaagggtgggcgggggtggggggtctcactatgatgcccagcctggtcttgaacttcaggctgaagcgatcctccaggttgcccttccaaagtgctgggattacaggcatgagccgccacgcctggcccatattctcttgattgccactgtaatttagtatatttgcttccagtgtcaggcagctatttaaagcttttacatcaaatgtgtattttatagaacaatttaagaaggaaaccttatactggtcatatgcatttgtgatggatttaagactttattaaaataagctttcagaattcctttaaatagcacaataaagcttaccaggcttttacatccagatactttttttatgtgtttataatataagccatttttgctgcatttagatttcttcttattgggtggcataataatcctttccatatttgtttccaagtcaattttctaaaacttttttcccatgaattgttttctaaatttaaaatttacttcattttccctttcttaaaccttcatattctgtatatgtatatggcaattaattctatcatatgtgctaatgaaaggagtaaataattcaaaaatacttggctttcaattgaatgataattattttaacaaatttagctttctaaatatcttttacttgtgctgatttttaaatgttggtttataccccctgagcacatgctagttaaacagaagacaaaaattatgggtaataagaagaagctagcctttaaaatgtattttcttaagtcttctatatttgttgttttgtatatttaaagatgctttccctaatattttttccctttgttttcattgcgactatgaggacttgagccttatagaattgtttaagtaaaaaactctatgaagcatcaagaaaaacagcaataatttgatgactaatcctaagaaaaatctagctgacaatttgtactctaattaatttacttcatttatatatatcataattatataattacatataatataaatatataattatatgatatatattacatgtatataatttttcaaattattatcaatagaggcagggatcttgctgtgttgcccaggctggcctcaaactcctggactcaagcagtcctcccaccttggcctcccagagtgctgggattacaggcatgagccaccacacctggtctactttcaatatttcaaggcaggggtgttcaatcttttggcttccctgggccacattggaagaagaatcgtcttgagccacacataaaatacactaacaatagcttatgagctagaaaaaaaaaaaaaaaaaaatctcatggtgttgtaagaaagtttaccaatttgttttgggtgacattcaaagccatcctgggccgcatgtggcctgtgggccacaggttggacaagcttgttttaaggtattttttattttaaaaagttataaatggtatgaaatggtacattaattgtgttagttaagatgcttttaactacaagttacagaaaaacccatcaaggtttaaacaataagaaaaaataattattttatataacaggcatgccagaactaaggcagcttcaggattgattgattcaatagttctgttcaaggttttcttctttttactctgccatcttcattacgttgatttctttcttagtagtcacaagatggctagctaatgctgttccattcatcatgtacattcacagtgatatccaaaggctagaaagggaactttaaaataaaataaactactataatagaatattgcaaatatctatgacaaaatattatattgaattcccatttacccttctagctttaacagttattgactcatggcttccagtatttttattattgtattgttgcattgaacatcatgttacatttgaatatttccatatttaatattcatcttccagataaattccagatgtaggaattgtttttagtcacttgggaaagaaaaactatgcattttcttccaggtattttgattaaaatgaccagaactctttttattgacttatttttcaattttcaatcttttcctcatcctaaaaccagttcctcaaattcctcagggtcctccccatgtttcttcacatctgttttgcttagaatcatctttcatctctggcttaactcaagttccagaacttatgtaaggaacattctctctgagccccctatcacacaaaccaaactttgaaataacttacaaaatttaaattttatatatttctttgtgttctacaggagcttgaggagttttgggtttacagagcccttttggtagaacttaccaagaagctgacttactgtgtaaaggcagaattaatccctctcatggaagttactggagttttagaggtcagtagcttgttggtttcccaattgaaattatgttgaattaatacagaagccaggttttattattttctgaagtcttaatacagaggaagtgatagcaagagccttaattgctcatttgtcatgggaatcttttatttaaaacaaatagctgttatggccttccagaaatccgctgttactagatggcatacctgatgaaaaatctcagttgtgaaaaaaaaaacataacaggaagggtgggagtgactgtctccaagtatgttgtgctaccggttgtccttaacacttcttccttcctccactcctttgaagaattaccttctgtcagtttggactcagtgcttgtttaagataatggtgattcagtggcagaaagggtcatttgtattttttctaagagagtaagaagaaagggttcgcaactggttttccagctttctattttcagccaaccctcaacttcagtttattctctgttattcagttcttgagtcagaggagttctgcttaggacacacgcacacacacagagagagacaccagtggtcccctgagtagatggtgagaacactgaaagatattggacttggcctgatgatgtggctcatgctgcaatcacagcactttgggaggccaaggtgggtggatcaattgaggtcaggagttcaaaaccaacctggcccacatggtgaaaccccatctttactaaaaatacaaaaattagccaagtatggtgtcgtgcgcctgtaatcccagctacttgggaggctgaggcaagaaaattttgtgaacgtgagtggtgcaggttgccataagccaagatcgcaccattgcactccagcctgggcaacagagcaagactctttctcaaaaaaaaaaaaaagaaaagaaaagaaaaagaagaaagaaagaaagatactggactagaacattttacttgaggatatgagatgatgccaccaacctaagtgggtttcttttcttgattgcagcacacatcagttgactcaagctgcatagaactatagttaccttgtagtcagtttggaaccacccaaatgcatttttaaaaattcctcagtattctcatgtcttgtctcttcatatttactttattttatcccagtctcttacatgcagtttttgttcttttcagtaaagtgcttaattttcttttttctaatcccaaactattatcctactgatttttgtaacacttttcagggtcgagcaaaacagttatacagtgcaggttacaaaagtctaatgcacttagctaatgcaaatcctgaagtgctcgtaaggacaattgatcatttatcaagacgccaagccaagcaaattgtttcatcagcaaaggtaagcaaacaaaccattttttaaccttaataatcttgcgtagtgttatttccttgtattatagacatcagaacaaaaacatttcacattgcataactgtttatttctatagatacaaaagtacatactcttatttgtgagtaaaaataatgcatctgttgtgacacaagccttgcaaaacaaaaaaaggacctgctaaaaaataaagaaaatttcagtggtggctcatgcctgtaatcccagctctttggaaggtcaagatggggaggatggcttgaaatcaggagtttgagaccagcctgggcaacataatgagactctgtttctgcaaaaaaatttaaaaactaactgggtgtggtggtttgtgctgtagttctagctactccggagactgaggcaagaggatcgcttgagcccaggagttcaaggctgcactgagctaggatgacagattgagaccctgtccccccgccccaaaaaaaatgccaggcatggtgcctcatgcctgtaatcccagcactttgggaggccgaggcaggtggattacctgaggtcaggagttcgagaccagcctggccaacatggtgaaaccccatctccactaaaaatacaaaaatttagccagacttggtggcacacgcctataatcccagctactcgggaggctgaggcaggagaattgcttgagcccaggagacggagatggcagtgagccgagatcataccactgcactccagcctggctgacagagcgagattctgtctcaaaaaaaaaaaaaaaaatggctgggttcggtggctcacacctataatcccagcactttgggaggccaaggcaggtggatcacttgaagccaggaatttgagaccagcctggccaacatggtaaaaccctgtctctactaaaagtataaaaattagccaggcgtggtggcccacacctgtaggcccacacctgtaatcccagctactcaggaagctgaggcatgagaatcacttgaacccaggaggtggaggttgtagtgagccaagattatgccactgcactccaacctgggtgacagagtgagagtctgtcttaaaaaaaaaaaaaagacaatttcaagggttcattgaagtataaagaaccctggaagtcactgagctctgtctcccaaagttctcttcacaggaatcctttcctcagcatcccagcatctggtctctccacctttgagcaccagcactgacaaggagcctgcatcatcaaaaattaggttgtctatttttgtacactcttagtgttacaaaaattatcctgatatactgaggctaaattttgccttcttaaaatttctaccattgcatcagagtactacctctggaactggactctttttttgtttgtatgctgtttttcacatattcaaaaacagctcttattgcccccaagggtttctcttttctgttgcttttatctgtattaaataatcaagttttaggccattcactgtcctagttaccctttgctagatgcaacccagtttgccattgccttctgctccctgtgggtaaagccattccacagcaatttgagattgtttccttcttgatctcaactgtggttctaagtctgaaattgcttggcttctttgaagcttcattgttttactattttcatatataaatcagaattagctttccatcattttttaatggtgctcacattgcttacattaccttaattgttctttacaacaaacctatgaggtggacaaagtcagtgttacccccaatttatagatgaaaccactaagattgaccttgtcccgttaaattaggagttcttggggttggtagggatgaagttatagtcatttcctttgctatagcacctaaaaaaaaaaggttcattaaactttcacacacttgtttcagcatttactagtgatgtttgcctaactccattatttccatgatgcttatcaagaggtgattttctaacttcattatcccttctggatttatttactgatgttttactgtgaggaaaagcttttcctttatttattcatttatcagtatgtgctcataggttcaaacatattcaatgggttataacccattaataacattacttattttggtgctcaaatggcctcagatttggccagtggaagcccctgaaaactggtttgtgtggctttttgacctgtcatcatcattcttgaagtattttcttactttctggctgtgtctgtcagcatctaatcattaggaggcagaaaccacacagtaatttgaacaggcgtctaaggggtcaacagaactttaaagaattcaggaaggaatacatttgagagacggtccacccccaccccacagcacccctgtggatgggatccggacttcattgccactggatgctgggaagtttgttgtggtgctacagccaaggctaataagcagaaactgcccacggagtgctgacaaaactgcaaggaagctgcctacaatgtactgttgaacttgcccagaagtcagctctagggcccatggaactagggcactagctaggaccaccctagctgatgtatgtctatgtatttttctatacttatgtgtaaattactgaaggccatgagctcatactgataaccctaattctgatttttccacgtacatacgctacataacagagtctaactccaaaatttagtggcttaaaacagccatcttattttgctcatgtttttgtagattaggaattctggaggggtgcagctgggtgcttctcacttgggtctcaggcaactgtagtcagaagttgactggagctatagtcataaggcccagcagagctggatgacccaggtgactcactcacatgaccaacagctgataattggaggcaactggggcttttcagcttttgactggagcaactacatatggcctttccatgtggcttcagtctttatggcatagaaactaggttttgagagggaatgtccagaaaatgagcattttaagatatccaggcagaaaatgcaagaagtcttctgagccaacctcagaagttatacagtgtcatttccgctgcatactgttggttactagaaaaccgttaagacctagattgaaaggaaaggggatcagaccacctcttcatgagaagagtgtcaaataatttgtggtcatctttaaaatctgccctctggtcacaaattgtttctgttcctcccacatgcaaaatatattaacccccaaaaggcttttccattatagtttctattaggaaaaactcaaagtcttttttgttgttgttgttcccccactcaacactcaacaaacacaacacagacagaagatttctgtgaccaaatgtgagggatttctccccaaaaaaacaagcaatcatttctgtagcagacatcagctgggtgtcctgacactatctagctggagtctgggcttctaaaacttcttaccaattcaagttggggttccctcaacctcttctctgggttcagtcagctcacgaaactcaggaaaacatgcgtataataaaggatatcacaaagatacagatgaagagattcataggtcaaggtatgggggaagtggcacagagctttcatgccctccctgggcacagcaccctccatgtgttcagctgtctggaagctctgtgaatcctgtactcttagacctcttatggaaactttattgggttggcatgattgacaatcatgtagaaatgtgactggacagaaagggtatgatttattaataatactaacagattgagtggggaaacccagcaagacccgtctgttcagattcttctggcctctctgtgcagcattcctttcttcagagtatggggcaggacactctgggatgagggtctttttacttgtttttggagacagggtcttgctctgttgcccaggctggagtgcaatggcacaatcatagatcactgcagccttcccctcccaggctcaagcagttctcccatctcagcctcatgagtagctaggaatagagacaggtgccacgcctggctaatgtttttaatttttaatagagacaaggttttgctatgttgcccaggctggtcttgaactccgggcctcaagcaatccttccatcttggcttcccaaagtgttgggattacaacatgagccactgcacccagcctggaatgagggttttaagacccaatgatcagattagagttctgccttaggcaggcaaaaggagggcagaagaaggtcagagagagaaattctgttttctgaggtctaaagtgccccatcattgtaagaagggctgtgggagttatgagccaggaaccgtggatgaagaccaatatatgtctatcataatatcacagcatcagactcagatccagtattctaaatcaagtccgagtgtgagtgatacaccttcagtacagtttcacaagttacagttcttcttaatctgaagaccagtgaactaaagagacactacataaaacagtgaaactagaaataggataaccatagtatactctcattcataaagaaggaaaatgggtagtgcacagcagcagttctgaaatccagccagtcatatgtggccagttccttaattatgtcccagttcttctctctgggaatggtttttcttggctttgggttctctcatttgagtcattctcccttttccataagcaataaacccatgtttgctgctaggtagctttctcaatgtgcttcctatatgtagttcaagaatattgaagttcaagagttcaggctcaggtgtagtggctcacacctgtaatcccagcactttgagagaccagagtgggagaatcacttaaggccaggagtttgaggtcagcctgggcaacatagcaagaccctgttcctacaaaagaaatttttttttttaattagccaggcatggtgatgtgtgcctgtggtactcatgaggctgcaatgggaggatcatttgagcctgggagatgaaggctgcaatcagctatgatcatgccactgcactccaacctgggcaacaaagcgagaccttatctctattttatttttaatttaattaaattaattaattttatttatttatttatttattttgagacagggtctgactctgtcacccaggctggagtgcagtagcatgatcttggcttgctgcagccttaacctcccaggctcaagcaatcctcctacttcagcctcccaagtaactgcgaccacaggcgggcaccactatgcctaactaaattacctttttaaatttatttttcaccatgctgcccaggctggtctccaactcctgagctcaagtgatccaccctcctcagcctcccaaaatgctgggattacgagtgagccaccatgcctgggggagaccctatctctaaatttaaaaaaaaaaaagttcaaaggcacttgatgttttgtattgtctgtctctttttattcaatctagtataatatcttttaaaacactgcagtttcttatttgtctatttataatctctatgttgcttgactttcttttttttttttttttttttgagacaaggtctccctctcactccaactggaatgcagtggcacaatcatgcctcactgcaaccttagcctcccaagctcaggtgatcctcccacttcagcctcccaagtagctgggaccacaggcatgcaccaccacacccagctaatttatgtaattttttttttttttttagagatggggtttctccatgttgcccggtttggtctcgaactcctgggctcaagcaatctgcccaccttggcctcccaaagtgctggggttacaagtgtgagccaccttgcctatcctagcttggctttcttacagtgtggatgctaggatctgagggggaggattcacatgaccttggaatgatctcatttcaagaccccaaggcctttcttaaactgagacctgtcatgtggcatcatttcttctgcattctattagttataagtgaatcacaaaggctagcacagattcaagaggagaattagatcccgtctctcaatgaaggtgtcaaagaatttccaatcatctttaatttgccacactaatcccatacaggacttgctatatagtcttcctctttttcatatttgtacttcctttctccaataatgagaaacctcatccctgtgtttattaatatatttctgttttcctcaatcttagaatgcactgaaagtaactgcagaattgttaaattataccactccaaaaaaaacaaacattcagtatttatttacagcactttttgtcttcagtctgagagtatataattaaaataatgtgttaaaatgttacttggtttggggtttaaaaaaatctgcttcagtgtggctgttatacatttgaaacacaaattctactggtattccattttatttcctctccttccctcacagatatttttttagggggagtggggaggaactaggtctctgtcacccaggctagagtgcagtagcaccatcatagctcactgcagccttgaactcccaggctcaggtgatcccaccttagcctcctgagtggctgggactataggtatgggccaccattcctggctaattttttgttgttgttgtagaggcttggtctcactgcattgcccaggctggtctctaacttctggcctcaagcaatcctcctgcctcaacctcccaaagtgctgggattataggtctgagccaccatgcccggcctatctcgtttttattctctttattgttttcctgctttttaaattttttcagtggccctaattaggttttttatttaaatctgtttttctatggacacccagttatttagttatagttattagtttttatttctaatatgattttgcctttttcttttatttcattcctgagctcagtcaacttttgtatcatttcttccagtttttgtccatgtcggttcttagttttttaacttcttatttagagagcatttctactcctcctcatatctccagatttttatttgagaatatttaattttgtttggagtgttgtgttacagtttttctgcttcatggtttgctttcaggaagggaaatttttatgagatgaagagtttgggttcttattggttttcttttctctttttttttttgagacagagtatcgctctcttgcccaggctggagtgcagtggtgcaatcttggctcactgcaagctccgcctcccaggttcacgccattctcctgcctcagcctcctaagtagctcggactacaggcgccggccaccttgcctggctaaatttttttttgtatttttagtagagatggggtttcactgtgttagccaggatggtctcgatctcctgacctcatggtctgcccaccttggcctctcaaagtgctgggattacaggcatgagctaccatgcccagccttgttttctttttatatagtagttttgtatagatgagaactgcttgtgcctctgcatatcttggacaacacagtcatttggaatgatttatgagatcccagttcaagagtgttctcttctgtcagagtagcaaagtatttttctttaatggatgacttggggtgggagaggaatgcaagtttgtttgtttgtttgtttaatttccttttgccctacaagattgtaaattttgtccttttttcctcttcctctcatggctgagcttccaaaaggcacctcccttttcacccattctctcccctaaaagcattgcctttcgaagactgcctcctagagtcccacatgcattttaaatatcttcctataaacaatgctttaatcaaccaacattcttttttcagtatttttatatttgggtaggctttttctctctggaggtgatcttatttcattttagaccctctatttccctcttatcttgttcatgtgttttttttttctcaaccccatctggatctctgcaaacacttgggtgggagctcaagaaactggttttggctgagtgtagtggctcacactataatcccagcactttgggaggccaaggcaggaggatcgtttgagcccaagagtttgagaacagcctggacaacatagggagatccagtctctacaaaaaaagctttttaaattttttctaattaaaaaaaaaaaaagaggctgggcatggtggctcacacctgtaatcccagcactttgggaggctgaggcaggcagatgatgaggtcaagcagtggagaccatcctggccaacatggtgaaaccccatctctactaaaaatacaaaaattagctgggtgtggtggtgcatgcctgtagtcccagctactcagaaggctgaggccttctgaatcacttgaacctgggaggcggaggttgcagtgagctgagatcacgccaccgtgctccagccaggcgacagaacaagactccgtctaaaaaagaaaaaaaggcgggtgggggggagcggaatttattcttccacaaattggtgggcttttttaaacaagtaatttgaggttcttgatattctctgtattatagtaatactaacacaagggttttgtgtagtttacttattattcttattgatctatatagcttattatttggtaaaaattcattgacatctttcatatgccatgtttggaaatactttttttgctcattatgttgcttttgaaattaacagttttaagtttaggaacttgaataaaacttttatttgaaatactggtagctttttaaagcatactaaattttgaggaataataaaatgcatatatataaaggataacatttttcaggagctaattaaatttttgcaaaattgtcttagattttatagattaaaagttaatttttaagtggctgagtcttcaataaaacaaatctttgggagaattaaagctcctttatttttggtatactaaaaggcagtgatcagctaaaatggttttaactaaatgcctcatcttcattgactataatcgtttattcttaagtggccatttttcaatctcattatagttttaatgtctagatttctgatgtgtaaggattcaggtgttcaatggacagtggtaaaattgttggcaattctctagcaatgcatattttggcctcacgtcttaattttttaatgtagatgctgttgcatgaaaaagcagaagccctgcaagaagaggtagaagagttactaagattgccttctgatttccctggtgctgtggcttcttccactgacaaagcatgaagctatctgatgagaattttcatatatgaattatttattgtacatgtgtgttattaaagataacttatactttataaatgaaaaaatacatttcagttatacattaagaa

SEQ ID NO: 15611 - DNA, 48451 bp, Homo sapiens
gagagctaacttggggtcttttcccaaggtggatgtagaagcgggctccggcgtcccactctcccttccatatgggcttagcgtctgggtcactgagaacgacgtctgaatagggccctgggtccttgccatggatgaatgtggttcccgcatccgccggcgggtgtctctccccaaaaggaaccgtccaagcttggggtgtatttttggcgctcccaccgcggccgagctcgtgcccggagatgaggggaaagaggaggaggaaatggtggctgagaacaggaggcggaaaaccgcgggcgtactgccggttgaggtacagccccttctactctcagattccccggaatgtctcgtccttggaggtggtgatacaaacccggacctcctacgtcacatgcccactgacagaggggtgggagaccaggtacggaggacttggaacttgaaactgcaaacttttggcatccttcccagatgcaaagagttgaccagttttatcgccttcgtttacttctctcgtcttcgttaccactgttaatcggcacttaggaggtattgattgccttgttatttacatttctatataaatatgaaatgtaaaccccgagacataaaagttgtgcacgcagcagttaagtggcatgactgagacacaaatctaggcttccagataactgcagctcctactgtacaaataaaatctgctgtttattgaagacccgttatgttaagctagttatattatctagattttacgacagtaatcaggccctgaaaagttgagatagtacagttcttgctccaaatcctgttgtcttaatcactttactatattgctgcctccaggtttgtgtgtcttctgtgtagcagaccactccaagtcagtattcagtttctcagtctcaattccaaattcctaggaactccttggagtgtctagtggtacaaccatgtttctgttagaggccagtcactgtagattgtagtctgggagggaagcgctgcagttatcagaaacttcgaatgcgctgacatttcagtagacgtctaccagtcttcctgctgttttagtacagctttaagaattacaatctggccgtgtgcagtggctcatgcctataatcccagtgctttaggaggcagagatgggaggatcacttaagcccagaagttcgcgttcaaaaccagcctaggcaacagagacccagtctctacaaaaaaaaaaaaaaatttttttttcttaattagccgggtgtggtggcctgcacctgtagtcctagctacttgggaggctgaggcaggaggatcgcttgagcccaggatgtcaagactgcagtgagctgtgatcgtgcagtggctggagccactgtgctccagcctgggtgacagagccagaccctgtctcaaaaattagaatctcagtatcatcgtaacactcctgaacctgctgtttaggcaagtaatttaacctctttgggcctccatttcttcagctgtaagatatctatttacatataggtctgtgatccatatgtgaccatataattatatacttggtacagccctaggctgaagtgttttttgggggttttgtttgtttgtttgttttggtttttttgagacagagtcccactctgttgcccaggttggagtgcaatggcgcgatctgggcttaccgcaacctgcgcttcccaggttcaagcaattctcctgcctgagcctccgagtagctgggattacaggagcatgccactatgcccggctaatttttgtattttctgtagacacggggtttgaccatgttggccaggctggtgaagcttttattcttaatgaaactggaattgaccataagcgtttttgttctctttgcagcctaatgacagtgaagtggacatgtttggtgactatgatagctttactgaaaactcctttatagctcaagttgacgacctggaacaaaaatatatgcaactccctgaacataagaaacatgctacagactttgccactgaaaatctttgctcggaaagtatcaaaaacaaactcagcattactaccataggcaaccttactgaattacaaactgataagcacacagagaaccagagtggatatgaaggtgtcactattgaacctggagctgatcttttgtatgatgtaccttcctcacaggctatatactttgaaaatttgcagaactcttcaaatgatttgggtgatcattctatgaaagaaagggattggaagtcatcctctcacaacactgtgaatgaggaactgccccataattgcatagagcaaccccagcaaaatgatgagtcctcttccaaagtcagaactagttcagatatgaacaggagaaaaagtattaaagatcatctaaaaaatgccatgactggaaatgcgaaggcccagacaccaatattttctagaagtaaacagctcaaagacactctcctatctgaggaaattaatgttgctaagaaaacagttgagtcatcatcaaatgaccttggtcctttttattcattacccagcaaagtgagagacctttatgcccaattcaagggaattgaaaaattatatggtaatgctttttgctggaataaaaaaatttttttcctatcattaccataatattagtgcaagtaaatagaagcaaatgctttcatggtccatactgtttctcattttgaaaacaaaagatcagtgatctctcagccccttccattcctacctgtcctgctaccactgaacctctttccttccctcacagtcacacttatcaaaccagttatcctttctgtctgtttccttacctgacataattcctctaattcctcatctataagaaagggataataagttgttagcaagtcagattctggttcaaagacatgccaaattcaatgttggtaatgattttcaataattatattggtagcttctaagtaagaactttagtaaattaccccactctaattctgggttctgtgctctcattctctcacttaagatctgatgactgagacgtctaaacacagtgttacttttaatgtttaccttacctgacttctcaataacttacctgatgctattgactacacccttcttgaaattcttgtttctggatgtccttacaaccactcctgttttttgaccccgattgtctagtagagatcctcagctttcttagttgtatttccttggctggctctgtcttctctaccaaaacctagctgttgtggtatgtctttgacactcacatgtcttgagtgaaagaagtcagttattagtaatactgttgattaaaccaaacatctttccccccacaccagcagccgcagctacctctccccacgggtgcatccctgccaccacccagatgctctgccttgtgctgcctttcccaaagctagacatctttaaagacagctgcaattaagttttaagtcagggatgtccaatcttttggcttccttgggccactttggaaaaagtattgtcttgagccacaataaaatacagtaacacgatagctgatgagccaagaaaaaaaattgcaaaaaaaaaaatctcataatgttttaagaaagtttacaaatttgtgttgggccacattcaaagccattctgggcctcatgagggccgtgggttggacaaacttgttttaagtgcaaagaagcaataatattaagaaggtatcttgtaatgtttttcaaaaatccagggtccttgcatatatttcagatatgtgtcattttagaccaagaagggacagttgctgccatactggagggtcagccccatcaaccttccacttcgtaagttttctggaactcctgttaggatcttatgaatgatatgaaaacttgggttcttgcagagaagacaatcaggttggagaagcagaactacaggaaacaaagtctaataaaagactctacaagaatccaaattgtgaggttcatgacttaagagctaatggtgtgtgttgccctggaagtagacgttaactttcttccctctgttcttccctctgtttttctgctagcaccttgctttttgtttagtctgccagaatgaatatcctgaggacaaggctctatctaactcatctttttgtttttgtttttgtttttttgtttttttttgagacggagtctcgcgtgttgcccaggctggagtgcagtggcgcatctcagctcactgcaagctccgcctcctgggttcgcgccattttcctgcatcagactccccagtagctgggactacaggcgcccgccaccacgcccggctaattttttttttgtatttttagtagagacaaggtttcaccgtgttagccaggatggtctcgatctcctgaccttgtgatccgcctgcctcagcctcccaaagtgctgggattacaggcgtgagccaccgagcccggcctaactcatctttttcttaactagcactgtgcctggtatactctggtaggttctcaactgctggggattgtcacttaaaaatgcaaccttagcactttgggcctagttcctcatctataaaaagggataatttttttttgcaagttagagtctgtgttaaggacatgccaaattagatgttggtaatgattgtcagtaattacattggtagcttctaagtaagaacttcagtaaataacaactttttaaatctttttacctctaaatctggcttaataacatgaccagattaaagcataaatgcatgtgctactttttattaagctaaagcggtggttctcaagtgtggttcctggactgcagcatcaacatcacctggaaatttgttgaagtgcatgttctcagacacttccctagacctactgcgtcagaacctctaggaatacgacctggcaatctgtgatcgtggctcactacagcgtcaacctcccaggctcaagcaatcctcccacttcagcctcccaagtcgtggggactataggcatgcgccaccatacccagctaatttttttatattttgtagagatagggtctcattttgttgcctaggctggtcctgaactcctgggcttaagcagtcctgctgtctcagcctcccaaagggttggaattacagatatgagccattgtacccggctagtttttttttttttttttgatgtgaagattgtattcataaatattagttattttgtcatgttatgcttaaaaatctgaattggataaaatgtggctatggttaagttatactttggcataaacatctaatttgataactcgggtgataccaatctgaagtatttttcaatatttattgaatattaaatttaagtatttttgaaatatttttaaagaaaatattcacagtcacttgtagtatttgggaatcacccaaaagcacaataagttaaagttacttgtaactgtcattcagatataactttcttttttttttttaatagagatgggctcatcttgaaatcctggtctcaagtgatcctcttgccttaggctcccaaagtgctgggattacagacatgatccaccactccggggcaatgatctgcttttttttttttttttttttttttttttttttaaacttaactgtatattgaacatacatagatccatctattcttcatttttaaactgcaaagaatctcattggttgattgtacaataattcattcggcctttacccccaccaccatggcactttgttacctacaaacaatgctgtgttttatatgctttggcttccgttctatagatgtagaatcccaaaagtaatactaccagatcaaaggcaatgtgcagttctattttatactaggttactttccacaaggattctagcagtttatgttctcacaaccgtacatgaaaatggctgtttttccccacattagtcagctctggattttgcatgtgtggggctttttttttttttgatagttatttgttttttattttaaaaatttattttgccaacccagtagagaacagctgagcatcttctcatgtatttattggccatttgcatttctgctgcttattggccatgtatttattggccatttgccgtctgctgtgaaatgtcttaaattttttgcccatttttctagtgataaaacactgaagcacatttttaaagacttctgatgatttttattgtcagattatcctacagagtaattaatactagttttcacacggtatcttggatctgatctattttcatgaatcccgccttgccaaattgtgggaatcctaggcgtgtcagttaataatcctagtcttttgtggtttaaagagttttaacagtttaaaatggttttggacccattcgaagttcaggtctccatgagagctagttaaagtttttattagtttgtgtaaaacctaatagatttgtttccctccttcccctgcttctctctgagatggcttttggctgaatgaggaagggaagcttatataatctccttgcagaacataagaggaagacattcgaattcacacaggtccttgtactgtccctttgttcctctgatatctcagatggcactccttgtccacgaggctgctacctgccctgctgtaatattggacccaagtctgcagctggtgaataaatgggctggttgcccaccttgctgcctaggcctgaactaggctctcactggctgtactacttgcacatttgggatttttgacatgtaacattggttataattaaatttatccttatgagaggattgctccacaggaagggatttgattttttttcttagaaaacttttgagtttcaaagtttggaaggggaaaataatgcctttttttttttaattccacagaatggcaacatacttgtttaacattgaattctgtgcaagaaagaaaaaatttaatatattccttgccaacaagtggtggaaaaaccctcgtggctgagattttaatgctgcaagaactgctttgctgtcggaaagatgttttaatgattcttccatatgtggcaattgtccaagaaaaggtgtgtgtgtgtgtatgttttaaaacaaatgttatttgctagtactttgacgttaagatctgtaaatgtgataactttgtattgttgagaagtacctctttttttttttttttgagatggagtcttgctctgtcacccaggttggagtgcagtggcaccatcttggctcactgcaacctccgcctcccaggttcaagcgattctcctgcctcagcctcctgagtagctgggattacaggcccatgccaccatacccagccaatttttgtgtttttagtagaggcggggtttcaccatattggccaggctggtctcaaactcctgatctccagtgatccacccgcctcagcctcccaaagtgctggtattacaggcatgagccactgcgcctggtgagaagtacctcttaatgatggagaattaatatttttagaatgtataaaagcagtatacactacctaaaatatcttcaaatactaattaccagttgttgaaagttttactttttctaaactggtggattaaacatcatcttaaatgttctattactatttaccctgctttttcttttttgagatgtagtctccctctgtcgcccaggctggagtgcagtggcacaatctctgctcactgcaacctccgcctcttgggttcaagtgattctcctgcctcagcttcccaagtagctaggattgcaggtgtgtgccaccatgcctggctaatttttgtatttttagtagagatgggttttcatcatgttggacaggctggtctcgaacttctgacctaaagtgatcctcccacctcggccccccaaagtgctgggattacaggtgtgagccactgtgcccggccttaccttgctttttcaagcagaaactattactaaaatgagttattctgatgcttttttttttttttttgagacagtcttgctctatcacccaggctggagtgcagtggcatgatctcagctcactgcaacccccacctcccagactcaagtaattctcatgccccacgaccccacccagcagccagaatcgcaagcacacgccaccacgcccggctaatttttttatttttggtagagatgatgtctcgccatgttggccaggctgatctcaaacgcctgtcctcaagtgatccacctgcctcagcctcctaaaatgctgagattacaggcatgagccaacacacccctgatgctttttggtatcaaaggcgccagttgaaatttattttcacatgtattttagaagttgcatttattttgcaaagatcgagacattacagcatttcttacgtatgtcttgcctgtgaccttgttcctgttgatgggtattaaacactactttagcttttttgaaccccatgagcacctaatggggggttttttacttgtgttttttggttttgtttatttatttatttttgagtcagggtcttgctctgtcgcccaggctggagtgcagtggcatgaccaaggcttactgcagcctcaattctctggactcaggcagtcctcccacctcagcttcccaagtagctgagactacaggcctgtgccaccacagccagcgaattttttattttttatagagatgaggtctcactgtgttgcccaggctggtctcaccttcctgggctcaagtgatcttcccgcctcagcctcccaaggtactgggattacaggcattggccacaatgcctggccaatttttctttattttaactaatattctagatttcaggtttgtcaagttttggtatagaactcggtttctttgttgaagaatatgctggaagcaaaggaagatttcctccaactaaaagaagggaaaagaaatcactctatattgccactattgaaaaaggacatagcttggtgaactccttgattgaaactggaagaattgacagtctgggtctggttgttgtagacgaggttggttaatacttttgtaatttgtcaatatttttattatactaaatatttattattctggttattgtgtggatctacttagtaccttagtacctctataaaaataaatttatttgaaaatatagacaatataggtgaagacattctatgcttgataatcttaaatttggttttgtgtcaagtgtttcttgaagtgtgaacacgtatgtgtgtagtatacaattttattggctgggcgtggtggctcatgcctgtaatcctagcactttgggaggccgaggcaggtgaatcacttgatgttaggagttcaagaccagcctggccaacaggtgaaaccctgtctctactaaaaatacaaaaattagccgggcgtggtggtgggcgcctgtaatcccagccactcgggaggctgaggcaggagaatcgctgtaacccaggaggtggaggttgcagtgagctaggatcacgccattgcactccagcctgggggtcaagagccaaactccgtttaaaaaaaaaatttttttagtagtacttatgaatcccagatttataaggattttgtaccaaaagctcattaacctaaataccagtgaaataatatacatgtattatagttgttatattcaaaatacttaaaagttataagcaactctttacaaacaaatttcatatgaatatatgcatgttttatatgagcactatatgaagatttacttctctgtcctttttaaaaaaaatctcgaagttgcacatgattggtgaaggaagccgtggagctacactggaaatgaccctagcaaaaatcctctacactagcagtaagtattttttcaaatgaggtcatgaattgatttataatcaagagacttataaaatacttaattctatcactagctacagtatgtaacctaaagcaagatacttaagctttttgcctttgttttaaaatttctaatgaatagaattttgaaggtaaatgaaattggtatttgaagaagtcctctattattatccgccacttactagctatgtgtgcccaggcacatccctcaacctctatgtttctttatctgtaaaacaaggataataatggtaccagcctgatgggattgttgtaaggatagtgtgagttaacacatgtattgcattcagcagtgcttagcacactgcattcagtaagggtttgctgctgctactgtggccatcatcatcatcaccataataatacatataacataaatattataataataatattgtaaagcgatacatttaaataggtcagtttaaggagctattttgcagcatcaggtagtctttaaagtttatgaaaaatttattctaaatgtcataacctactattgatatgctattgcaatatttaccttatatatggaaaaattaactataaaggtcaaatcttaaaaagtatttaaaaaatttcaacagcaataatatttaagcaggttatagcattttataattgttcattcaaaaaaatattgatcacctactgtgtgctaggcactattttaagtgctagggatacagcagtgaataaaatagtccctgctttcatcaagcctgtattttagggcatccctatttgaatattctctgaacagctaagcctaactaaggcttagtctgagccaaactcatttccttcaaagccgttcttcagcctgaattctcagccaccactctccagccagccaagccagggtcctacatattctatcagcaaccaaatcctatctggtttacctcataaatatattgttacttctgtctctcctatccctcattaccactaagtctttagttcagtacctcatcctttctacctggattgccacagaaatcaccaagttcttctgtgtacccactgcccttcatccaccaaatccatctttctttagcgcaagaagaatgatctttcccaaatgcaaatccaattagtttattttactgtttaccattctttaatagctcccctttgctttctgcataaatccctaatttcttagcacagcctttcttgatttgaccccatgcccacctcttcagctttgtagtctatccttatggaatgagaaggatactcccacttattcctctttcagtgagtttcttgaatgatcatttcaagacataggagcaatgaagaaacatttgcaaagaaggcctatttgggttttcattcaatagttaagtctatagaaagcagccattttgtattgcccaggatgtcatatggcttcataagcttcactccacctttatttaaaacaacatcaacaaaaactatagtcccaactactcgggaggttggggcaaggagaactgcttgaacccaggaggtggaggttgcagtgagccgagatcatgccactgcactccagcctgggcaacagagcaagactctgtctcaaaaaaataaataaataaataaaattaaaagttagcttgatagcaagatctcatagaggacttttcatgggccaagagttcgagacgcatttagccctctatcctactacctctacatctgtctatagccatacctgtggaacatatcatagctcttcgtaaaggggatccagatagacagttataagcagatttatactcatttattattgtttagaagccttaatatcctagttcttgccaagtttgaaactctgtaaacttctaagtagtaactttcaggatacctgaaaaatttcattcttcaaatgccagattaatactctggtaatatatttgtagttttctttttttaagaggtcaggtctcactgttgcccaagctgcagtgcagtgacacaatcatggctcactgcagccttgacttcctgggctcaagcgatcctcccacctcagcctcctaagtagctgggactacaggcgtgcactaccatgcccaggtaatttttaatttttttgtagagatgaggtcttactatgttgcccaggctagtgttgaagtcctgccctcaagcgatcttcccacctcagcctccgaaagtgttgagattacagatgtgagccaggcacccagctatttgtatttttcttacttacctctcccacccctttcccaaatcactcaggaagaattcagagcacaaaagacttgctaaaattactttatgatatattaaataacatattttccttaacactttggcttttgtttgtttgtgttttagaaacgactcaaattattggtatgagtgcaacattaaacaatgttgaagacctacaaaagtttcttcaagcagaatattataccagtcaatttagaccagtatgtacctaaggtttgcactgtattgatttgtttcgtattcatctaacttagaaatgaaagtagtaaacataggatttaaagaattctgtagagtagtgaaggggcatattttactcaccatgactatatgctaataagaggttgtgtatagagaatttaagagtttgtgtataggtcagggatcttgggttgggtcactaatgtatctatagcctggcccacaggctgtcaatgaacgttcattgaatgagttttcccaaacccccattttattttttcacttcttattctgtaaactaaatttttttatttggcaaaattttagtgagacatgttttgagttattggcacattaaaaaatatatcttaaaatttaaaatatttttaaatatttatatgttagtagttataatacttttttaataagttaaggcttcacatggatttacatataaactcctcaacagcagcattcccaaaatgcttgaagaaagtaaacaaatgtaatttgtggttatttgaaaatagcttgtaatgtatatatatttttgtgtgcactactagtgtgtatgttttgtgcctcaatagtttttcagtgtctaaataggttttcagaaaatatttttttaattgccaaattttaatttgaaatttgatgttttagctgggtgcagtggctcacacctgcaatgccaacactttaagaggccggggcatgagaattgcttgagtccaggagttcaagaccagcctgggcaacatggcgagacccctgtctctacaaaaaattaaaaaattagggcagccaggcgcggtggctcacacctgtaatcccagcactttgggaggccgaggtgggcagatcacgaggtcaagagatcgagaccatcctggccaacatggtgaaaccccgactctactaaaaaatacaaaaattagcagggcatggtgacgcacgcctgtagtcccagctactctggaggctgaggcaggagaatcgcttgaacccagtggggcgaaggttgcagcaagccgagattgcgccactgcactccagccttgcaagagagagaaaaaaaaaattagagcatattagcactcacatatagtcccagctacttgagagggtgagatgggaggatcacttaagcccagaaggttgaggatacagtaagctgtgtttgtgccgctacaccccagcctggactacagagtgagaccctgtctcaaaaaaaaaaaaaaaaaaaaaaaaattgatgtttttacatttgaaccagataggaacattttcaagagatattttttaacttaattgccacagtagacattgttattgttattataaaatgcaatgagctgtgtttacaaactgtttttgtcgacaaataaagaaaaatagtgtggtggtatttagaattaaaactgatgaataataagacagaaagttttggctggacacggtggctcatgcatgtaatcctagcactttgagaggctgtggcaagaggatcgcttgagcccaggagttcaagaccagcctcagcaacatagaggaaccccatctctataaaaattagcctggcgtggtagcgcatgcctgtcatcccagctactcaggaggctgaggtaggaggatagcatgagccctggaggttgaggctgcagtgggctgtgatcatgctactgcactccaagcctgggtgatagagtgagaccctgtctcaaaaaaaaaaaaaaaaaaaagacaaagttttagatcttgagacataaaacagatgataccttagtaaaagttaagaacaccaagactcacactttttgtgacaaatacagaagtgtgtggtttcttttttggatatgatgtttactgaattcaaacatatttcttcaaggatattgatctctattttgattttaagggaaaaagagaccaaaacagaagaagaagaaatggtaaagcaagaacttttaagttgaagcatgttttatgtatcttagaaaagctaaactcttttatagctgtcctttcttaacctattttacaatatttaaaacactggaaagatgaatttatatgtcgtattaattgcaaatgtccttttaattcaaggttgagttaaaagaatatctgaaaataaatgatacaatatatgaagttgacagcaaagctgagaatggcatgactttttcacgtcttcttaattataaggtaacattgataacatttaaattccaggttaccagactttgtgtctggggcacaacaagagtttccaatggattccgtagaatagtctagatttttcagagaaacagctgatgcttgacatttgttggacaccatgcagactgccagttcaagatagctcgtttccagtttcaacattagatcacaccatattcttttctatgacatcatatctttgtgaagttggggtttttacagttgctgtaagcaagtaccgtgtgaaaatcaatctggaacagaagagaatagctgtgtccagtcttatttcagattttgaaagacagtaccaagttgtgcacacatcccattagtgagctgttgtggttatttaagaatgaaataaaaatattttttcactcaactgatgtgtattatttattctaacagctactaaattgtgaggaagtacgtatttattaagttgtttggacctcactatttaattaacaaaactgtaaagtatttctttgggccctggggctgtgaacaaagaaaatttggaaaactctcctgtaaatgtttattcatacaacaacaacaacaaaagaataatttatggaccatgtagttcagatattggtgtataaaatgttaatgtctactatgtaaattttagtgttttatgacttgtatgaaggatattaaaaaggggaagaagggattatacagtagttttagaattctgtgaagatgtgttattctacagctatgtctttagtaaagttgaagaaatagattttaaataacttcacattttttcttcatgttctttgtgttcctcatgtgactacaaaaattgtcataattcagtagtatgattgaatctgtgtttttgaaaacttaatggttgtaaagggcatgtcttatttacacagtccgttaactattattaggatcaatctgtgtttctctctgtggacttttttgttctgctgtggtggagatgggcatgtagtgaggctattaataacattaactattttcacttctttaattttctttaattcacttgtttaattctaggtttttttttagactaactagacctaagaaaatcataataacctaaaagaaaagtgagattgaacattttgatgtttaatatagatttcatcttttcttttaaatgatcagatttattaaattagaagtttagaattatagatggtttatttacctttcaaatcacactggtaaaaaattgacagggtttcatgtttactaaccactttgttcctacatcttgttgttttgcagtattctgataccctaaaaaagatggatcctgatcacttggtagcattggtgacagaagttattcccaattattcctgcttagttttttgtcctagtaagaagaactgtgaaaatgtagcagaaatgatatgcaaatttttaagcaagtatgttaatattttttaaatagcctgttttatttttattaggaattacagactatgtattaattttattgggcaaacactaattatgccttgcaaaacatcatattaagttgttttagtatactgaaggccttgaccttgaagaaagaaattttaactgtgaaaaatcacatgtgaaatagccagagaaacattctaaggtggctgggcaccatggctcatgcctgtaatcccagcactttgggaggccgaggtgggtggatcacttgaggtcaggagtttgagacgagcctggccaacacggtgaaaccccatctctactaaaaatacaaaaaattagctgggtgtggtgccttgcacctataatcccagctactggggaggctgagacatgagaatctgttggacccgggaggcggaggttgcagttagctgagatcgcactactgcactccagcctgcgtgacacagcgagactccatcaaaaaaaaaaaagaagaccaggcacggtggctcatgcctgtaatcccagcactttgggaagccaaggtgtgcggatcatgaggtcaggagttcaagaccagcctggccaacatagtgaaatcctgtctctactgaaaataccaaattagctgggtgtggtggcgtgcacctgtagtcctagctactcgggaggctaaggcgggagaatcacttgaacctgggaggcagaggttgcagtgagctgagaccacaccattgcactccagcctgggtgacagagggagactcagtctcaaaaagaaaaggaaaaaaaaaagacaaaaccctaagactatatgtatgagaatgttaagtaatattaggtcagtgattcaaaaccttgggtgcatagtgaatcatcttggaggcttttaaaaattccaaagtccaggctacatcttagacaaatcagaatctctgggagtgacacccagatatcattttgtaaagctccccaggcaagtccaacatatagccaaggacaggaacaactggcttagtcagtcaaaggactaatcactgttaccactgtggaaatgaattgtatcttccattgcctttttttctcttttccttttttttttttttttttcctgagacagggtctcactctgtcacctatgctggaatgcagtagcacaaattcagctagctcactgcagcctctgtctcctgggctcaagtgatcctcctacctcagcctcccaagtagctgggactacaggcacacaccaccactcccaactaattttttgtaattttcatggagatagtatttcaccatgttgcccaggctggtttcgaactcctgagctcaagcaatccgccccccatagcctcccaaagtgctggaattacaggcgtgagccactgcgcctggcctgcctttgttttcttagtaaacttcacacttagttgtatggacatttggatataatttcctgagtaagaaatgtgttgtcttataattttgtagtatcttaatattggctctgtcgtattcatagagataagtatgaagttactttaactactaacagttcagttttttatacacctgtttgtcccatgtgtggttttatcattttctgagatttctttcagccccttagctaatgctgtatcactattcatagtctattaacctgaatgctaatctagtcaacctctacctcctctttcaatcctactatcatggattggtctaagatagacttaaatttattgaatagcaaaatataaaaatgtttggaataagatgaaggagttgctcattttggtaacagtctgcttttacaatgattttgattataaaagcttaaggaaattaaattatcattaaaaaaattctcagtaaatcattcattttcttagagtaattcaaggtaataagatggagacactggctaagtgatggaaacattgtaggatgtgaagtttctaaagtgcaagtgtttaggcagtgttttaccatggaagtatgatttaataatatgtatgtttccatcttcagaaaagaaaatttatgtctttaaaaaaactatcccctataaagatatatgttataaagaaaaaaacagttataacatccagagcaaaggtctaaacctggtgtccatggattcaaaggaagtacaggaatgaattttaggaaatccacgaaccctctgaaattatatgtaaagtgttgtatttatgtaaatagttatatttttccttttttttttttttttttttagacaaggctttgctctttcacccaggctggtaggttcatagctcattgcaacctcaaactcccgggttcaagcaatcatcccacctcatcctcccccatagcctggaactgcaggtgcatgcaccaccatgcccggctaatttttgttattttttgtagaggtggtcttgcttcactgcccaagctgatcttgaactcttgggctcaagcaatccttctgcctctacctcccaaagtgctgagattacaggcatgagccatcgcatttcgcctttccttagttttgataagattttcacagggttctgtaatccacaaaaagattgagagactgcctaatagttaatgaagtcagaatcaaaattctaagaacatttaatgtacttaactcaatggaaatagtacattaaagaatgtttacattagcatctactaaaatgaaaatggtagaaattttgtcactaaaagatcaagggctcatatttctaacagatctttttcatagggaatatctgaaacataaggagaaagaaaaatgtgaggtgattaagaacttgaagaatattggcaatggcaacctgtgtcctgttttaaagcgcactatcccatttggagttgcctatcaccacagtggcttaacaagtgatgaaaggaaactcttggaggaggcctactccacaggagtgctctgtctttttacctgcacatctaccctagcggcaggtgtcaacctaccagctcgaaggtaagagataagtaagtgttgaccaggctcagaacttttccatttctagcttgcgaggagttttgttgttttatgctttctcagtagtggatgagaatttatcaaatgttcttttagcatatgctgagttgattggttggtttattttctttaatattttaatgaatatgtaatgaaatatgtaatgaaaaataacgttaatagatttcttgatattagaattccatcctttctgctctttatatctggttttgatgttagggtctattaatctggttttgtagaaatagttggcaagtgttttaccttttttatgatatgaaagagtttatttaacatagagatttccttgaaatcttggagagctgatccataggcaatttgtgtctaatatatgtattttaaagcaggcccttgattacctttccagttattaccaaaggtgtaggcctgtgtaattgacttctcccctttataatttatgatcatggggtattttgctaataaatgatcaatttttataaactttccatgagtgtttaaaaaaatatgtattttcagttgaatatgcagttttgtacatctcagcgagatcacagaggttcattgtgttatcggcttctctattttcttactatatttgattccttggtctatcaatttcagagaagtgtgttagtctcccactttaattatgtagttatcagtttctcctttttgcatctctagaagttattactttttatatttcaaaactatttagatatacaaaggtttacttcaaatatcttattgccgaattataccttttatcaatacaataaatacttgtttttctcatttaataattttgctttgaataccaggactcattttttttttttgccacgtatgtacctttttccattcttttattttcaatttctgtctctcattaagttttccatttttcagacaattgaagaaaaaaatgaaagttatatatcctgtttctattattccagtggttactcttaaaattttaagttgtaaccaaacattttttattactttagaattaatcaataactgtcctctcctgaacataaaaagaggcttagcatgtccttagtatattctactctgccccatgaatgttgcaattacttagaattttagtgccagatttaaacattttctttcatcttatgtagtatttaaacttacctgtaaatcatacttcttttttgcttaccactgcctcttatatcccacatctttcttctctgatttttttttttttaattttgccttccttgagtaatcctttttagaataccgctttagggggtaaaacattttgactctttgcatagttgaagatatctgtattttggcctcacacttttacacttcactagcaaaagaattctagattcaatttttttcctttagggattttgtaaatattgttccatattttctagaggccaatgttgctcatttttgtctctgcatggattttctgtttttcttttccagaaacttttagacttttctctttaacctcccaattttgtcatggtgtataataatagttgtaattactacattcccctccctttcatgtagtaacaactttacatgcattgacttgatacagcttcacaataactctgtgaggaaggtcatattttattacacacctattatagaaggggaaactgaggcactaaataattaaataattttcccaactttaaaaagttacataactttttcccaactcattttccaacaaatgagttttaaagccagtgtttgaacccaggaagtttgattttacaatcccaacagtactacttttcattcatagggcttagcacttgggtggatgcttttaatctaagctttatgcctttcttctttgagtaattttttttctgttatttctttttcttcccattatctctgttccttgcttttataatttcacttaggcagggttgaggcctcttagattcagctttcgtatctcttttcttacacatttttcagaatgtggaagaatgtaagcacacgtttgtgccatgtaatttttttcaactttaccttccatatcaaaaaatcagtttttttgtaatcccagcactttgggaggcaaaggtaggaggattgcttgagcccaggagtttgagaccagtctggacaacatagcaagacctcatctctactaaaaaattaaaaacttagctgggcatggtggcatacacttgtgatcccagctgctcgagaggctgaggtgggaagattgcttgagcccaggacatcgaggctgcagttagctatgattgtaccactgcactccagcctgggcaacagtgagaccctgtctcaaaaaaaaaaatgagtttttaactgatatccattaactacattaactgtatccattaactattttcattcattattcagttcttcaattgaattttcttttttgtgagacagagtcttactctgttgcccagtggccaggctggagtgcagtggtgcggtctcggctcactgcaacctctgtctcctgggttcaagcgattctcctgcctcagcctcccaagtagctgggattacaggcgcccaccaccacacctggctaatttttatatttttagtagagtcggggtttcgccatgttggccaggctggtctcaaactcctgacctcaggtgatctgcccaccgtggcctcccgaagtgctagattgacaggtgtgagccaccacacctggcccttcaaattttttatgaatttttaaataaagttaatttttttttatttctaagaactctcttttgttgttctttccttataatagtctactccttttttttttttttttgagacagagtctcgctttgtctccaggttggagtgcagtggcatgatatctgctcactgcaacctctgcctcccgggttcaagtgattctcctgcctcagcctcccaagtagctgggattacaggcacacaacacaatgttttttagtttttgtgtttttagtagagacggggtttcaccatgttggccagggtggtcttaatctattgacctcgtgatcctcctgccttcgccttccaaagtgctgggatttacaggcatgagctaccacacacggccaatagtctactccttttttttttttttttttttttgagacggagtctcgctctgtcacccaggctggagtgcagtggcgcaatctccgctcactgcaagctccgcctcctgggttcacaccagtctcctgcctcagcctcctgagtagctgggactacaggcgcctgccaccacgaccagctaatttttttatttttagtagagacggggtttcactgtgttagccaggatggtctccatctcctgacctcgtgatccgcccccctcagcctctcaaagtgctgggattacaggcgtgagccaccacgccccgccaatagtctactcttatattgtggatataatactctttggaattttctgttaatgctaattaggatttttaaaagttctcttctgatccctatattatctggttttgtggtcacttattctgtatattcatgttatgtttcttttatgttattagttttcttcaagtatttggtaatcttttctgcatatgagatttataaataaagaggaagttgactagtataggtaaacaataggttttttcttccctttggataagaaagctgactaactgactatagacttctgtatatatgaacataattgaaattgctttttttttttaagagatggggtttcactctgttgcccaggctggagtgcagtgatgtaatcacgatttactgcagcctcaacctcctaggctcaagtgatcctcccaccttagcctcccaagtatctgggactacaggggcacactaccatgcccagccagttttttgttgttgttgttgttgtttttgtagagactgcatctcactatattgcccaagctggtctcaaactcctggactcaagcaaacctcccacatcagccctccaaagtgctgggattacaggcatgagccactgagcctggctgaaatcaccatttttgtaggtcaaaaacagttgacatctgcaattttatacagttcaaaataataaaaattcataaatagatatgtatatgttagtggtgtatggtcatattttttatttatggagtataaagtccaaacgctttggagactactgctacagattgatcataggcattgcagctgggcagacttgagttcaaatgatagctctggtaattactaattttttagtttaggataagtcagttaactgagttgtaattaattcctttataaaaatgaaataaaaaagtatattataactaagagttttgtaagaattatagataatatgtgtaaaaacctaagaaatcatagattcttggtaaacactagttacctattattttgtgttagtatgtcattaaatttaatatcacaaatatataatgaaattaagaattttttaaattggtgctgtttgctgtagagtatcatttttcattaattccacagagttattttaagagctccctatgttgctaaggaatttttaaagaggaatcaatataaacagatgattggcagagctggtcgtgctggaatagatactattggggagagtatcctcatattgcaagaaaaagacaaacaacaggtaatactcaatttggttggttggttgtttttgtctttttcttggttgttggtctagcccttttatgaaatcatcttttaaaaattaattattaattttctttaaatgatgctttctttcctatatgattaagaattagagtggtttgaaaatgtatgtatttcagacaatgaaaaaatatttttcctatttgtttttcttccatttttaatgaagataaatgttaaattcttttgtctttacttttttggtctccttctggctccacaagatttatgtaaagtataaaatatttatattaaataccatttatttttaataataacacaaggcatggttttgctttaacctttataggtattggagttaataactaaaccattggaaaactgttacagccatcttgttcaggaattcaccaagggaatccaaacattatttctctctttgattggtttgaaggtatttttcttaaattttttatcttattactgttatctgagacaatagaggttaaaaagttatgcaataactttatatatgcaactgtgtagattttatactaattttttatttaataattttttcttttaatttttttctttttaattttgttttctcatccccttcagtgattaatgtaaataatttttaaaagatcatggaatggttaggtgcagtagctcacacctgtgatcccacctcttagggaggctgagacaggaggatcgtttgagcccaggagttcaagaccagcctgggcaacatagcaagaccccatctcaaaaaaaaaaagatcactgaatcctaatgcttggcaagtggttggcacttaataaatacttgaattaatgaaattggcttttttttttcttagagatggggtcttgctatgttggttagattggtcttgaactcttgtcctcaacagtcctcccaccttagcctcccaaagtgctaggattataggcatgagccactgcgcctggcctgttttgtttgtttgtttgtttgttttttctttaatctgggacatggtgatgaaattaactttggaactgagcgtgggtgaacttccaagttggggcatcagtggagaatctggatttgagaagccagaagcagaggctggcccagtgggtttcaattactatgtcaaaaactttttcagggaggaatagaaagataacatgatggtagatagagggatcaagtaaaggttcccctgcccccctgcactcttccacccccagtgttaactctaatcatttaggtaggaaacagtacaaaaacaaagtacattaataatccaaaaaccaagtatcagttcttaaatatcttaaaagtataattttagcttaattgaatactatattaataatgatttttattaaagtgggaagaagcaatagaaaatgtctgtgctccattatatttttcttaccccttatattggtttaatatgaaattacgacttaaattttccagttgaaatagcatcagaattgtaagagagagaaatatacttattgattgactatattttagtataacatgctgatttcattgaaattggctaataaaaattattctaattcagagtcagctctacatctgaatactaaatggagggttaagtattccttatgattgccattgtaagttataaatagtgaataacagtgaaagaacaagaaatggagataggaatgagagagacaaaaataggtagagatcaactatttttaggtaacattttaggcaaaatattgtctgacgctgttttagtggaaacttgtattttttttttcagttctttttttaatttattttgttttttgttttttttttattatactttaagttctagggtacatgtgcacaatgtgcaggtttgttacatatgtatacatgtgccatgttggtgtgctgcacccagaaactgttgtattttcctttttttttttttaatgcaacttttagagctaaaggatgtttttacagttgggtggaatgcagtgcagggaagatccctaaaggaggctgagtgagaattagtgaaaattggttggggagtaaatagcacagttctggagatattgtgaaaaattatttaaagatctatccaaaggagttttggaatgaaaaatgagtacatgttttcataaaaagcatgaatataataactatcatccccctaaattttttgttaatttttaattgccattataaatttatatatgcaactgtgtagatttaatactaattttttatttaaatagctttgaggtatggaaatgagttatcttgattaatatgcattcaaggtgatgccttgaattaaggaaaatgctccaatgatatcctgaattgtttcagattgcaacgaatcttgatgacatctatcatttcatgaatggtacattttttggtgttcagcaaaaggttttattgaaagaaaaaagtctctgggaaataactgttgaatcacttagatacctgacagaaaaaggactcctacaaaaagacactatttataagtctgaagaagaggtccaatataattttcatattacaaagttgggacgtgcttcatttaagggtaagagtttacctaaatcttattgatcataggaaacacattggaaaaaatgaaaattaaattatactttctttaagctgggcacagtggctcacgcctgtaatcccaacactctgggaggccaaggggagcggatcacttgaggttgggagtttgagaccagcctggccaatatagtaaaaccctgtctctactaaaatacaaaaaaaattagccaggcatggtgatacatgcctgtagtcccagctactcgggaggctgaggcacaggaattgtttgaacctgggaggcagaggttgcagtgagtcgagatcacaccactgcactccaggctgggcaacagagccgagactccatctcaaaaataaaaaaataaaaaattatactttctttaagttgtatttataattttatattaattacattaatcttattttataagctgataactccttcaactttcaaaagttgaaaaatgttttgaattataagtactgcagaagtatatagagaataaggtaggcatccctccttcatgcttccctcctagcaaccatacaaatcttaatattctaccaagaataacaatttggtgtatatctttccagacctttactgtacatttcatttcagtgcataatatgtacatatgtacagttttaagtttttgtctttaaacaaataatcatttatattattctgaaactttttataaattaaaaaaattttttttctttttttaaatatggaggcaaaatctcgctatgtttgccagggtggtctcaaacttctcacctaaagtaatcctcctgcctcccaaagtgctgagattacaggcatgagacaacacatttggcctgcaacttgctttttttcctgaatataatgtcttagagattgtttcatgacagtgaataaagtgttgtgggggttgttttggttggtttgtttgtttgcttgtttttgacagggtcttgctctgctgccgaggccaaaatgcagtggcgcaatctcagctcgctgcaaccttcgtctcctgggctcaaatgattctcccacctcagccccgcaagtagctgggactacaggggcatgtcaccatgcctgactaatttttgtatttttagtggagatggggtttcacgatggtgcccaggctgaggcttttttttaatgaaaaataatacatgtctgttgttaaaaaaaaaaaacctaagaactcagaattatgttaaggaaagtgccatattcctgtcccatttcaggagctactactaccagtttgatatgtattcttccaaatatttttatgtgtgtatttatttttcaaatggaatgatcatttaaatatttttttccaaattacatttctcataagatatcatgaacatcttaacagatgagtctctttaaatctatctcatttttcttttaatactacagtcatctatagtatggatgtaccataatttatttaaccattcgatgttgatggacacttgcattcttttttatttttctctgttataaacaaggcgcatggacatctctatgtattttggggtacatatggaaatgtttctctggattagattccccaaaatagttggttcagaaggtatgtacttataaagtgttgatgagtactatcaaaatgacctccaaaatagttatatagtaagatgttataagagattttgaagactttttgctatatttaagcaatttctacacaatatttaaagccatctctttgcccctctggtaattgtgaaagattgaatatttgtatctttcttttaggaactatagatttagcttattgtgacattctgtacagagacttgaagaaaggtcttgaaggacttgtgcttgaaagccttcttcatctaatctacctaacaaccccctatgatctggtttcacagtgtaaccctgattggatgatatacttcaggcaggtgagaatataacgtttttcaacttaggctacttcgtttatgaattattacatgctgttttgttttgttttttagagatgaggctttgccatgttgcccaggctggtctcaaactcctaggctcaagcagtcttcccacattgtcctcccaaagtgctaggattacaagtgtaagccactgtacccggcctattatatgctttttatgaagtgattattcactttttttctctattaaaatatatttggaattggatatttttttctttcagtttttaaaaattataatctggcaacagcatttatggttcgtttaactttaatgttacttttctcttaaatataaacatatttgttattgaaaaaagtaaaggttaaaaaaaagaaaaaaagattatccgtggtcctatttccccacagaaagttactgttatgatcactgcatttgataatgcctagaatgcaaagaaaacagtgaaaaccatctctgatgatttagagtttaattacatgaaagctcggtcagagccaagtatgataatacattaaacccaatgacgttaataactgaaaaggaatatttattttacaacccatcacaaagtagaactgtccatacttattataaagccaagtggtaacatacagtatattatgattttactgtgaacaggctagctgtataaatgtatattagggctgcatgtggtggctcatgcctgtaatcccagcactttgggaggccaaggtgggaggatcacttgaggtctggagtttgagaccagcctgggcaacacggtgaaaccccgtctcttctaaaagaatacagaaattagttggtcatggtggcgcacaccagtagtcccagctactcaggaggctgaggcagtagaatcgcttgaacccaggaggcggaggttgcagtaagctgagatcatgccactgcactccagcctgggtgacagaatgagactgtctcaaaaaaaaaaacaaaaacagaaacaaaaacgtatattagacagaggtagtatacatcttttaatcacaggaaattagctttctttttaatgtcatatttttaaatcattactgtttttttttcttttctccatctcttctcaacttcctgagtttacattactcaggaagtaagttttttttaagtagcactatataatgcaattactctcaaacctttccttctccttcccctcagccatctggtattaaatatagtcatatagtccatggaaaccagtacttgtggctatgcctttaagtaattctaaagtgtgttatatccttgttatatcctaatgatgtaactttaaaacctgcaacatttacaaatatatttatcttgttttttgtatcctgaatcatgagaatgtgatatcaaaagaaatactggatttggttcacatgacagattttttgatgtttccatctatttgctctttttccatgtagtttagccaactcagtccagcagaacaaaatgtagctgccattcttggagtctctgaaagctttattgggaagaaagcatcaggccaagccatcggaaaggtaccacattctttttttcttcctaaataataagttcactcaacacttagttcactcactaagttcactcaacaaaattagtaccattatattgatcttttttggtttacattttttcctttaaattagtataacgttcattttactacttaaaacatacctgagcacccaaaatgtatgaatatttttaaacaacatttatttctgggtagtgtgatgacctttttttgggtagcatgaaatgttttcataatattacacaatcctgatataagttcaattcaaacgaggaaatacattttctagaaactatattaggctttctatttggtatcaaggattctaagataggacaggtctgggttttttgttactgcttttgtcatcctcaaagaactcctagtctagtacttatattacataaagcattttagaaggttaaaggggataagctaatactcgttggtgtgatatattttggtgttttaaaattcagtctgcaggcatgaagcaagttatcaaatgcatacactaactttaagagaaattgaagtaattctttcataaccataccttcgatttccttaagagaatgttattttcccccttgtaatacacttttttttttcattttaaattttatttggcaatccaatttacattgaaacctagttaccttccattttcccccacaccttttttttttttttttttgaggtgcagtctcactctgtcgcccaggctggaatgcagtggcatgatcttgggtcactgacacctccaccttccaggttcaagcaattctcctgcctcagcctcctgagtcactgggattacaggcgcctgccaccacgcctagctaatttttgtatttttaggagagacagggtttcaccatgttggccaggctggtctcaaactcctgacctcaggtgatccacccgcctcgttctcccaaagcattgggattacaggtggctctcaggttgggagccaccacacccaacctcctctataccttttaaatttacatagacagtacagatttcattttgtaaaatggaagatgatgtttacatacacttaaattgatggtgcagtgtcccatgcatcactgtgtcataaaatcaaaaatattgggcccggcacagtggctcatgcctgtaatcccagcactttgggaggccgaggtgggcgaccatgaggtcaggagttcaagaccagcctgaccaacatggtgaaaccctatctccactaaaaatacaaaaattagctatgtgtggtggtgggcacctgtaatcccagctactcaggaggctgaggcaggagactcacgtgatctgggaggcagaggttgcagtaagctgagatcacaccactgcactccagcttgggtgacagagcaagactctgtctcaaaaaaaaattccatgagcccagcacagtggcacacacctgtactcctagcttctcaggaagctgaggcaaaggatttgcttgtactcaggagtttcaggatagcatgggcaacatagtgagaccctgtctcaaaaataaaaataaaagtatctgtagtacttaagcattcatgttatcacaatttttagattgggtcttttactttggaaatggctatgctgtttagaccttcaaaatgctgaataaaaatatttcttaaaacaaaccttttatatcaaactctgaaatgtaaaataaaaacaatatcattaatttggaactaattatcaaataataataaacatgcaaaaatcttattagaataatatatctttttaagcttgaatccagaatttatttttgttacatttaatgtaatatagtcaacaaatatttgccaaattgatacatatttaaaatagtatggacatgaacttatcttaattacaaatggattaattactagtttaatgttttggaggtataattttttaaaactctggagaacatatttaaatacttaaaatctaattgatttctccacattgaaaaagaggccccccacctgaccttttttgaacattcttgatttcttgcaaaagattttttttttttttgatacagagtctcgctcttgtcgcccaggctccaggctgcagtgcaatggcacgatctcagctcactgcaacctccgcctcccaagttcaagtgattttcctgccttagcctcccaagtagctgggattgcaggtgcccgccatcatatacagctaatttttgtatttttagtagagatggagtttcaccatgttggccaggctgatcttaaactcctgacctcaggtgatacgcctacctcaacctccaaaagtgctgggattacaagcgtgagccaccgtgccctgccacaaaagatcttgacattggcataaagcattgtattttgccatataataattatatcatttttcttggcttaggaaatacattctaagaaaaaacctacattgactcaatttatagttagtactgaagatgcactaaaattgggaaattaaatagctctcttttcctacttgatgttcagctgtcatactttttcagcttaatgcttttaaaaaagtgatccagtatcaacatgcagaatatgtaactcatacatccttcaatttgtcaccgtaagttctcatttcattcttttactatggtggaggatataattttatattttattttattttttattattttacagttttttttaaaatagagacaggttttcaccatgttgcccaagctggtcttgaactcctgaacttaagagatcctcctgcctcagccttccaaagtgctgggattacaggtgtgagctaccactcccaacctctattttattttttatacctactttttcttttttaagttcatctttttgccctcaattttaagaattgattagtttctaagctagctatgaaatcctttatgcacaaatgtggtcatcaggcaccacaggccaaagcaggtatacagaatcgaaatcatcaactacaggaagcatttttcaatctctttcaggtgttttagcttggaccatgtggaaatcataggatctaatatttactcttagtttataatatagacaagcttattaacatatttatctaaagtacatttgtctaatttataataataatcacatacgtacacaatttacaaataccaactaactgtaaaagtctctctcaccaattccttcctttcctgtattcattttctacaaccgccataacaaattaccacaaatgggtggcttaaaacaacagaaatttattctcccacagttcaggagaccaaaagtccaaaatcaaggtattagcaatgttgattccttcaggagcctctgaggaaaaagccatccgtgcctctttcctagcttctgatggttactggcagtccttggtgttccttggcttatagatgcatccctccaatctcagcctccatcttcacattgctgccttctctgtgtctctctgtgtcttctcctcttataaggacactaatcattgaatttagagcctactgtaaatccagggtgatttcacctagagatccttaactgattgtatctgcaaatatcttgtttccaagtaagatcacattcacaggtaccaggggttaggatttgtacatttctttttgtggagtgatggagagggggtacaattccttccctgtagaaggaagtttaatttagattggaaataatttggtttatcttttaacttttatttatttttatttttatttttttgagacagggtctcactctgtctcccaggctgagtgcagtggtgctatctcggctccctgcaacctctgtctcctgggctcaagtgatccctcagcctcccaagtagccaggactacaggtgcgcgccaccacacccggccacgttttttgtttgtttttttgtggagacggagttttgccacgttgtccaggctgatctcaaactcctgggctcttgtgatccatctgccacagcctcccaaagtgctgggattacaggcatgagccactctgcctggccttatctttttattgtagttggaaaaatgataataaattttaattaatctgaagtacatctgttagaaattagttttgtttctatggaattattctatccttgctattctgtaatacaacttcagttttccttttgtccaattttaataacatacatttttagcaggtctagtaaacgaatttatttgattgtgtctttctagaaggtggacaagaacgttgtcaacaggctatatctgtcttttgttctttataccttgctcaaagagaccaacatttggactgtatctgaaaaatttaatatgcctcgaggatatatacaaaatcttctcactggaactgcctcattctcatcttgtgtgttacatttctgtgaggtaatttcattgaatatatgatatgtactttgtgcatcttctggttttaactgttactaaactaataagccagttagtcagtatgtcagcattttctccttgttgacatattctgttattacagagcactaaaaaactatttaaaatgtacgtttgtttttatctgtttatgaaactactattatgtacttatggtaacaatacaaaaattcctgagtcaactaaaacacataatgaaaagtgtctttttgacccaactcttaaagccaccattaatagtttcaggtattcagaattaactgttaaaaacaacctattgatgtagattccatgtgaatgtctttcacctgagtaataaaaatgtcaggtgtttggttagaaagttacctatatccaacagctaccatgtgactatttagtaccatattctctttttaaaaaaatttaattttgactggatgccatggctcccgcctgtaatcctagcactttgggaggctgaggcaggtggatcacttgagcccaggagttcgagatcagctgcttgagcaatgtgggaaaactccatctctacaaaaaataagaaaaattagccaggcgtggtggcacacgcctgtggtcccagctacttgggtctcactctgacgcccaggctggagtgtagtggtgtaatccaggctcactgcagctttgacctccagagctcaggcagtccttctgcctcagcctcctgagtagctgggatcacagacatgtgccaccacacctggctaattttttttgtttttttgagatggagtctcaggctggagtacagtggcgcaatcttagctaactgcaacccccgcctcccgagttcatgcaattctcctgcctcaacctctagagtagctgggattatagtcacacaacaccactcccagttaacttatgtatttttagtagagatagggtttcaccatattggccaggctgatctcgaactccggacctcaagtgatccacctgcctgggcttcgcaaagtgttgggattacaggcatgagccacagcgcccaaccaattttttaaattttttttgtgcaaagggtgggcgggggtggggggtctcactatgatgcccagcctggtcttgaacttcaggctgaagcgatcctccaggttgcccttccaaagtgctgggattacaggcatgagccgccacgcctggcccatattctcttgattgccactgtaatttagtatatttgcttccagtgtcaggcagctatttaaagcttttacatcaaatgtgtattttatagaacaatttaagaaggaaaccttatactggtcatatgcatttgtgatggatttaagactttattaaaataagctttcagaattcctttaaatagcacaataaagcttaccaggcttttacatccagatactttttttatgtgtttataatataagccatttttgctgcatttagatttcttcttattgggtggcataataatcctttccatatttgtttccaagtcaattttctaaaacttttttcccatgaattgttttctaaatttaaaatttacttcattttccctttcttaaaccttcatattctgtatatgtatatggcaattaattctatcatatgtgctaatgaaaggagtaaataattcaaaaatacttggctttcaattgaatgataattattttaacaaatttagctttctaaatatcttttacttgtgctgatttttaaatgttggtttataccccctgagcacatgctagttaaacagaagacaaaaattatgggtaataagaagaagctagcctttaaaatgtattttcttaagtcttctatatttgttgttttgtatatttaaagatgctttccctaatattttttccctttgttttcattgcgactatgaggacttgagccttatagaattgtttaagtaaaaaactctatgaagcatcaagaaaaacagcaataatttgatgactaatcctaagaaaaatctagctgacaatttgtactctaattaatttacttcatttatatatatcataattatataattacatataatataaatatataattatatgatatatattacatgtatataatttttcaaattattatcaatagaggcagggatcttgctgtgttgcccaggctggcctcaaactcctggactcaagcagtcctcccaccttggcctcccagagtgctgggattacaggcatgagccaccacacctggtctactttcaatatttcaaggcaggggtgttcaatcttttggcttccctgggccacattggaagaagaatcgtcttgagccacacataaaatacactaacaatagcttatgagctagaaaaaaaaaaaaaaaaaaatctcatggtgttgtaagaaagtttaccaatttgttttgggtgacattcaaagccatcctgggccgcatgtggcctgtgggccacaggttggacaagcttgttttaaggtattttttattttaaaaagttataaatggtatgaaatggtacattaattgtgttagttaagatgcttttaactacaagttacagaaaaacccatcaaggtttaaacaataagaaaaaataattattttatataacaggcatgccagaactaaggcagcttcaggattgattgattcaatagttctgttcaaggttttcttctttttactctgccatcttcattacgttgatttctttcttagtagtcacaagatggctagctaatgctgttccattcatcatgtacattcacagtgatatccaaaggctagaaagggaactttaaaataaaataaactactataatagaatattgcaaatatctatgacaaaatattatattgaattcccatttacccttctagctttaacagttattgactcatggcttccagtatttttattattgtattgttgcattgaacatcatgttacatttgaatatttccatatttaatattcatcttccagataaattccagatgtaggaattgtttttagtcacttgggaaagaaaaactatgcattttcttccaggtattttgattaaaatgaccagaactctttttattgacttatttttcaattttcaatcttttcctcatcctaaaaccagttcctcaaattcctcagggtcctccccatgtttcttcacatctgttttgcttagaatcatctttcatctctggcttaactcaagttccagaacttatgtaaggaacattctctctgagccccctatcacacaaaccaaactttgaaataacttacaaaatttaaattttatatatttctttgtgttctacaggagcttgaggagttttgggtttacagagcccttttggtagaacttaccaagaagctgacttactgtgtaaaggcagaattaatccctctcatggaagttactggagttttagaggtcagtagcttgttggtttcccaattgaaattatgttgaattaatacagaagccaggttttattattttctgaagtcttaatacagaggaagtgatagcaagagccttaattgctcatttgtcatgggaatcttttatttaaaacaaatagctgttatggccttccagaaatccgctgttactagatggcatacctgatgaaaaatctcagttgtgaaaaaaaaaacataacaggaagggtgggagtgactgtctccaagtatgttgtgctaccggttgtccttaacacttcttccttcctccactcctttgaagaattaccttctgtcagtttggactcagtgcttgtttaagataatggtgattcagtggcagaaagggtcatttgtattttttctaagagagtaagaagaaagggttcgcaactggttttccagctttctattttcagccaaccctcaacttcagtttattctctgttattcagttcttgagtcagaggagttctgcttaggacacacgcacacacacagagagagacaccagtggtcccctgagtagatggtgagaacactgaaagatattggacttggcctgatgatgtggctcatgctgcaatcacagcactttgggaggccaaggtgggtggatcaattgaggtcaggagttcaaaaccaacctggcccacatggtgaaaccccatctttactaaaaatacaaaaattagccaagtatggtgtcgtgcgcctgtaatcccagctacttgggaggctgaggcaagaaaattttgtgaacgtgagtggtgcaggttgccataagccaagatcgcaccattgcactccagcctgggcaacagagcaagactctttctcaaaaaaaaaaaaaagaaaagaaaagaaaaagaagaaagaaagaaagatactggactagaacattttacttgaggatatgagatgatgccaccaacctaagtgggtttcttttcttgattgcagcacacatcagttgactcaagctgcatagaactatagttaccttgtagtcagtttggaaccacccaaatgcatttttaaaaattcctcagtattctcatgtcttgtctcttcatatttactttattttatcccagtctcttacatgcagtttttgttcttttcagtaaagtgcttaattttcttttttctaatcccaaactattatcctactgatttttgtaacacttttcagggtcgagcaaaacagttatacagtgcaggttacaaaagtctaatgcacttagctaatgcaaatcctgaagtgctcgtaaggacaattgatcatttatcaagacgccaagccaagcaaattgtttcatcagcaaaggtaagcaaacaaaccattttttaaccttaataatcttgcgtagtgttatttccttgtattatagacatcagaacaaaaacatttcacattgcataactgtttatttctatagatacaaaagtacatactcttatttgtgagtaaaaataatgcatctgttgtgacacaagccttgcaaaacaaaaaaaggacctgctaaaaaataaagaaaatttcagtggtggctcatgcctgtaatcccagctctttggaaggtcaagatggggaggatggcttgaaatcaggagtttgagaccagcctgggcaacataatgagactctgtttctgcaaaaaaatttaaaaactaactgggtgtggtggtttgtgctgtagttctagctactccggagactgaggcaagaggatcgcttgagcccaggagttcaaggctgcactgagctaggatgacagattgagaccctgtccccccgccccaaaaaaaatgccaggcatggtgcctcatgcctgtaatcccagcactttgggaggccgaggcaggtggattacctgaggtcaggagttcgagaccagcctggccaacatggtgaaaccccatctccactaaaaatacaaaaatttagccagacttggtggcacacgcctataatcccagctactcgggaggctgaggcaggagaattgcttgagcccaggagacggagatggcagtgagccgagatcataccactgcactccagcctggctgacagagcgagattctgtctcaaaaaaaaaaaaaaaaatggctgggttcggtggctcacacctataatcccagcactttgggaggccaaggcaggtggatcacttgaagccaggaatttgagaccagcctggccaacatggtaaaaccctgtctctactaaaagtataaaaattagccaggcgtggtggcccacacctgtaggcccacacctgtaatcccagctactcaggaagctgaggcatgagaatcacttgaacccaggaggtggaggttgtagtgagccaagattatgccactgcactccaacctgggtgacagagtgagagtctgtcttaaaaaaaaaaaaaagacaatttcaagggttcattgaagtataaagaaccctggaagtcactgagctctgtctcccaaagttctcttcacaggaatcctttcctcagcatcccagcatctggtctctccacctttgagcaccagcactgacaaggagcctgcatcatcaaaaattaggttgtctatttttgtacactcttagtgttacaaaaattatcctgatatactgaggctaaattttgccttcttaaaatttctaccattgcatcagagtactacctctggaactggactctttttttgtttgtatgctgtttttcacatattcaaaaacagctcttattgcccccaagggtttctcttttctgttgcttttatctgtattaaataatcaagttttaggccattcactgtcctagttaccctttgctagatgcaacccagtttgccattgccttctgctccctgtgggtaaagccattccacagcaatttgagattgtttccttcttgatctcaactgtggttctaagtctgaaattgcttggcttctttgaagcttcattgttttactattttcatatataaatcagaattagctttccatcattttttaatggtgctcacattgcttacattaccttaattgttctttacaacaaacctatgaggtggacaaagtcagtgttacccccaatttatagatgaaaccactaagattgaccttgtcccgttaaattaggagttcttggggttggtagggatgaagttatagtcatttcctttgctatagcacctaaaaaaaaaaggttcattaaactttcacacacttgtttcagcatttactagtgatgtttgcctaactccattatttccatgatgcttatcaagaggtgattttctaacttcattatcccttctggatttatttactgatgttttactgtgaggaaaagcttttcctttatttattcatttatcagtatgtgctcataggttcaaacatattcaatgggttataacccattaataacattacttattttggtgctcaaatggcctcagatttggccagtggaagcccctgaaaactggtttgtgtggctttttgacctgtcatcatcattcttgaagtattttcttactttctggctgtgtctgtcagcatctaatcattaggaggcagaaaccacacagtaatttgaacaggcgtctaaggggtcaacagaactttaaagaattcaggaaggaatacatttgagagacggtccacccccaccccacagcacccctgtggatgggatccggacttcattgccactggatgctgggaagtttgttgtggtgctacagccaaggctaataagcagaaactgcccacggagtgctgacaaaactgcaaggaagctgcctacaatgtactgttgaacttgcccagaagtcagctctagggcccatggaactagggcactagctaggaccaccctagctgatgtatgtctatgtatttttctatacttatgtgtaaattactgaaggccatgagctcatactgataaccctaattctgatttttccacgtacatacgctacataacagagtctaactccaaaatttagtggcttaaaacagccatcttattttgctcatgtttttgtagattaggaattctggaggggtgcagctgggtgcttctcacttgggtctcaggcaactgtagtcagaagttgactggagctatagtcataaggcccagcagagctggatgacccaggtgactcactcacatgaccaacagctgataattggaggcaactggggcttttcagcttttgactggagcaactacatatggcctttccatgtggcttcagtctttatggcatagaaactaggttttgagagggaatgtccagaaaatgagcattttaagatatccaggcagaaaatgcaagaagtcttctgagccaacctcagaagttatacagtgtcatttccgctgcatactgttggttactagaaaaccgttaagacctagattgaaaggaaaggggatcagaccacctcttcatgagaagagtgtcaaataatttgtggtcatctttaaaatctgccctctggtcacaaattgtttctgttcctcccacatgcaaaatatattaacccccaaaaggcttttccattatagtttctattaggaaaaactcaaagtcttttttgttgttgttgttcccccactcaacactcaacaaacacaacacagacagaagatttctgtgaccaaatgtgagggatttctccccaaaaaaacaagcaatcatttctgtagcagacatcagctgggtgtcctgacactatctagctggagtctgggcttctaaaacttcttaccaattcaagttggggttccctcaacctcttctctgggttcagtcagctcacgaaactcaggaaaacatgcgtataataaaggatatcacaaagatacagatgaagagattcataggtcaaggtatgggggaagtggcacagagctttcatgccctccctgggcacagcaccctccatgtgttcagctgtctggaagctctgtgaatcctgtactcttagacctcttatggaaactttattgggttggcatgattgacaatcatgtagaaatgtgactggacagaaagggtatgatttattaataatactaacagattgagtggggaaacccagcaagacccgtctgttcagattcttctggcctctctgtgcagcattcctttcttcagagtatggggcaggacactctgggatgagggtctttttacttgtttttggagacagggtcttgctctgttgcccaggctggagtgcaatggcacaatcatagatcactgcagccttcccctcccaggctcaagcagttctcccatctcagcctcatgagtagctaggaatagagacaggtgccacgcctggctaatgtttttaatttttaatagagacaaggttttgctatgttgcccaggctggtcttgaactccgggcctcaagcaatccttccatcttggcttcccaaagtgttgggattacaacatgagccactgcacccagcctggaatgagggttttaagacccaatgatcagattagagttctgccttaggcaggcaaaaggagggcagaagaaggtcagagagagaaattctgttttctgaggtctaaagtgccccatcattgtaagaagggctgtgggagttatgagccaggaaccgtggatgaagaccaatatatgtctatcataatatcacagcatcagactcagatccagtattctaaatcaagtccgagtgtgagtgatacaccttcagtacagtttcacaagttacagttcttcttaatctgaagaccagtgaactaaagagacactacataaaacagtgaaactagaaataggataaccatagtatactctcattcataaagaaggaaaatgggtagtgcacagcagcagttctgaaatccagccagtcatatgtggccagttccttaattatgtcccagttcttctctctgggaatggtttttcttggctttgggttctctcatttgagtcattctcccttttccataagcaataaacccatgtttgctgctaggtagctttctcaatgtgcttcctatatgtagttcaagaatattgaagttcaagagttcaggctcaggtgtagtggctcacacctgtaatcccagcactttgagagaccagagtgggagaatcacttaaggccaggagtttgaggtcagcctgggcaacatagcaagaccctgttcctacaaaagaaatttttttttttaattagccaggcatggtgatgtgtgcctgtggtactcatgaggctgcaatgggaggatcatttgagcctgggagatgaaggctgcaatcagctatgatcatgccactgcactccaacctgggcaacaaagcgagaccttatctctattttatttttaatttaattaaattaattaattttatttatttatttatttattttgagacagggtctgactctgtcacccaggctggagtgcagtagcatgatcttggcttgctgcagccttaacctcccaggctcaagcaatcctcctacttcagcctcccaagtaactgcgaccacaggcgggcaccactatgcctaactaaattacctttttaaatttatttttcaccatgctgcccaggctggtctccaactcctgagctcaagtgatccaccctcctcagcctcccaaaatgctgggattacgagtgagccaccatgcctgggggagaccctatctctaaatttaaaaaaaaaaaagttcaaaggcacttgatgttttgtattgtctgtctctttttattcaatctagtataatatcttttaaaacactgcagtttcttatttgtctatttataatctctatgttgcttgactttcttttttttttttttttttttgagacaaggtctccctctcactccaactggaatgcagtggcacaatcatgcctcactgcaaccttagcctcccaagctcaggtgatcctcccacttcagcctcccaagtagctgggaccacaggcatgcaccaccacacccagctaatttatgtaattttttttttttttttagagatggggtttctccatgttgcccggtttggtctcgaactcctgggctcaagcaatctgcccaccttggcctcccaaagtgctggggttacaagtgtgagccaccttgcctatcctagcttggctttcttacagtgtggatgctaggatctgagggggaggattcacatgaccttggaatgatctcatttcaagaccccaaggcctttcttaaactgagacctgtcatgtggcatcatttcttctgcattctattagttataagtgaatcacaaaggctagcacagattcaagaggagaattagatcccgtctctcaatgaaggtgtcaaagaatttccaatcatctttaatttgccacactaatcccatacaggacttgctatatagtcttcctctttttcatatttgtacttcctttctccaataatgagaaacctcatccctgtgtttattaatatatttctgttttcctcaatcttagaatgcactgaaagtaactgcagaattgttaaattataccactccaaaaaaaacaaacattcagtatttatttacagcactttttgtcttcagtctgagagtatataattaaaataatgtgttaaaatgttacttggtttggggtttaaaaaaatctgcttcagtgtggctgttatacatttgaaacacaaattctactggtattccattttatttcctctccttccctcacagatatttttttagggggagtggggaggaactaggtctctgtcacccaggctagagtgcagtagcaccatcatagctcactgcagccttgaactcccaggctcaggtgatcccaccttagcctcctgagtggctgggactataggtatgggccaccattcctggctaattttttgttgttgttgtagaggcttggtctcactgcattgcccaggctggtctctaacttctggcctcaagcaatcctcctgcctcaacctcccaaagtgctgggattataggtctgagccaccatgcccggcctatctcgtttttattctctttattgttttcctgctttttaaattttttcagtggccctaattaggttttttatttaaatctgtttttctatggacacccagttatttagttatagttattagtttttatttctaatatgattttgcctttttcttttatttcattcctgagctcagtcaacttttgtatcatttcttccagtttttgtccatgtcggttcttagttttttaacttcttatttagagagcatttctactcctcctcatatctccagatttttatttgagaatatttaattttgtttggagtgttgtgttacagtttttctgcttcatggtttgctttcaggaagggaaatttttatgagatgaagagtttgggttcttattggttttcttttctctttttttttttgagacagagtatcgctctcttgcccaggctggagtgcagtggtgcaatcttggctcactgcaagctccgcctcccaggttcacgccattctcctgcctcagcctcctaagtagctcggactacaggcgccggccaccttgcctggctaaatttttttttgtatttttagtagagatggggtttcactgtgttagccaggatggtctcgatctcctgacctcatggtctgcccaccttggcctctcaaagtgctgggattacaggcatgagctaccatgcccagccttgttttctttttatatagtagttttgtatagatgagaactgcttgtgcctctgcatatcttggacaacacagtcatttggaatgatttatgagatcccagttcaagagtgttctcttctgtcagagtagcaaagtatttttctttaatggatgacttggggtgggagaggaatgcaagtttgtttgtttgtttgtttaatttccttttgccctacaagattgtaaattttgtccttttttcctcttcctctcatggctgagcttccaaaaggcacctcccttttcacccattctctcccctaaaagcattgcctttcgaagactgcctcctagagtcccacatgcattttaaatatcttcctataaacaatgctttaatcaaccaacattcttttttcagtatttttatatttgggtaggctttttctctctggaggtgatcttatttcattttagaccctctatttccctcttatcttgttcatgtgttttttttttctcaaccccatctggatctctgcaaacacttgggtgggagctcaagaaactggttttggctgagtgtagtggctcacactataatcccagcactttgggaggccaaggcaggaggatcgtttgagcccaagagtttgagaacagcctggacaacatagggagatccagtctctacaaaaaaagctttttaaattttttctaattaaaaaaaaaaaaagaggctgggcatggtggctcacacctgtaatcccagcactttgggaggctgaggcaggcagatgatgaggtcaagcagtggagaccatcctggccaacatggtgaaaccccatctctactaaaaatacaaaaattagctgggtgtggtggtgcatgcctgtagtcccagctactcagaaggctgaggccttctgaatcacttgaacctgggaggcggaggttgcagtgagctgagatcacgccaccgtgctccagccaggcgacagaacaagactccgtctaaaaaagaaaaaaaggcgggtgggggggagcggaatttattcttccacaaattggtgggcttttttaaacaagtaatttgaggttcttgatattctctgtattatagtaatactaacacaagggttttgtgtagtttacttattattcttattgatctatatagcttattatttggtaaaaattcattgacatctttcatatgccatgtttggaaatactttttttgctcattatgttgcttttgaaattaacagttttaagtttaggaacttgaataaaacttttatttgaaatactggtagctttttaaagcatactaaattttgaggaataataaaatgcatatatataaaggataacatttttcaggagctaattaaatttttgcaaaattgtcttagattttatagattaaaagttaatttttaagtggctgagtcttcaataaaacaaatctttgggagaattaaagctcctttatttttggtatactaaaaggcagtgatcagctaaaatggttttaactaaatgcctcatcttcattgactataatcgtttattcttaagtggccatttttcaatctcattatagttttaatgtctagatttctgatgtgtaaggattcaggtgttcaatggacagtggtaaaattgttggcaattctctagcaatgcatattttggcctcacgtcttaattttttaatgtagatgctgttgcatgaaaaagcagaagccctgcaagaagaggtagaagagttactaagattgccttctgatttccctggtgctgtggcttcttccactgacaaagcatgaagctatctgatgagaattttcatatatgaattatttattgtacatgtgtgttattaaagataacttatactttataaatg

SEQ ID NO: 15612 - DNA, 43974 bp, Homo sapiens
agtggtgagtgtgcggagcgccgaggctcgcgttccgccgctgcttccgtcgccggggcgggcgccgcggtgtccctgccgagcgtgagccccgaactgtcaccgcgccgagccccagcctcatccgtcggtgtccgcggtccgagctttccccgcctcgctggcggcccgcgctctcccccgccgtgcgcgttcgccgctgtggcctgtagctacctcgcctcgctgctttgtctccgctgctcttgccgtccttcccgcggccttctgcgggcggggctgtcggctgtcgctttgctgctccgcgacggcggccttgagtctcgctcccccggtgggaaacgtagaactggttactcgccaccttaggcggtggggtttgaatgagagcggtgcctcggtaggtcgtcagaaagttacagtcgcccatctgagcgtttgtaagagatggaggcaggagtggtgaggtgagagccccagatctgagggttggtactgcattaacagctgtgaccggggacagccacttaacctttttgagaaagagttgtctcccgtacggagaccggaccgggtgaactgtgctgccgcatccgcgtgcacgttctctctgttgtttattgtgcttcctgactttgcattgcattaaaaagtgagaatccaattcgaaataacgtctaaaaatcgcctggggctttttgagcacgctgtcttgtcttagagtgaaattagaggtgactagtgtcatttttgaaaggtgctctaattttgtttaacctgacataggcaaaaaacttgttagctttttgatttttcattgctcttctcaaaagtttagtgtaatttgtttcaaaatagaagtaacattttaaagtttgctgggttggttggttttggctttgtttttaagcttgcttggaagattgtagggctggaagttagtggagaacgtatactgaactcttcatttccggatgaaagttttaactccttacccagttagattgtgattttattgagatgagacactgtagtgtccttagtatctatgcccaaaacagacactgagtatatgtttgcttatataacttacatttgaaaatgaaaaacaagtggtgtcagcagtcaaattacaggcatgctttttgtgacatgactcgttaaatctgagtgtagtgaatgacttaagattgggaacaatgtgaggtgttcagcgcatcactaatgacatgtattacatatattttatggtaaaatgtgaaattatagtgctttccctaaaatgcatattatcaaggatatcagtaaactgaaatacgttgttaaactcctcacttttctacagccttctcttaatgtagaggaaataaattaaaactgaaatttggggctttttatttctacaatacttttttttattgcttgcattcaaataatttaaagccgtgcatggtggctcacacctgtaatcctaacactttgggaggccaaagaggaggatcgcttgaatccaggagttagagaccagcttgggcaaccctgtctctacagaaaatacaaaaactatccggctgtggtggcgcatacctgaagtcccagctactcaggtggctgaggtgggaggagatcgcttgagcccaggaggtcgaggctacagtgatccctggtcatgccactgtactccagactgagactctgtctcaaaataaacaaccgatttaatttaagcatttcccttgacaaaaagcaaatatttgttattgttgtaacattaagtttaagcaagctgatgttcataagaggaccatgtaaaccacaagtaaactcagactgtttatttttggcacatataaaaaccaagatgaaaaacatgaataggccgggcacggtggctcacgcctgtaatcccagccctttgggaggctgaggtgggcggatcacgaggtcaggagatcgagaccatcctggctaacacggtgaaaccccgtctctactgaaaatacaaaaaattagctgggtgtcgtggcggacgcctgtagtcccagctactcaggaggctgaggcaggagaatggcgtgaaccgggaggggaggttgcagtgagccgagatcgcgccaccgcactccagcctgggcgacagagcaagactcggtctcaaaaaaaaaaaaaaaaaaaagggaaaacacaaataagttttatttgttcatcctttagtttaacaaatattaattgagcatctattctgtgcctggtatgttcttaggcatcaggtatgcagcaaatgaaccaggtagataagatccctgccaggaacaagtgtggcagcctcaaaatttgatcattcagagtgcaatagtaaaaagtttagttaataggtacactgggtcagatgcagtggcttacacctgtaatcccaacacgttgagaggccgaggcagatggatcgcttgagcccaggagtttgtgaccagcctgggcaacatggcaaaaccctgttgatacaaaaaagagaaaaattagccgggcatggcggtgcgtgcctgtagtcccagctactagggagactaaggtgggagagtcgcttgagcctgggaggttgaggctgcagtgagctgtgatactacaacctgagcatcagagtgagaccgtgtcttaaaacaaacaaacaaaaaacataggtacagtgatgttaaggcagtgtgaattaacgttgcatatacttagctctgtaatgaacagtgagtttattaaatagccaattaacccaactattctaaagcaggtactacagattgaagctttgaagttctatgactttgacttttattaaggaaatgcagagctgaggctaacatctctttttttttttttttttttttttttgagacagagtctcacactgttacccaggctggagtgcagtggcatgatctcggctcactgcaacttcggattcccgggttcaagtgattctcctgcctgagcctcccgagtagctgggactaacccaactattctaaagaaagtactacagattgaacctttgaagttctacagcttttactaaggaaatgcagagctctaacatctctattttttttgttttttttttaaattgttgttgtttgttttttgagatggagtctcactcttcacccaggcttggagtgcagtggcatgatctcaggtcactgcaacctccgcctcccaggttcaagtgattcttctccctcagcctcctgagtagctgagactacaggtgtacaccacagcgcctggctaacttttgtgtttttagtagagatggggtttcaccatgttggccaggctggtctcggactcctgacctcaggtgatccctgcctcagcctaccaaagtgctgggattacaggcatgagccactgtacccagccctaacgtctcttaatatttatcccaaataactgggttttaagtgttcttcacacataatgaatgtagtcataagtactaccagatgtctttgttcattcaacttttattattattattattattattgagccaaggtcttactctgtcacccagactggagtgccgtggtgcaattctagctcactgtagcctggaactcctggacactggcagtcctcccatctcagtcttccaagtagctgggactacgggcatgtgccacagtgaccagctaattttttatcttttgtgtgtgtgggttttttctttctttttttttttttttttttcttttttttgagaaggagtcttgctctgtcgcccaggctggagtgcagtggcacaatctcggctcactgcaatctccgcctcccaggttcaagtgattcttctgcctcagcctcccaagtatctgggattacaggcgcgcaccaccacacccggctaatttttgtatttttagtagagacggggtttcaccatactggccaggctggtctcgaactcctgaccttgtgatctatccgcctcggcctcccaaagtgctgagatacaggcgtgagccaccatgcctggcccttttgtgtttttttttaaattattatttttttttcttgaggcaggctctgctctgtcacctaggctggaatgcagtggctcgatttcaggttactgcatccaaaaccttctgggctcaagcagtcctcccagtctcagcttcccaagtagctgggactacaggcgcatgccaccattcccagctgatttttaattttttttttttagagacaacgtctgtattgcccaggctggtcttgaactcctgggctcgagtgaacctcctaccttagcctcccaaagtgctgggattacaggtgtgagccaccacacctggcctgtttttaaattttaatttatttacttttggtaaagaccaagtctaatgttgactaggctagttttgaatttctagcttcaagggatcctcccacctctgcctcccaaagtgctggggttgcaggcatgagctactacaccaaatgggaaagtatttttttaaagatgcctatgaacggagactcctgaaggttgttgacttcacggtagcattttcagcctagctagtgttatcgtgggttaagaaagataaattcattagcaatataactttactaaggataacctgattgtgatattgttttatttccatatcatatttgcatgtaaaaataccagcagatttgcataaggctttttatcattaagaaaaatgggccgggtgcggtgggtcacgcctgccatcccagcactttgggaggctgaggcgggcagatcatctgagatcaggagctcgagaccagcctgaccaacatggtgaaaccccatctctactaaaaatacaaaattagctgggcatggtggcgcatgcctgtaatcccagctactcaggaaggtgaggcaggagaatcgcttgaaccaaggaggcggaggttgcagcgagctgagatcgtgccaccgcactccagcctgggcaacagagcaagactccgtctcaaaaaaagaaaaaaaaaatttaatattaatggatattctggttccctaagtatgagtgtgttacactgcactgaattctttcagctgactgaaagatttccttgcagctgactgacaattgacaagtctggtattgttcttggtgttcccataaaaatattttcccgataagtgtgaatgcatcctctttgtttcaatcttccggatttatcctagttgttgtaggttgggactgttacttgccaagttgaaagctcttcaattcttagacaaggttagaccttaatgtagaagttgcatgactgtcattccctactcattgttaatagttcattagcacagagatctagatacttaagtggtcttttttttttatattgaggaatttttgtataaaatgtcattgagtctcagatgagatttttggggaagagggggtgttagtgatcaggtaaacttgggtgactgcatgggtttttatctttgaatatttaattatattcttctgtactagttttccttacattaaaaatatgacagtcttagaagcatacttttattctcctaggtgatggtctaaatttgcttctgtgggtctggaagctattagaatgtcatgttattcagcagtatttttccccttgtgttttcccttaatagaaggaaaaaaaaagtactttaatagagatagagtttaagattacagttaattttcctgactctttcgagaacagtaacaacaaaagccttctcttggtaaactgatctttgactaactgttccttagtctctttattctatccttctaagttcctgatggtggcaggaggggatggggttaggttccttaggagcttccttgcccttgttgtctttgttcatgtggaaggtgcaacagctgccgtggcttatgcattcgtcttagttgctgctttatgtagtctatattttggtagttttatctttctgagtaaccaaatcatctgtcacttacctataaattttatagttatattttttccctttggatgtgtattaaatttagacgttttagtttagttttgtttctgttaatcttcacaccaggtcttttctgtgctttaggttgattcttcaccacactgaaaccattaggaaaaatccttgtggttaacagcagaggcttcagagtgtaacctgtactcgggcctagaaattatttaaaatggcgactgatacgtctcaaggtgaactcgtccatcctaaggcactcccacttatagtaggagctcagctgatccacgcggacaagttaggtgaggtaggggctgacacattcttgaagctcactcttggatcaatccctgacttcaggccctgctgggtccttcttggtacatgttccttcccttactttggggagtctaggttgtgaatttgaaacaaaatcagattcttttcatcttccctttcccctcaaattcctgagaaaacctccaaccttctaaatttatagcaaatcaactataattatgtgtttccatttgaaattcaagctaaaataacatactttaaaaagtgtatcttaaaaatcatatttcacttcaaaaaaaacttgttaaaagtaatttgcatcagatcctggagtcgacttgaagaattctcctacatctgacacccagttaggccctttgagaaagagagaaaagagaattttttaatgcatgtttgattatggccatctcttttcttagaaggtagaagatagcaccatgccgattcgtcgaactgtgaattctacccgggaaactcctcccaaaagcaagcttgctgaaggggaggaagaaaagccaggtaaagtaaaatggtgacacagcttaaaacatcaaaagttatactgcaatttggagtgtcccataaattcctttgaacttaattgtttttttttttttttcatggctaagtgttttggggaaacatttagagagaatcagtagctattggtatgtcattgccagaccatgagggcaaagtaaggtttcatcttctctataaaggtttttggaaggtgaaaatgttatgttggaattaaaaacaaaaatgtttggggatgacaggaatggccagagagtagcattctggacataaagtgtcatggggatcagtgcagtgtgggagaatggaaaacgtgggcctttagaatagacagtggaaggttcatccagaaatcatctggaggccttcagagaagcaaatggtgatctgttgatctataacaggtattggtagagagaagattggccagtcagtggtgggagcataacaaatggaaagaaacatagacccatcaacatggagtactaatgctcctttatggcatgtataaccacctcttctccttttcccgtctttatttttcttctcatgatctttttggtttttttccttatcttttcccttttttcctttctctcttgccttttatctcaggtttttcagggataagcacactgtgctgcctctgttgtggctgttagaatcaattatttgctgaccagcatgtattaggaatagagggccgggcacagtggctcacacctgtaatcccagcactttgggaggccaaggagggcagatcacctgaggtcaggagttcgagaccagcctggccatcatggtgaaaccccatctctactaaaattataaacattatctgggcatggtggtgcatgcctgtaatccctgctactcaggaggctgaggcacaagaattgcttgagcccaggaggcagaggttgcagtgagctgagatcacgccattgtattccagcctgggcaacagagggaaactgtctccaaaaaaaagaaaaaaaaaaaaaagaggagtagaaaatacatgcatccttggtgcatcagggcagacatcaataaccagtcaatatactcttttctggctgagcctggattttttctctaaatccttagatgaatgctataagcaatttgggcaccctggcctaaggcagttaagaaacacgggaatccaaatatttaaaaaagtaaacgggtgctggtaagttgaagataggttatcttgtccagcactgggataagccacttggtggtccatcttaatccatgtttaacagccagctgaagccactaaatcactaataacatcagttttcagaatatatgccagagggttcagatgtaaagtattagaaaactcaaccagaagtttatgaagaaacagtgtcacttcacaagttgtatgtttgtttaatcttctctctatcccattttgtacacagtattttgtacatagaaattagacttcacttattttaaattttgtaaactctatgttttacacagaaacacagtagtttaatgagttggaaacagtcttatacataatacatattcaatatctgttgagtgactgaactttattaagccataactcttgagcagttattcttgagaagagaaaataatgtaaatttataagtcttactaccgtaaaacccctgaatgattcttagcttttcatcttttttagaataagacaaagtgtaaataaacatgactaactaatagtaaattcttgcccatgcagccatttaggtcaaattgttgggttgaggggcagtaaaagatatatcatgatgaaaaatacattttattgtggaaaacctaaatgtagttattatctttatccccagataccattgttatagtgaagttctatccataatactttgtcatcctaagcatatgggaaacaattctagaagcagagaattccaaaggaggatggaaatcactcgcttagtataagtgttagaattgtacttatgtgatttggttttaagaaagaagtggcattttaaaattctctttatagctgggcgcggtggctcacgcctgtaatcccagaattttgggaggctgaggcgggtggatcacgaggtcaggagatcgagaccatcctggctaacacaatgaaaccctgtcactactaaaaatacaaaaaatcagctgggcatggcggcacgcacctgtagtcccagctactagggaggctgaggcaggagaatcgcttgaacctggggaggtggaagttgcagtgagccaagattgcgccacagcactctagcctgggagacagagcgagactccgtctcaaaaaaaaaataaataaataaataaaattctctttatgggaaggccacaaagaagtcctcgtcattattgcaataattagttcacataatttaaatgatcaaattcttcaagcatatactttggcttgaagtatatgcttgccactggagtcctttttctttcatgttttttttattttttttatttttatttttttttggagttctctgaagtccctgcataaccagtgcctggggttctgtgttttatagtagctactcagagacatgctgtgaaggaaaggcacaaatagcagcagacctccatgttcccctcatatttctactcttgcttcagtcattcctcttggagaatacatgagtttttaaattacttattctctgagatttgcctgttgaattataaaatggctagtttcttaattatgagtctcatgaatattgcaaagtagaataattaaacaattggggatgaaatgagttttcctttctatgtaatttcctggtctatttttctaataatagataaataaccacctgaccaggaaacttgagtgacataaagaatgtaagaaaactgcattagtggtcattcattttcattttagaattcatttgttaattggagactttggctggtccgtttaataagataagcttttaccttttattgactcagattggaatacatctgcttatgcaattctgctcacctgattttttagaaccagacataagttcagaggaatctgtctccactgtagaagaacaagagaatgaaactccacctgctacttcgagtgaggcagagcagccaaagggggaacctgagaatgaagagaaggaagaaaataagtcttctgaggaaaccaaaaaggagtaaggagttatgtcttcttgctatttatatttgaagaatgtgtaaaaggactttagattagattgttttaaagtgttataacattggtttatgctaggtatttgctatttggatttaatttttagaattaccatttgaaataggtttattatatagttgtttgacctgttagaatatgctgtagttagcagaacacaatggtttgaataatccaaaagtctttgtcattggctttggaatgtgtttttgagcttgtaatttattgtgggagtatctgatattttaagcattggcaagacttcaataagaaatgaaacataactataaaaatctgacctagaagacatttcactattttattcctacttctgtgccaggagtgggttgtttttgtgtgcttatgttagaaggcattgatttgtatcaagccattggtagtgtgacctaaaagtctatatatgtttgatgaaatattcagttgaagaattggctttgagaatctgaaagtaaaatttgctattgatgtgtatctatataaagtgatggcagttactttttaatttttaatttttttttttttttttttgcaggagagctgatagtattcattccactcttttcataattggtcagaacagttagaaattgcttttaactatagtcatgcattgcttaacaatgggtatacattctgagagatacatctttaggcgatttcatcatcgtgccaacatcataaagtgtacttacacaaacctacgtggtacagcctactacatacctaggctttatgggatagtctgttgcttctaggctacaaacctgtacagcatgttactgtactaaatactgtaggcagttataacacaacggtaagtatttgtgtatttaaacatagaaaaggtacagtaaaaatataatataaaagataaaaaatggtatacctgtgtaggacacctaccatgaatggaccttaaaggattggaagttgtttgggtgagtgagtgagtggtaagtgaatgcaaaggcctaggactactgtgtgcaacttttaaaactaaaaagtttttatttttagcaacttttaaaactaaaaagtttttatttttaaaaacttttaaaactttaccaaaaacaaagacacaagccggacgcaatggtgcacagctgtagccctagctacttaggaagctgaggtggggggattgcttgagtcctgaaatttgaatctagattgggcaacgttgtgagacctcatatttataaaaaaacaaaactaagacacatacacacaccttaacctaggcctgcacaaggtcagggtcatcaatatcactgtcttccacctccagatcttgtcccactcaaggccttcaggggcagcaacacacatggacctgtcatttcctatgataacagtgctgtcttttggaataccttctgaaggacctgcttgaggctgttttacagttaactttttttttgtaggtagaaaacatatactctaatgataaaaagtatagtatagtaaacacataaactagtagcatagctgtttattatcaggtattatgtataattgtaatgtgctttttttttttttttgagatggagtcttactctgtcacccaggttggagtgtggagtgcagtggcgcgatctgggctcactgcaacctccacctcccaggttcaagcgattctcctgcctcaacctgccaagtagctgggactacaggcgtgcacctccacacctagctaatttttgtattttcaggagagacgggggtttcaccatgttggccaggatggtctcaatcttttgaccttgtgatccgcccaccttggcctcccaaagtgctgggattacaggcatgagtcaccgcgcccagccaatatgctatatttttgtatgactggcagcactgtaggtttgtttacaccaatgtcaccacaaacaagtgagtaacgtgctgcgctgtgatattaccacagctatcatgttaaccaggtaataggaggttttcagttccattataatcttaagggaccaccattgtatatgtggtctgttgaccaaatattgttacacagcacatgaccataaaagaataacttagtaataactataccttctagctataatcttcagggtattctttatctgagtttcataagtatagctaaggtctgtggaatttatagcaactatcgtgtgtgggtgtgggtgtgtttgtgtgtgtgtgtgtgtgtttaatggagatggcgtctcactatgttggctaggttgggcttgaactcctggcctcaagctgtcctccctcctcagcctcctaaattgctgggattacaggcatgagccactgcacccagcctatcgtctgttgttaaatgttctaatgcacctattaggtgcacagagtactgttatatactcagaataaaatttacataatgctttaaatctcacaaaattgttttgataaacatactcttataattcttgcaacaccttgggaaatagttggttctatattactgttttatagctgaggagaaagactcacatcatttactaagatcatatagctagctagtaaatgtttgagtgaaaatacaaacaaaggttttctgactttaagagcttgagttttttccactataccatattgcatctgttgtaattgttaactaatgtgcattttaaaattctcatttgtcttatgtactgagcccttataccagtgctaatttatgtgactcctttctcctgcagctaagagaaaaatacctttttaattcatttatagtacccagtttttaaagaagatttattttgtaaaattttgcttatggtacatgtcatcttagcctgtaaataaattaaagcattaatttttatccctccctggtcttttcctccttctgactttatacgtctttctagagagcttatcttctataataacaattctttgttttaaagtgagaaagatcagtctaaagaaaaggagaagaaagtgaaaaaaacaattccttcctgggctaccctttctgccagccagctagccagggcccagaaacaaacaccgatggcttcttccccacgtcccaagatggatgcaatcttaactgaggccattaaggcaagtttttatttcaagcaattcatcttagatttattatgttcatttttttcttatttgaaaatggcatatatctgtctagacatcataaatcttgttctgcttcctaaaggagttttaaagagaggaaagtcattataagttcatgtttttctaatataatcacatttggtgaacactgttaatttttttaaaaaaattatatttaatatagcaaatattttaactttagaatttttaaatgcagtttatcgattaagtacagtttttatttgaaggctgaaaatgttaattcattgaacaaacatttaaggactaccttcctctgttgggcgcccctgctagtggtgaattaactaaggctagcaaagtccttgcccttataaatctaattgtgactcagtaactgaaaaatattgagaatttttgtttaaaaaatatctctaggttcatttctaaagctaagtgatcttggtagtggttatctttcacacctgaaccctgttaataaacactgctttattacctagacattccaaaatgcttacaaaaattatcctccttacatagatttatgatttcattgactttcattagatgtagttttcctattttaatttttaaaggttatcttctaatttgacattgcctttattgtataagtcttttcatttaattttgccttgtttagttcatatgatcagatgataagaggagttagaacagacccatctttcagggaccctgttgttaggatctgaggcaggactggggagacagggatacagatgattttaaccagaaaaggggggatgtgtacgaaaaggagcagcctggttgtcattctcagaatatgagaagatagcactaacacataaactggaaaaagggtttgccttcagacttctccctttactccttcaagacttcttatgctctcacctcattaagaaaactttattggtctagattacctcactgtagtgaaatctctgttctttgtatagcctttcttcaaggatttcacttgatgaccactcagcctgggtttgaaggagcagcatcatagtgaggatggaaaaagggctgaaactttaaaatagtgaaataaaaaattaaaacaatatcaatttggcttaaagaatggtttgaatataattgtgcatatttatggagatgattgattttatatagataatgtgtattccatgcaatatgacaaattattgtttcagaccatggataccattttctgtattgaacaggaatcatgatgtctactaccatctcactgtcggattggtggagcaaaagattatttgtttcagcattagtgttcttttctgcttgattttctttgctctgtgttttcttttaagatcaggagtaaacctcagtaggtcattaatagttcagagacatagacttgaattacatgacccatattaatacaacttgtttcgtgttgtgcaatcttttctggaccatctacctgtgagttatttttctttgttgtcaaaatgtataaaaacattcaacgaagttcttatccaatgagaatgaataagtgctacattgatttaatagacactgtggcagtacaaaattgatggactagctcattagataaatgacagatgctacttttgtgtgtttcaaaatttaaagtatttgatttcaagtcagtgaccagttggaaaacaaaattttaagcatttgaaaaaaattaagtatttgctgcctttgtgacataatgagctacttaattcttccaggtgcattagtcaaatggagtataagtaaaataggatggaaatggaagagggcacattaaattcaaatagaacaccttcactattacccaaaactctccttcagcactttgccatctgtaaacccatttttatgccacttattcagattatctttgattcttctttctgctgacattcatacagagccttcagggaaatgtcctggcatgctcattccttaagctcgtgccttaaaatgggacagatctgtgatcctgtaagtgataggtttgttctgcttttctcattttgatgccaaagattcatcttctaaatacagaatggaattaaaatggaaagaggttcttcattatacatagaatgttgttcgtgttcagtatggtctcttaggctgttttgaacaatttaaaattgtagtagaaatatttagtaattctgttacttctctgtagtcattatgaactgaagtcttctgaagttcattcttccctaccgtttttgtcatctatcatcaaattcacttccaaaataatttattttgaaaatatatgtcaggctctatctaataaaaaaaaacaactagtttaataaatcttttctaggcatgcttccagaagagtggtgcatcagtggttgctattcgaaaatacatcatccataagtatccttctctggagctggagagaaggggttatctccttaaacaagcactgaaaagagaattaaatagaggagtcatcaaacaggtattacacaattgttagtagtaagatcatttcattgtgtattagctttaagtctacagttagtaacatttaggctttttgtgccttttttgttaaaaataagtttcatgatgatgaaattccttaagtttaacctagttgaattatctgaggctaggtttcgaaaatgctggtgccattaagatagtgtaacttttttctagcttactttgctcttaattggatattttttggggggctgcttgtgcttgaaatcatgtagcactgaacatgaaaaagaggtaaggaatcctactactgaaacagcaaaaatgaggctagggatggtggcctacacctgtagtcccagcaccttgggaggcttagttgggaggatcacttgagcccaggagttcgagaccagcctgggcaacatagcaagaccccttctctacaaaaaatacaaaatcagcagggtttggtgacacatgcctctagtcccaggtacttggaaggcagaggcaggaggaccgcttgagcctgggaggttgaggctattgtgagttacgatctcaccactccagcctcggtgagagtgagaccctgtctgaaaacaaaaaggaataacagaaataataattgcccttgtcttaggtttgtttcctttaaagcctaacttacatgatagacttgttactattaatttttagcttcataaatgtgctcaccttaactgattagtatctaaactattaaagcctgttaagagtatcagagaaacccgagtgaaatgtgactagtactagaacaaatgttgatttcaggcataaatctactttatcttgcatagtgcatggaaacttagaaccatagaaatctaaagctagaataaactttatattatgttaccctcttcagaggtccagagtgatgaaataactgctaaggtcttacggtagtggcaaaaattttaaaaacctagttcaccccattcctagagtcttgttaagttttttctataccccctgcctgtttgatcagaacagaattctgtgccactcaggcatttcagctctgcttagggacttccaactagtacttaattgcacagatacgtcttgtctcctatgtgccagttgcctggaggtctgttagtgaataaaacagattgctgctctgtggagctaggagtccagctttctcaaaatgtaaaactgatatttaaatggcctttaaaattatcactgacggccaggcacagtggctcatacctgtacgctgaggtgggagggttgcttcaggccaggagtttgagaccagcctgggcaacatagcaaggtgaggccctgtctctacaaaaaaattatttctttattctattttattttactttttgagacaggatctcactctggcccaggctggggtgcagaggtgcaatgtcagctcaccgcactctctacctgctgggctccagccgtcttcccacctcagcctcccgagtacctgggactataggtgtgcaccagcacacccagctaatttttgtattctttgtagagacaaggttttgccatgttgcccaggctggtctcaagctcctgggcccaagtgattcacccacctcagcctcccaaagtgctgggattacagacgtgagccaccatgcccagcctttacaaaaaacttaaaaattagccaaatgtaggggtgcatgcctctagtcccaactcatgaggctgaggcaggaggatcgcttgagttgagctatgagctaacatagcaatgagctatgattgtgccactgcactccagcatgggtgacagagtgagaccctgtctctaaaataaaacaaaattatcgttgactaaaaagtcttacctagttaatataattattagagccaaggacctgttgtgtaacatgtcagcaaagcttatgagatggcttcatgttttagtttatgacctgctctagcctacatagcctgaccacccttggtttgatgcctaaacaactcttagtaggctaaaagcattccagcttgattgctgcattgatagcagtgtaggtaaaactaagctgtggaggactttagttattgtgaatcaactttttttttgagatggagtctcgctctgttacacaatggcatggtctcagctcactacaccctctgcctcccgtgttcaagcaattctcctgccttagtctcctgagtagctgggattacaggcgcccgctaccacacccagctaatttttgtatttttagtggagatggggttttaccacattggccaggctggtttcaaactcttgacctcaagtgatctgcccacctcggccttccaaaatgctgggattataggaatgaaccaccgtgcctggcctattgtgaatcaactttaaaattttatgaaagtgctttgtgaactggaaatatgtggtaaaacttaacataccattgtgtgcagtggctaaaaaattgtttgtttgttttttgagacggagtatcgctctgtcacccaggttggagtggagtggagcgatctcagctcactgcaagctctgcctcctgggttcacgccattctcctgcctcagcctcccgaatagctgggactacaggcacccgccaccacgcccggctaattttttgtatttttagtagagacggggtttcactgtgttagccaggatggtgtcgatctcctgacctcgtgattcgcccgcctcggcctcccaaagtgctgggattacaggcatgagccaccgcgcccagccaaaaaattgttggataacccttcccataaggaataatgtatcattggtaaactgtgggaagttacgtggtctgagactaattaggctctaaactttttccaaggtgcttttaagacagtgagggcttttcttatttccctaagagattgtgtcccttccttttttgggacatttttgttttgattttttatttcattttgaaagtttttaataaactgtttaacgtggtatcacagtagcattcttcccaaaattttgtagatgagaaaacaaaagctcagagggttaactgggttgtccagtattactcagcatcagctagatggtatataaaggagctttcatctgaagtcttttgactctgcattgactgtttttttttttttctctgaagaagtaaacaccactttacattagctcttgcattaccatggcctgtaatttccttagcctactgtaaagttatgaatactagaataacaaaaattaatttactttaggttaaaggaaaaggtgcttctggaagttttgttgtggttcagaaatcaagaaaaacacctcagaaatccagaaacagaaaggtaagacatctataccacagtttgagtgctgtggagctgttactgctactaaaaatagcaacattcattgagtgtttgctgtgtgcctggcactatgcaaggttcagcctttctgctaaggcctagggaagttataaataatttgttcctctagtgagtagaatagccaaggtgcagatccaagcagtccaacctggttaagcctgtgctcttaagtgccttatattaaattatgggcagctatataaattacactgttttttgttttgagatggagtcttgctctgttgcccatgctgtagtgcagtgacatgatctcagctagctgcaacctccgcctcctggattcaagcaattctcctgcctcagcctcctgagtagctgggattacaggcactcgccacagtgcctgactaattttttttgttagtagagacagggttttaccgtgttggccaggctggtcttgaactcttgacctcagtgatctgcccgcctctgcctcccaaagtgctgggatttacagggtgagccattgctcccagctgaattatactgctttttgtgaaatatcttttaaactagaggaggtataagagtcctctgtttttttgtttgtttgtttgtttgttttcttttctaagatagaatcttgctctattgcccgggctggagtgcagtggcacgatcttggctcactgcaacctctgcttcccggattcaagtgcttgtcctgcctcagcctccccagtagctgggactgctacaggcatgtgccaccgttcccagctaatgtttgtatttttagtagagatggagtttcactatgttggccaggctggcctccacctcctgacctcaggtgatctgcctgcctccgcctcccaacgtgctgggatgatagatgtgaaccacaccatgcccagcctaaaagtacatttttaccaaatactagacccaaaaacaatacccagatccaatttttcttcctgtttttgtaaatactaacattcttcttcccaacacatataatttcatttgtgtaaagtatttctacaataataaagtgaaatgtcttgtactcatttatatcagaaattgaaataatatttttctacaccttttttttttgttttacaactctgaagctttttatccttttttcatagacttttcaaacactttcaaaatgaactttatgcatttttttctggtgctgtacttcataaattaggacctttaaaatctacactcctttttacttttatgtgtgttttttgtgtgtgtgttttgagacggagtttcgctcttgttgctcaggctggagtgcaataatgcaatctcggatctctgcaacctccgccttccgggttcaagtgattctcctgcctcagcctcctgagtaaatgagattgcaggtgcatgccaccatgcctggctaattatgtatttttattagagacagagttttaccatgttggtcaggctggtctcaaacttgagacctcaggttatcagcccacctcagccccccaaagtgctgggattacagacgtgagccaccacacctggctcctttttcttgttttgttgtgttttttttgtttttttttttttttgagacggagtctcgttctgtcacccaggctggagtgcggtggctccatcttgcatcactgcaatctccacctcccgggttcaagcagttcttgtgcctcagccttccaagtatctgggattacaggctacgacgtctggctaatttttgtatttttagtagagaggaggttttgcaatgttggccaggctggtctttaactcctgacctcaggtgatctgcccacctcggcctcccaaagtgctgggattacaggtgtgagccaccacacccagcttttatatgtatttttaatgctgtccattgaaaattttatatcaaagaaattgccataaaattgacaaatttggtaatcaactgaggaaagcccttgagttgtatgtagaaacatttacgttctataatgatcataatttttgataattacttttcagaataggagctctgcagtggatccagaaccacaagtaaaattggaggatgtcctcccactggcctttactcgcctttgtgaacctaaagaagcttcctacagtctcatcaggaaatatgtgtctcagtattatcctaagcttagagtggacatcaggtatgagccattggcctggcctttaaaacatgatgtgttacttcctttagctcccttttcatgggaaaagagatagattaaatactgaggaaggattactttcagctaaaaataaatcttttttattggttttatttttttgccccattatgtttttattttcatatctccatgtataattttttttttttttttttttttagttttttgagacagatttgttcttgtcacccaggctggagtgcagtggcaccatctcaactcactgcagcctctgcctcccgggttcaaaggattctcctgcctccgcctcccgggtagctgcgcctacaggcacccgccacgacacccagctaatttttgtatttttagtagagccaaggtttcatcatgttggccaggctggtctcgaactcttgaactcaagtgatccacctgcctcggcctcccaaagtgctaggattacaggcgtgagccgctgtggccagcctttttttttttgagatgaagtcttgctcttgttacccaggctggagtgcaatagcgcagtctcagctcactgcagcctctaactcccgggttcaagcgattttcctgccacagcctccgaatagctgggattacaggccccggttaccgtgcctggcctagttttgttttttgtgtggtttttttttttttttttccaaacccaaatcttatctttctttgtaagatcctggtagagtaactcttttaaatgttgtcagctgttaagatatgtagtattgaactgtgtatcttctcagatatgaaatatcttaacagttgacaacattaaaagagttactctaccaggtttaaaagaaaaaaaacaaaaaaaaaactaggctggctgtggtggtgggcatgtgcagtctcagctactcaggaggctgaggcaggagaatcgcttgaacccaggaggtggagttcgcagtgagccgagattgcgccattgcactccagcctgggcaccaagagcaaaactccgtctcaaaaaaaaaaccataagagtaaaaaggagtgtagactttaagggtcctaatttattcttagcctttaataactaaataatgaagtacagcaccagaaagtaatacataaagttcattttgaaaatgtttgaaaagtctgtgaaaaaaaggatagaaagcttcagggttgtaagaaaaaaaagtgtagaaaatactatttcaatttctgatataaatgagtacaagacatttcattttattatagaaatactttacacaaatgaaattatatgtgttgggaagaagaatgttagtatttacaaaaacaggaagaaaaattgcatctgggtatagtttttgagtctagtattgggttaaaatgtacttttaggctgggcacggtggctcacgcctgtaatcctagcactccagcctgggtgacagagtgagactcagtctcaaaaaacatatatatgatagatatatgcatacatatgtacatacatatacatcatatatatatttcatgagaattcaggcttcaataacacctgtacatagaaatagcataatgtttccatcatttaaacatgcagcataaaattctgagataattttgttagtaattgatacgtaaaatttgccatttaacgtcttgacagatcatttagattgtcacatttgctcagttgtagattcatgcagatatatcaatttgtttaaatttgtaattcacagactctgagagtgtttgtgtgagatgacttctagaaaattatgtttaatccagatttctgtctacagaagactaccatattgaatgcacattgtcccgatacagtgtagtaccagtatttacttgcattactgaggcatgcaattagaagtgctgaggtttcagtccagaagccacattttcagaaaatcagtagtggtcatcagaatgccaaattaaagagctagtgaaatagtgcaaaagaaaagggaattatagaagcagaaagttctaaattaatgtgctgatattttcatgcttcttatatgctgagtatagtggtagtaggcagacacaattgtggatcaaaaatgcgttatatgatgcatttaaagatggaaacatatttcactattctttaacaaagaataaagtttatttggctcatggtactgcaggctgtacaagaagcatagtgcaggcgtctgcttctagtgagggcttcaggaaacttacaatcatggtggaaggaggagctatcgtatcacatggcaaaaaagggagcaagagaggagggaaaggtgccacactcttaaccagatctcacactcttaaaacaaccagttgttttaaacaacccgctcattacggccaggaaggcacgaagccattcacgaagccatccctataactcagacacctcccactaggccccacctgcaacactggggatcatatttcacttttatctcctttgtgtgaccccaaaatatctgagacaggtctcagtcaatttagaaagtttattttgccaaggttaagattgtgcccgtgacacagcctcaggaggttctgaaaacttgtgcccagggtggtctgggcacagcttggttttacacattttagggaaacatgagacattaatatatgtaaggtgtatgttggtttggtctggaaaggtgggacaactcaaatcagggagggggcttctaggtcataggtaaataaaagacaaagaatttcattatttttgagtttctgattagctttttcaaaggaggcaatcagatatgcatttatctcagcagatgaatgacttgaagttctgtctgtcgtttgtctgcaaggattttccttgtgattaggggattcgtgattagggtttgtgattaggggatcccaagatttattttcttttcacagcctttattctctgctttttggtgagtggagaccatatcttcccccatttttttttcttgtagttctactctacttacataaggtagtgtgttgctaccagtgtgcctttgctgcacttcttttgaaacatattgtcatgaccttaggctgaaacaaaatttacctgataatggatgggttgtcaacccaaaggtgctaatgaacctgaagaccttttctcatggcctttttaatggtaattttttccattgaaacttttttctcttatgtgaaaccatattgattttctctaattcttgattataatggagtcctttcatatacacatttaacttgaaaattcagccattcttgcttggccaaacaaaagaggaagaaaaatacagtttcaccaaagtgtaagttgtctatactggtatctacaatgtctccccttccactttctccactttagtcagactttatccccaccactttacctgaatattttctgtcagtctccacgttggaaatttcagtggtcaattcatagtccttaccagctgccctctcaatggcatttgacacagttgatgactcctacctgcttgaaacattttcttcacttgccttccaggacaccacactttcctgatttttctgtaacctttttacccttcgtttctcaatctcctaaggatttctgctttacctcttaatagaaaggagccctcagggttataccttaggcctctcatcttttatgtccacattcacttggtgattcctttcacttgcaaaactgtaaataccagctataaactattaattcacaaatgtatgaatctagcccatacctcccttctaacttcagattcgtgtatacggatgcctgttcagcatcagcacttggatgtctgatttaaatgttgaaaacatttaatgatccccactctgctccctctccccccaaaaatccctgcatttcccacattatcttcatttcagttcatgacaatattatccttccatgtgctgaaaccaaaaaccctgactttgtgctggtctcttctctttatcagacacctttatctaatctataagcaattatttttgctctgtctttaaaatatatcagtaaacaggctgggtactgtggctcatgcctgtaatcccagcactttgggaggcaggtggatcacatgaggtcaggagttcgagaccagcctggccaacatggtgaaaccccatctctactaaaaatacaaaaaaattagccatgcatggtggcacgtgcctgtagttccagctactcaagaggccaaggcaagagaatcacttaaacctgggaggcatagtctgcagtgagccaagatcacaccactgcactccagcctgggcgacagagtgaggctccgtctccaaataaataaataaaataaaatatatcagtaaacagactacttgtcatcacctgcactaccattctcttccaggccaccatcatctctcacctgtattagagcaataacttcttaactgcttttttcatgctccctttcagtatgttcttaccatcatagtgagagtgagacttttttaaaaatgtaagttctatcactttttaaaatttatttatttatttatttgagaaggaatcttgttctgttgcccaggctggagtgcagtggcatgatctcggctcactgcaacctccgcctcctcggttcaagcgattttcctgtctcagcctcccgagtagctgggattacaggctgtgccaccacacccgggtaatttttgtatttttagtagagacagagtttcaccatgttggccaggctggtctcaaattcctggcctccagtgatctgaccgccttggcctaccaaaggattacagacgtgagccactgtgcccagcctgtcacttttttttttttccaagctggggtcttgctctgttgcccagactggagtatagtggcaagatcgtggctcatggcaacctcgaactcctaggctcaaacgatcctcccactgtggcctcaaaagtagctgggactgcaggaatgtgtcaccacacacagctagtagtttttaaattgttaatagagacagaatctccctacattgcccagactggtctttaactcctggcctcaagtgatcctcctgcttcggccacccaggtgttgggattacaggtgtgagccactgtgtccagtgtcatgtcgcctttctactcaaacattcagtgtcttcccaatcccgtcacagttaaaaaatcagtctgtagggctgggtgtggtggctcacgtctgtaatcccagcactttgggagtctgaggcgggtggatcacaaggtcaagagttggagaccttcctggccaacatggtgaaaccccatctctactaagcatacaaaaattagccgggcatggtggcacatgcctgtaatcccagctactcaggaggctgaggcaggagaattgcttgaacccaggaggcagaggttgcagtgagccgagattgtgccactgcactccagcctgggcgacagagcaagactctgtctcggggcaaaaaaaaaaaaaaaaaaaaatcggtctttaaaatggcccacaaggcactacactcacttgtatctctgacctaagctactcctcttcactctctcactggtctcagagcctttgtgttgcattccctttacctgaatgtatttttccccataagccactttgccagttcctttacttccttaagtttttagtctgatgtcatcaccaaaggcctgccttgactatttttattattcttgttacttgggcatataaacaagagaaatgtatttctcacagttgtgcagactcgaagtctgagatcagggtgccagcatggttgggttctgtgagggcctcttctgggtgtcagagtgccttcttctcattgtatcctcacatgacagaaggagcccttaatactttcttaaatgttttattttggaaattttcaaacatatacaaagaaggatagagaacattaaccatcatacttaaatcattcttttttttgtttggagacagagttttgctcttgttgcccaggctggagtgcaatggcacgatcttggctcaccgcaacctccgtctcctgggttcaagcaattcttctgcctcatcagcctcccaagtagctgggattacaggcatgcgccaccacacctgactaattttgtatttttagtacaaatggggtttctccatgttggtcaagctggtgtcaaactcccaacctcaggtgatctgccggcctcggccccccagagttctgggattacaggtgtgagccacctcgcccggccacttaaatcattcttaacaaaattaataatttcttagtattatctagtacccagtccatgttcaaatgtccttaattgtctccagaatgatattttacagttgtttttcctaacatggcccacacgttgtatttggttgataatgaccaaccaaaacctctctcccagccaggtgctgcggttcacatgtgtaatcccagcactttgggaggccgaagcgggaggatcgcttgaacctacaagttcgagaccaggctgggcaacatagtggaaccccctctgtacaaaaaaaaaataacaaaaattagctggtgtagtggcatgtgcctatagtcccaactactcgggaggctgaagcagcggaagggttgcttgagcctgggagatcaaggctacagtgagccatggtcataccactgcactccatccagagtgacacagtgagatcctctctcagaaaaaaaaaaaaaaaaggccaggtgtggtggctcacacctgtaatcccagcactttgggaggctgaggcgggcagatcatgaggtcggaagatcaagaccatccttgctaacacagtgaaaccccgtctttactaaaagtacaaaaaattagccgggcgtggtggcacgcgcctgtagtcccagctacttaggaggctgaggcaggagaatcacttgaacctgagggggcggaggttgcagtgacctgagatcgcgccactgcactccagcctgggtgacagagggagaatgcgtctcaaaaaaaaaaaggagtgtttaacccatagggtttaagtctcttagtatgtgcgaagcacttcttagaatagtccttggtacctagtaaatgttcaactaatgttattcttactagtctcagttccagcttctcatagtatgaccattacagcatgctaaataggattctaatatttaaagacataatttttttgttttgttttttattttttatttttgagacagagtcttgctccgttgcctaggttggattgcaatggcatggtctcagctcactgcaacctccgcctcccgggttcaaatgattctcctgcttcagcctcctgagtagctgggactacagttgcctgacaccacgccccgttaatttttttgtatttttagtagagctgaggtttcactatgttggccaggctggtctcgaactcctgatctcgtgatccacccgcctcggcctcccaaagtattgggattacaagcgtgagccaccgcgcctggccaagacattggtttttaatataacatgcaagtcaccttcttaatttgataacagtgatttttttgcaaccctagaagaagaactgggcatattgggtatatagagactcagagttggccttgaagaaggtgtctttggaaattttctaggtctgtcatacagcgttagaagtcaaatgttaaaatctaatcttcagccaggcgtggtgcctcatacctgtaatcccagcactttgggaggccgagtcaggcagatcacctgaggtcgggagttcgagaccagcctgaccaatatggagaaaccccgtctctactaaaaatgcaaaattagccgggtgtggtggcgcatgcctgttatcccagctactcgggaggctgaggcaggagaattgcttgaacctgggaagtgaaggttgcagtgagccaatatcgtgccattgcactccagcctgggcaacaagggcaaaactccacctcaaaaaaaaaaaaaaaataataataataatagtaatcagaactctagatctgggaataaccctgtatctatttctttacatttttctttcattaatgtatttatcactattttttttttgtttttctttgcaggcctcagctgttgaagaacgctctgcagagagcagtagagaggggccagttagaacagataactggcaaaggtgcttcggggacattccaggttagagatcagaggcctggttgtggagaagtgcttcttaaagtttttggtttcaggacctccttatactgtaaaaatttattgaggacctcaaagaacttttgtttatgtgggttatatctgtcaacatttactatgttagaaattaacattgaggtctgggtgcggtggctcacacctgtaatcccagcactttgggaggctaaggcaggtggatcacctgcggttgggagttcgagaccagcctggtgaaaccctgtcgtctccactaaaaatacaaaaatgagctgggcgtgggggcacatgcctgtggtcccaactacttgggaggctgaggcaggagaatcacttgaacgcgggaggtggaggttgcattgagccaagattgcaccactgtgctctaggctaggtgacagagcgagatgccatctcaaacaaacaaaaaaacacaaagaaattaacactgaggaaaaatttaaatatttattgatttactttaaaatactagtagaaaacccattacatattaacataaatgacatattttttagtgaaaaatagctgtcctccccctgccacctcccggccttttttttgagacagtgtttctctctgtttcccaggctggagtgcagtggcacaatcacagctcactgtagcctctatctcccaggttcaaggggtcctccagcgtcagcctcccaaagtgctgggattgtaggtgtgagcctataatccgtcttccccaattttttttttttaatgagaagtcgtcaggcactgtttacatttttgcaaacatctttaacatctagcataacagaagacagctagtatctgttccagtttattttgggttacttatttgaagaaaatctaaccttacacagaaatacaattagaaaaggatggaatattttaagataactttgagatagttgtagaaattattctttgatactacaccaaaactcaacaaatcgttatttttttaacagctttattgaggttgatttgcataccttatacaatttaatttatataattacagtttataactcagtgattttcagtaactttatagaattgtacaactatcacagtccaattttcggacatttctgtcacccaaaaaagatcccttgtagccatttgcagtcactccctattccaccagcagcctcaggcaacctctagtctgttctgtctctctgcagatttgcattttgttcacatttcatatggatagaatctagaatcatgtactatatgatcttttgtgtctggcttcttttggcatgatgtttttgaattttatccacgttgcagcatgtaccagtgctttcattcttttttattgtccaatagtatttcattctatggatgtcacattttgtttatccattcatgagatgatgatggacatttggattatttctacttttcagctaattatgaataatactgcctatgaacatttatgttcaagtctgcgtggatatgtttttaggacttgctgggccatatggtaaatttatgttctaagaaactggcagtgtttataagggctcaagtcgttttgttttgttttgagatagggtctcactctgtcacccaggctagagtgcagtggtgtgatcttggctcactgcaacctccacctccctggctcaagcaatcctcccatcttagcctccctaatagctgggattataggcgtgcaccaccaccatgcctgattaatttttgtattttttgtagaaatggggtttcgccgtgttgcccaggctactcttgaactcctgggttcagtgaagtagtctgcctgcctcagcttcccaaagtgttggaattacaggtgtgatccaccacacctgaccagggctcgagtttctccatatcctcctcaacgtttgttactcttttttattatagccatactagtggatatagggtatctcgttgtagttttgattggcatttccctaataattactgatgttgagcatctcttgtgcttaaggccatttgtttattgtctgtagtgaaatgtttattcaaatcttttgcccatttttaaaagggggttggttattcgttaacaagaattcattactctagacataaagtctcatcagattttttctcctattctgtgactttctcagtagtatcttttgaagcgtttactttttgatgaagtcctatttatcatttttaaaaattgcttttgcagttttatggttatctaagaaacattgcctaattaaaggtaatgaaaatttactcgtacgttttaagagttttataattttggctcctacatttaggtctgtgatctatattgttttgtttatagtgagaggtaagggtataatttatctttttgcatgtgggtgtgtgattattccagcaccttttattgaaaagactgtcccttccctattgaattgccgtagcatcttatgaaaatcaattgaccataaatataagggtttatttccggattctgagttctcttttgttctgtaggtgtatccttcatgctaatactgcactgtcttactgactgtagctttatagtgaattttgaaatttggaattataagccctctaactttttcaggaatgttttgactatgccgggtcctgtacagttccatacaaattgtccatttctgccaaaaaaaaaaaaccaaaaaaacagctggagttttggtaggaattgccttgaacctatagatcaatttggggagactcactgtcaacaacgttgagttttccaatccatgacacagaggtctctttatttaatttctctcagcagtgttttgtagttgttcggtgtacgagtcttgaattttttttgttaaatttattgccaagtattttattctttttccatgctgtcttgaatggtggaagtgttttctaattttcgttttcaggttgttaacgctaacctgtagaaatacaatcgatttgtccattgctcttgtatccttcgcccttgctgaactcaccagttgtagtagtttctttgtgaattccttacagttttctacatacaggatctgttatctgcaaataaagagcattttacttctttgtttctagtctggatgtcttttacttcttctgattgcctgattgctctagattaacctccattacagtgttgagtagaagtggtaacagcagacatcttcgccttgttccacatcctggagagaaagcattcagtccttcacaagttagctataggtttttcatagatgcctattgtcaggttgagcaagttcccttctatatatactactagtttcctgggagtttttatcatgaatggctattggatttgtcaagtggtttttcagtgtctgttgagatgattgtgtggtttgtgtcctttgttcgtgtggtctgttaacattatttgttttgtggtaaattctttaaagtttagttgccatgtgaaacctgaaaccctaatcagtgaatttcttggactgtgttaccttaaaattcattgaactttgaataggtattttaatccttcataattttgtagcacgatacattggtcatttgaaaaatagtggcacagagttacatagattttccaaatgttggcatttcattatatacgacaacaaaaattacaatcattggtgttggccactgatcttataagaacagtatttaagtattgggaagataacagactcacagtgatggacacaagtttttcaggatttaaattttctcttgaaaggttgaattttatcattggcaacaaatactattatttttttacatgacaggctcttttagttcatttgcaagatactgtctacctcataaccaagtctgaataatgataggttagctgtcagttatttctttaagtaaaaaagtattacaggtcaggcgcggtggctcatgcctgtaatcccagcactttggggaggccgaggtgggcgaatcacgaggtcaggagatccagaccatcctggctaacatggtgaaacccaatctctagtaaaaatacaagaaattagccgggcatggtggcacatgcctgcaatcccagctactcgggaggctgaggcaggagaatcccttgaacccaggaggcagaggttgcagtaagccaagatcacgccactgcactccagcctgggtgacagaatgagactccgtctcaaaaaaaaaaaacgtgttccaagaaaaatgcagctaattcagctcataactttaacaattacacaagtgcttttcctggataccatcatgtctacatatgtagcagatacggattatgtggttcttcctgtttcatcccataaaatattctaaagacattcaaaagttgagatttaataaaataatttttagtactttatcaagggcattctaagtgaattcgtgctcttttttttaaaccataagtacatagcagtaaagaagacaataaccacatttttgtgtctctgcctttatctgtggtaagctgacagcagttttacccaccattgcttctgcaccatcagtgcaaatgtcaaaatagtgaaaaggccaggtgcagtggctcacacctgtaatcctagcaatttgggatgctgaggcgggtggtttacctggtcaggagtttgaggccagcctggccaacatggtgaaaccccatctctactgaaaatacaaaaattagccaggtgtggtgggcgcctgtagtcccagctactcgggaggtagacgcaggagaatcgctggaatccgggaggcggaggttgcagtgagccgagaccgcgccattacactccagcctgggcaacacagcgaaactctgtctccaaaaaaaaaaagacagtgaaaaagcaaatcgcatcttaggtttttgtttgtttgttttttgagatggagtcttgttgcagtgagtacagtggcttgatctcggcttactgcaacctccacctcccgggttcaagcgattctcctgccccagccttgcccaagtagctgggattacaggcatgcaccaccatgcccggctaatttttgtatttttagtagagatggggtttcaccatgttggccaggctggtcttgagctcctgacctcagctgatccacccgcctcagcctcccaaagtgctgggattacaggcatgagccactgcgtctggcatatcttagttttattatgcaaatagttttgaccttgcagatcctctgaaagggtctcaggaacccagacaattgtaaccagaccattctttaagaaccactaaacagttttgtagagcatttctggttttctccttttccctttttgcatattatttgctaacctttgttaccacacctttcattttcaaagtatgctatgtaattttcttttgtatgatacttttttttttttttagtttattatttatttttagagacagagtcttggtctgtcactcaggctggagtatagtgatgtaatcatagctcactaatagcctcaacttcctgggcttaagccatcctcccccctcaccctttcatgtaggtaggctacaggcatgccgccattcatagctagtttttttatttttagtagagagagagtctcactatgttgccgaggttggtcttgaactcttggcctcaagcagtcctcccccattagcctcccaaagtactgggattacagatatgaactaccgtgctccctgataccctaaatatttatcaaaatttttcactgctattttcctcataggattaaaagggctatttattattttttataactacagctgacccttgaacaacataggggttaaaggtgcagatcccccgtgcagtaaaaaaaaaaaatcataaaaaactttagattcccagaaaacttgactattaatagcctactgttgaccggaagccttacaaacagttaatacacattttgtatgttgtatgtattatataatgtactcttataataaagcaagctagagaaaagaaaatgttattgagaaaatcttaagaaagaggaaataatggccggccacagtgggtcacacctataatcccagcacgtcaggaggccgaggcaggcagatctcctgaggtctggagttcgagactagcctggccaacatggtgaaaccgtgtctctactaaaaataaaaaattagcgagacctggtggtgggcgcctgtaatcccagctactcgggaagttgaggcaggagaattgcttaaacccaggagaccgaggttgcagtgagctgaaaccacgtcattgcaatccagcctgggcaacagagcgagactctgtctcaaaaaaaaaaaaaaaaaaagagagaaaatatatttattgttcattaagtggaagtggatgatcgtacatgtctttatccttgtcatctttgagttgagtaggctgaggaggacaaggaggtgttggtcttgctgtcttggggtggcgggcagaggcagaagaaaatccacatataagtggaccagcacagataaaattgtgttgtgttcaagggtcagctatacttcatttttcagattcagaaaagtgaagtattctcaaataaaataatctttttttttttaaatttattttatttatttatttttttagacagaatcttactctgtcgccgaggctggagttcagtggcatgatttcggcacactgcaaccccgcgtcttgggttcaagtgactctcctgcctcagcctcccaagtagctgagaccacaggcacctgccacacctggctattttgtgtgtgtgtgtgtgtgtgtgtgtgtgtgtgtgtgtgtgtgtgtgtgtgtgtgtgtttttagtagagacaggtttcgccatgttggccaggctggtctcgaactcctggccttaagtgatctgcctgcctctgcctcccaaagtgctggggctataggtgtgagcacccagccaaaagaatcttaatttttagggacataactggttaacctgcttattgggtacagttgtcagtatctttgggttaggttggctattattttagggtggatggagggtagatggaaggagaaaatatccataggagggttgggacttctcagttagattgaatacctgttgaatgggaagagaaagtccctaagctgacaatttattgtaaaacatatctgtgctaatgcaggaactccgacccacctggtgcagaggagtcttgtcttgacctgctttgggagagtgttgtcttgatgcttttctcttcctccttggaaaacagctgaagaaatcaggggagaaacccctgcttggtggaagcctgatggaatatgcaatcttgtctgccattgctgccatgaatgagccgaagacctgctctaccactgctctgaagaagtatgtcctagagaatcacccaggaaccaattctaactatcaaagtaagactcggttgtgtatatttaactgggattaggagaattttcttttgaaaaaaccgtggagggccaggcactgtggctcacgcctgtaatcccagcactttgggaggctgaggcgggtggatcacgaggtcgggagtttgagaccagtctggccaacatagtgaaaccccatctctactacaaatacaaaaaaattagcagggtgtagtggtgtgcatctgtagtcccagctactcgggaggctgaggcaggagaaacgcatgaacccaggaggtggaggttgcagtgagccgagattgcaccattgtactccaatccggacaatagttgcgagactatgtatcaaaaaaaaagaaaagaaaagaaaagaaaaaaaaatcatagagatcatgctattaatgtcaaagtattaactactgactgaaaaccaagagggaacagctttacaaatttcatatttacaaaaagaaaaacaaataatcaaaactgaattcttaatttaaagcatctgcttataagaagttgcttttactgtaaagatttttctgatatttattgtaatttagataaatctctaggttcaaagcaactctaaattatagtgtattttttcctacttttgaatgttcaccaaaaacatctaattttactttgaaacaaagccaggattttagagtacttactacttatattatttcttattaacctaagccccacaacagacaatactttatttcagtaaagtatatttactctaggaggtggtgatttgagatgagacaccctgccttatcagcattatcgtgtggattggtgagactgggtgacttctcaatgaactattagaagaggcacaatgttgtagggtgagggatatggaaattaagtaacagaagaagacaatccagaatatattattgtaattaaaaggtaattttgaagtctttttttttttttagacggagtctcgctgtgttgcccaggctggggggcgcagtggtgcgatcttggctcactgcaagctccgcctcccctgggttcacgccattctcctacctccaccccctgagtagctgggactacaggcacctgccaccacccctggctaatttttttgtttttgtattatttgtttttagtagagacagggtttcaccgtattagccaagatgatctcaatctccttacctcgtgatctgccggcctcggcctcccaaagtgctgggattacaggcgtgagccgccacgcccggcctatttctatatgccagatgttttaagagaagatgaatttggttaacaagcctttcagtttcactgatatttgcagctgttttttggatactgaatcaccataaaatatattttggatatgtctctgtaagaaagatgagaatgaaggacttcaggaaccatgatattgttttgttactgtttactgatttatgaataattagttctgttcatctttataagagattctcctagatgattatcaatacctataggtacacaatagatgtttaagtgaatggaaataattaaatacttagttttaggtctgctgtttatgtgctaccttagagcaagtcacttaactactttgagctcaagtcacttaaccactctgggctttttttttttccctgtgaaataaggtatttgactcaatggtctctaatgtgtcttttcattataactcttgccaggtatggtggctcatgcctggagtcccagcagtctgggaagccaaggtgggagtattgcttgagcccaggagtttgagaccagcctgggcaacatagtgagactttgtctctatattttgcaaaattttaaaatatagatatatgtatgtatgtatgtatataatttaactcttgccaaacttatgggcaataagtaaatgtttaattaaatacctttgaacacataggattcacttagtgtatgtcaattaccgtatgtgacaggatattaaattgatgggcatctgtttgtggttgagggaattatctaatctgaataactagataactttcatttctgaattttttttttcagtgcatttgctgaaaaaaaccctgcagaaatgcgaaaagaatgggtggatggaacagatctctgggaaagggttcagtggcaccttccagctctgttttccctattatcccaggtaagtacttagcctataatagatcactgtaaatttatagtctaagttacacactcagtttaatttattttacccttattactgttttagtgaactggaaatacagtcgtcctttgttacatataggggattggttacagaactgcccgcatacccaaatgcgcatgtactcagccctgtggaatccatgtatctgaaaagtctgtcctctttgtatgcaggcttcgcatcctgtggatgttgtatttctgatctgtgtctggttgaaaaaaaaaagtccacatataaagtgggctaatgcgttgccaacctgtgttgttcaagggacaactgtatttgaaaataaagatgacttttaaggcagtattattttggagtaaaaggttttgtataaaaatagtgattttagccaggcataagattatttgagatcctcggatggtcattttgatgttcattccttctttatcaagtaaatgataatgacagattcttagaggattatgtataagtttttgtttttgttttttgagacagggtctcactctatcgcccaggctggagcagtggtataatctcggctcactgcaatctccgcctcctgggctcaagtgatcctcccacctcaatatcccacgtagctgggactacaggtgcgcgccaccacacccagctaatttttgtgttttttgtagagatgggggtcttaccatattatctaggctggccttgaactcctggctcaagcagtcctctcgcctcagcctcccaaagtgatgggattatatgcataagttttaattgtccaataccaagtggggagaacattgactgttttcaagaatcttaactctacctccatactgtagagacaggaacacttatctgaaaatttgtttcttgcaaataccttatttattctttgaaacaaaaaaatatattgatcacctcctgtggtccaagcattgtttcatgcactgggtttaaagccttttgatttccagtaaagtacataacatataccactaagaccctgttttagcaagactattgtgtaactttcttatattattatttctgtacaaacataagtgttacttggcttaatacatattatataaatttttcgaacattaaacattaaatttaattcccaaagtcacacacacacaaaatgttacattctgccaggtgtggtgggatgcacctgtagtcctaactacttgggaaggtgaggtgggaggatcccttgagcctaggagtttgattccagcctgggcagcatagcaagaccctgtgtctgaaaaaggcaagaaacacacacacacacacacacacacacacacacacacacacatatatgtatgtatgttatcatttaaggatatgttaatcaaaggaatcaaggttcataccaccaaggacaaaaaagagtttaggagatccttgccgaatacctttgaagctttgaacagatttaggcctttgaggtctttttttttaagacttggaggtcttttgccagtattatgaggctgaagtgtgtattccatgcagactgttcattgctgtgtactcattggctaatacagtgccagatacatattaggagtttaagtaattgtttactaaataaatgactatggattaattttattaaatagtgggtatagaattaggtatggtgcaggacttttatagatttggcataactttatatgtatgttcaaaatacggtaaattgtaacctgatacgtgtaacctagcttgacatttttgggaagggtgggaagaagtgggatatgtccaggtaagagcatctaggttcacattatttttcttgttttatatgggacttgtgttttaatctaatttttccccgtatagcccaggagttctgtttccgaagaaagagccagatgattctagagatgaggatgaagatgaagatgagtcatcagaagaagactctgaggatgaagagccgccacctaagagaaggtgtggacatgtgaaaaccccttgtggggaggacactaaatacctcagagctgaaaaatagtgctataggaggggctaaagctaaaaagcatttcagaaactcaggatccttctcaagttctttatataaatttggattgatcttctcctttgaaaatcaagggctccagacttttagggcaagcctgtgtgtatccatagtttagttattcaaagaaaaataattacatatttccctaggaacaacgtcatgaaattgtgtctagacttcatgaattggttgaatttttatacaattttagtaaaatctctagtaaaaaattgtcacattcctattcttaacgtaagtgaccacttcatatgccgtttctctttagaaagcatctggttgtcccaacaaaacgaatctcttaagtactaaatgacggcctttgctctttggttctcacaggttgcagaagaaaaccccagccaagtccccagggaaggccgcatctgtgaagcagagagggtccaaacctgcacctaaagtctcagctgcccagcgggggaaagctaggcccttgcctaagaaagcacctcctaaggccaaaacgcctgccaagaagaccagaccctcatccacagtcatcaagaaacctagtggtggctcctcaaagaagcctgcaaccagtgcaagaaaggaagtaaaattgccgggcaagggcaaatccaccatgaagaagtctttcagagtgaaaaagtaaattttataggaaaaaagggtatcatgatgaaattcaaaatcttattttctaaggtcagtgtgcatttgtttagttttgatgcttttcaaattacattattttcctcccctatgaacattgtggggagggactctaaataaaccagtttaggcatttgctagctttaggtgcttttattggtgcctgcccttttccttgttcattttaatttctgcaataatcctggactttcctaaactatgtaatgtatacttgtcctttttctctgcctcccccaaccccctgttgtttttatggtcagctttgccttttttttttcttccaattttatctaaacagttgcagagatttttatatttgtagaaagcatcaagaacggtatgccagtcaggtcctggaagtaaaatggaggcacaatatagcactgactgagttgtaaagcctcctgcctggagacttcagttatagctgtaataattaatcttatttataaaagccactccactaaccttttctctccaactgtaaacacagagacagctttgggaataagccaaaaacagggtgatctcattagattttgaagatatatgactcctttgggctacatttcatattgatcaatttctaggtatttttcactggcccaaagtattgcattcccttaacagcaagcacaagttctctatatcacttgttttttgttgttgttgttgttgtcgtcgttgttttgagacggagtcttgctcaggtgccccggagtgcagtggtgcaatctcagctcactgcaacctccacctcctgggttcaagcaattctcctgcttcagcctcccgagtagctgggattacaggtgtgtaccaccacgcctggcaatttttttgtatttttagtagagatggggtttcgccgtgttggtcaggctggtctcgaactcctgacctcaggtgatccgcctgcctcggcctcccaaagtgctgggattacaggagtgagccactgtgcctggcctatcccacttggtttttgactgaaggggaagtgtagaaatatattgatttgtgatttctggtgtcacctgtgttaccaaaaatcaaaacaaatcttttttattttttattattattattatttttgagacagagtctcgctctgtcgcccagtgtggagtgcagtggtgtgatcttggctcactgcaaactccgcctcccaggttcaagcgattctcccacctcagcctcctgagttgggtcctacaggcgcacacgaccacgcccagctaattttttgtatttttagtagagttggggtttcaccatgttagccaggatggtctcgatctcctgacctcgtgatccactcacctcagcctcccaaaatcctggggttacagatgtgagctaccactcacggcccaaatcttcttgatcatatgtttaaatatattttttaatatttggagcatgagttgtcacttcttgtttgccttttttataaggaaatgttggagagttacatcattgctaatgtagaaatgttaagtggaaaaatatacagtttggtaaaataaactagattctacatttatttgtgggtttttttcccctcctttctttccacagcacttttgatatcaagcaagtggcttcctttttgagatattaaaaaaaaaaagaaaaggaaaaaagtaaatgaagcccaactacctaaccctttcttatttgtatttgttttagtattgtgaagttgtgttaaatagtactagctagaaatacaaatttctggttatcatttctcttccctgtggcacttgacattttaattgtcttaaagtttttgaagtacatcttctggccccttgagtactgccagaggcaaaagatgtttgtttcttattcattccacttttgtctcctgggatcccttctgtagcctaaagtatggctgggaaatggacttgagaagattggcttgaattagatcataatcatgtgtgatcccatcatgaattcattggaatttgtgttgcatgtaaggcaatctttcctgttgtaaatcttccttttttaatgtacatatattttgaaaaatatgaataaacatgaaattttaaaagct

SEQ ID NO: 15613 - DNA, 32324 bp, Homo sapiens
tttttttttttttttgagatggagtcttactctgtcacccaggttggagtgtggagtgcagtggcgcgatctgggctcactgcaacctccacctcccaggttcaagcgattctcctgcctcaacctgccaagtagctgggactacaggcgtgcacctccacacctagctaatttttgtattttcaggagagacgggggtttcaccatgttggccaggatggtctcaatcttttgaccttgtgatccgcccaccttggcctcccaaagtgctgggattacaggcatgagtcaccgcgcccagccaatatgctatatttttgtatgactggcagcactgtaggtttgtttacaccaatgtcaccacaaacaagtgagtaacgtgctgcgctgtgatattaccacagctatcatgttaaccaggtaataggaggttttcagttccattataatcttaagggaccaccattgtatatgtggtctgttgaccaaatattgttacacagcacatgaccataaaagaataacttagtaataactataccttctagctataatcttcagggtattctttatctgagtttcataagtatagctaaggtctgtggaatttatagcaactatcgtgtgtgggtgtgggtgtgtttgtgtgtgtgtgtgtgtgtttaatggagatggcgtctcactatgttggctaggttgggcttgaactcctggcctcaagctgtcctccctcctcagcctcctaaattgctgggattacaggcatgagccactgcacccagcctatcgtctgttgttaaatgttctaatgcacctattaggtgcacagagtactgttatatactcagaataaaatttacataatgctttaaatctcacaaaattgttttgataaacatactcttataattcttgcaacaccttgggaaatagttggttctatattactgttttatagctgaggagaaagactcacatcatttactaagatcatatagctagctagtaaatgtttgagtgaaaatacaaacaaaggttttctgactttaagagcttgagttttttccactataccatattgcatctgttgtaattgttaactaatgtgcattttaaaattctcatttgtcttatgtactgagcccttataccagtgctaatttatgtgactcctttctcctgcagctaagagaaaaatacctttttaattcatttatagtacccagtttttaaagaagatttattttgtaaaattttgcttatggtacatgtcatcttagcctgtaaataaattaaagcattaatttttatccctccctggtcttttcctccttctgactttatacgtctttctagagagcttatcttctataataacaattctttgttttaaagtgagaaagatcagtctaaagaaaaggagaagaaagtgaaaaaaacaattccttcctgggctaccctttctgccagccagctagccagggcccagaaacaaacaccgatggcttcttccccacgtcccaagatggatgcaatcttaactgaggccattaaggcaagtttttatttcaagcaattcatcttagatttattatgttcatttttttcttatttgaaaatggcatatatctgtctagacatcataaatcttgttctgcttcctaaaggagttttaaagagaggaaagtcattataagttcatgtttttctaatataatcacatttggtgaacactgttaatttttttaaaaaaattatatttaatatagcaaatattttaactttagaatttttaaatgcagtttatcgattaagtacagtttttatttgaaggctgaaaatgttaattcattgaacaaacatttaaggactaccttcctctgttgggcgcccctgctagtggtgaattaactaaggctagcaaagtccttgcccttataaatctaattgtgactcagtaactgaaaaatattgagaatttttgtttaaaaaatatctctaggttcatttctaaagctaagtgatcttggtagtggttatctttcacacctgaaccctgttaataaacactgctttattacctagacattccaaaatgcttacaaaaattatcctccttacatagatttatgatttcattgactttcattagatgtagttttcctattttaatttttaaaggttatcttctaatttgacattgcctttattgtataagtcttttcatttaattttgccttgtttagttcatatgatcagatgataagaggagttagaacagacccatctttcagggaccctgttgttaggatctgaggcaggactggggagacagggatacagatgattttaaccagaaaaggggggatgtgtacgaaaaggagcagcctggttgtcattctcagaatatgagaagatagcactaacacataaactggaaaaagggtttgccttcagacttctccctttactccttcaagacttcttatgctctcacctcattaagaaaactttattggtctagattacctcactgtagtgaaatctctgttctttgtatagcctttcttcaaggatttcacttgatgaccactcagcctgggtttgaaggagcagcatcatagtgaggatggaaaaagggctgaaactttaaaatagtgaaataaaaaattaaaacaatatcaatttggcttaaagaatggtttgaatataattgtgcatatttatggagatgattgattttatatagataatgtgtattccatgcaatatgacaaattattgtttcagaccatggataccattttctgtattgaacaggaatcatgatgtctactaccatctcactgtcggattggtggagcaaaagattatttgtttcagcattagtgttcttttctgcttgattttctttgctctgtgttttcttttaagatcaggagtaaacctcagtaggtcattaatagttcagagacatagacttgaattacatgacccatattaatacaacttgtttcgtgttgtgcaatcttttctggaccatctacctgtgagttatttttctttgttgtcaaaatgtataaaaacattcaacgaagttcttatccaatgagaatgaataagtgctacattgatttaatagacactgtggcagtacaaaattgatggactagctcattagataaatgacagatgctacttttgtgtgtttcaaaatttaaagtatttgatttcaagtcagtgaccagttggaaaacaaaattttaagcatttgaaaaaaattaagtatttgctgcctttgtgacataatgagctacttaattcttccaggtgcattagtcaaatggagtataagtaaaataggatggaaatggaagagggcacattaaattcaaatagaacaccttcactattacccaaaactctccttcagcactttgccatctgtaaacccatttttatgccacttattcagattatctttgattcttctttctgctgacattcatacagagccttcagggaaatgtcctggcatgctcattccttaagctcgtgccttaaaatgggacagatctgtgatcctgtaagtgataggtttgttctgcttttctcattttgatgccaaagattcatcttctaaatacagaatggaattaaaatggaaagaggttcttcattatacatagaatgttgttcgtgttcagtatggtctcttaggctgttttgaacaatttaaaattgtagtagaaatatttagtaattctgttacttctctgtagtcattatgaactgaagtcttctgaagttcattcttccctaccgtttttgtcatctatcatcaaattcacttccaaaataatttattttgaaaatatatgtcaggctctatctaataaaaaaaaacaactagtttaataaatcttttctaggcatgcttccagaagagtggtgcatcagtggttgctattcgaaaatacatcatccataagtatccttctctggagctggagagaaggggttatctccttaaacaagcactgaaaagagaattaaatagaggagtcatcaaacaggtattacacaattgttagtagtaagatcatttcattgtgtattagctttaagtctacagttagtaacatttaggctttttgtgccttttttgttaaaaataagtttcatgatgatgaaattccttaagtttaacctagttgaattatctgaggctaggtttcgaaaatgctggtgccattaagatagtgtaacttttttctagcttactttgctcttaattggatattttttggggggctgcttgtgcttgaaatcatgtagcactgaacatgaaaaagaggtaaggaatcctactactgaaacagcaaaaatgaggctagggatggtggcctacacctgtagtcccagcaccttgggaggcttagttgggaggatcacttgagcccaggagttcgagaccagcctgggcaacatagcaagaccccttctctacaaaaaatacaaaatcagcagggtttggtgacacatgcctctagtcccaggtacttggaaggcagaggcaggaggaccgcttgagcctgggaggttgaggctattgtgagttacgatctcaccactccagcctcggtgagagtgagaccctgtctgaaaacaaaaaggaataacagaaataataattgcccttgtcttaggtttgtttcctttaaagcctaacttacatgatagacttgttactattaatttttagcttcataaatgtgctcaccttaactgattagtatctaaactattaaagcctgttaagagtatcagagaaacccgagtgaaatgtgactagtactagaacaaatgttgatttcaggcataaatctactttatcttgcatagtgcatggaaacttagaaccatagaaatctaaagctagaataaactttatattatgttaccctcttcagaggtccagagtgatgaaataactgctaaggtcttacggtagtggcaaaaattttaaaaacctagttcaccccattcctagagtcttgttaagttttttctataccccctgcctgtttgatcagaacagaattctgtgccactcaggcatttcagctctgcttagggacttccaactagtacttaattgcacagatacgtcttgtctcctatgtgccagttgcctggaggtctgttagtgaataaaacagattgctgctctgtggagctaggagtccagctttctcaaaatgtaaaactgatatttaaatggcctttaaaattatcactgacggccaggcacagtggctcatacctgtacgctgaggtgggagggttgcttcaggccaggagtttgagaccagcctgggcaacatagcaaggtgaggccctgtctctacaaaaaaattatttctttattctattttattttactttttgagacaggatctcactctggcccaggctggggtgcagaggtgcaatgtcagctcaccgcactctctacctgctgggctccagccgtcttcccacctcagcctcccgagtacctgggactataggtgtgcaccagcacacccagctaatttttgtattctttgtagagacaaggttttgccatgttgcccaggctggtctcaagctcctgggcccaagtgattcacccacctcagcctcccaaagtgctgggattacagacgtgagccaccatgcccagcctttacaaaaaacttaaaaattagccaaatgtaggggtgcatgcctctagtcccaactcatgaggctgaggcaggaggatcgcttgagttgagctatgagctaacatagcaatgagctatgattgtgccactgcactccagcatgggtgacagagtgagaccctgtctctaaaataaaacaaaattatcgttgactaaaaagtcttacctagttaatataattattagagccaaggacctgttgtgtaacatgtcagcaaagcttatgagatggcttcatgttttagtttatgacctgctctagcctacatagcctgaccacccttggtttgatgcctaaacaactcttagtaggctaaaagcattccagcttgattgctgcattgatagcagtgtaggtaaaactaagctgtggaggactttagttattgtgaatcaactttttttttgagatggagtctcgctctgttacacaatggcatggtctcagctcactacaccctctgcctcccgtgttcaagcaattctcctgccttagtctcctgagtagctgggattacaggcgcccgctaccacacccagctaatttttgtatttttagtggagatggggttttaccacattggccaggctggtttcaaactcttgacctcaagtgatctgcccacctcggccttccaaaatgctgggattataggaatgaaccaccgtgcctggcctattgtgaatcaactttaaaattttatgaaagtgctttgtgaactggaaatatgtggtaaaacttaacataccattgtgtgcagtggctaaaaaattgtttgtttgttttttgagacggagtatcgctctgtcacccaggttggagtggagtggagcgatctcagctcactgcaagctctgcctcctgggttcacgccattctcctgcctcagcctcccgaatagctgggactacaggcacccgccaccacgcccggctaattttttgtatttttagtagagacggggtttcactgtgttagccaggatggtgtcgatctcctgacctcgtgattcgcccgcctcggcctcccaaagtgctgggattacaggcatgagccaccgcgcccagccaaaaaattgttggataacccttcccataaggaataatgtatcattggtaaactgtgggaagttacgtggtctgagactaattaggctctaaactttttccaaggtgcttttaagacagtgagggcttttcttatttccctaagagattgtgtcccttccttttttgggacatttttgttttgattttttatttcattttgaaagtttttaataaactgtttaacgtggtatcacagtagcattcttcccaaaattttgtagatgagaaaacaaaagctcagagggttaactgggttgtccagtattactcagcatcagctagatggtatataaaggagctttcatctgaagtcttttgactctgcattgactgtttttttttttttctctgaagaagtaaacaccactttacattagctcttgcattaccatggcctgtaatttccttagcctactgtaaagttatgaatactagaataacaaaaattaatttactttaggttaaaggaaaaggtgcttctggaagttttgttgtggttcagaaatcaagaaaaacacctcagaaatccagaaacagaaaggtaagacatctataccacagtttgagtgctgtggagctgttactgctactaaaaatagcaacattcattgagtgtttgctgtgtgcctggcactatgcaaggttcagcctttctgctaaggcctagggaagttataaataatttgttcctctagtgagtagaatagccaaggtgcagatccaagcagtccaacctggttaagcctgtgctcttaagtgccttatattaaattatgggcagctatataaattacactgttttttgttttgagatggagtcttgctctgttgcccatgctgtagtgcagtgacatgatctcagctagctgcaacctccgcctcctggattcaagcaattctcctgcctcagcctcctgagtagctgggattacaggcactcgccacagtgcctgactaattttttttgttagtagagacagggttttaccgtgttggccaggctggtcttgaactcttgacctcagtgatctgcccgcctctgcctcccaaagtgctgggatttacagggtgagccattgctcccagctgaattatactgctttttgtgaaatatcttttaaactagaggaggtataagagtcctctgtttttttgtttgtttgtttgtttgttttcttttctaagatagaatcttgctctattgcccgggctggagtgcagtggcacgatcttggctcactgcaacctctgcttcccggattcaagtgcttgtcctgcctcagcctccccagtagctgggactgctacaggcatgtgccaccgttcccagctaatgtttgtatttttagtagagatggagtttcactatgttggccaggctggcctccacctcctgacctcaggtgatctgcctgcctccgcctcccaacgtgctgggatgatagatgtgaaccacaccatgcccagcctaaaagtacatttttaccaaatactagacccaaaaacaatacccagatccaatttttcttcctgtttttgtaaatactaacattcttcttcccaacacatataatttcatttgtgtaaagtatttctacaataataaagtgaaatgtcttgtactcatttatatcagaaattgaaataatatttttctacaccttttttttttgttttacaactctgaagctttttatccttttttcatagacttttcaaacactttcaaaatgaactttatgcatttttttctggtgctgtacttcataaattaggacctttaaaatctacactcctttttacttttatgtgtgttttttgtgtgtgtgttttgagacggagtttcgctcttgttgctcaggctggagtgcaataatgcaatctcggatctctgcaacctccgccttccgggttcaagtgattctcctgcctcagcctcctgagtaaatgagattgcaggtgcatgccaccatgcctggctaattatgtatttttattagagacagagttttaccatgttggtcaggctggtctcaaacttgagacctcaggttatcagcccacctcagccccccaaagtgctgggattacagacgtgagccaccacacctggctcctttttcttgttttgttgtgttttttttgtttttttttttttttgagacggagtctcgttctgtcacccaggctggagtgcggtggctccatcttgcatcactgcaatctccacctcccgggttcaagcagttcttgtgcctcagccttccaagtatctgggattacaggctacgacgtctggctaatttttgtatttttagtagagaggaggttttgcaatgttggccaggctggtctttaactcctgacctcaggtgatctgcccacctcggcctcccaaagtgctgggattacaggtgtgagccaccacacccagcttttatatgtatttttaatgctgtccattgaaaattttatatcaaagaaattgccataaaattgacaaatttggtaatcaactgaggaaagcccttgagttgtatgtagaaacatttacgttctataatgatcataatttttgataattacttttcagaataggagctctgcagtggatccagaaccacaagtaaaattggaggatgtcctcccactggcctttactcgcctttgtgaacctaaagaagcttcctacagtctcatcaggaaatatgtgtctcagtattatcctaagcttagagtggacatcaggtatgagccattggcctggcctttaaaacatgatgtgttacttcctttagctcccttttcatgggaaaagagatagattaaatactgaggaaggattactttcagctaaaaataaatcttttttattggttttatttttttgccccattatgtttttattttcatatctccatgtataattttttttttttttttttttttagttttttgagacagatttgttcttgtcacccaggctggagtgcagtggcaccatctcaactcactgcagcctctgcctcccgggttcaaaggattctcctgcctccgcctcccgggtagctgcgcctacaggcacccgccacgacacccagctaatttttgtatttttagtagagccaaggtttcatcatgttggccaggctggtctcgaactcttgaactcaagtgatccacctgcctcggcctcccaaagtgctaggattacaggcgtgagccgctgtggccagcctttttttttttgagatgaagtcttgctcttgttacccaggctggagtgcaatagcgcagtctcagctcactgcagcctctaactcccgggttcaagcgattttcctgccacagcctccgaatagctgggattacaggccccggttaccgtgcctggcctagttttgttttttgtgtggtttttttttttttttttccaaacccaaatcttatctttctttgtaagatcctggtagagtaactcttttaaatgttgtcagctgttaagatatgtagtattgaactgtgtatcttctcagatatgaaatatcttaacagttgacaacattaaaagagttactctaccaggtttaaaagaaaaaaaacaaaaaaaaaactaggctggctgtggtggtgggcatgtgcagtctcagctactcaggaggctgaggcaggagaatcgcttgaacccaggaggtggagttcgcagtgagccgagattgcgccattgcactccagcctgggcaccaagagcaaaactccgtctcaaaaaaaaaaccataagagtaaaaaggagtgtagactttaagggtcctaatttattcttagcctttaataactaaataatgaagtacagcaccagaaagtaatacataaagttcattttgaaaatgtttgaaaagtctgtgaaaaaaaggatagaaagcttcagggttgtaagaaaaaaaagtgtagaaaatactatttcaatttctgatataaatgagtacaagacatttcattttattatagaaatactttacacaaatgaaattatatgtgttgggaagaagaatgttagtatttacaaaaacaggaagaaaaattgcatctgggtatagtttttgagtctagtattgggttaaaatgtacttttaggctgggcacggtggctcacgcctgtaatcctagcactccagcctgggtgacagagtgagactcagtctcaaaaaacatatatatgatagatatatgcatacatatgtacatacatatacatcatatatatatttcatgagaattcaggcttcaataacacctgtacatagaaatagcataatgtttccatcatttaaacatgcagcataaaattctgagataattttgttagtaattgatacgtaaaatttgccatttaacgtcttgacagatcatttagattgtcacatttgctcagttgtagattcatgcagatatatcaatttgtttaaatttgtaattcacagactctgagagtgtttgtgtgagatgacttctagaaaattatgtttaatccagatttctgtctacagaagactaccatattgaatgcacattgtcccgatacagtgtagtaccagtatttacttgcattactgaggcatgcaattagaagtgctgaggtttcagtccagaagccacattttcagaaaatcagtagtggtcatcagaatgccaaattaaagagctagtgaaatagtgcaaaagaaaagggaattatagaagcagaaagttctaaattaatgtgctgatattttcatgcttcttatatgctgagtatagtggtagtaggcagacacaattgtggatcaaaaatgcgttatatgatgcatttaaagatggaaacatatttcactattctttaacaaagaataaagtttatttggctcatggtactgcaggctgtacaagaagcatagtgcaggcgtctgcttctagtgagggcttcaggaaacttacaatcatggtggaaggaggagctatcgtatcacatggcaaaaaagggagcaagagaggagggaaaggtgccacactcttaaccagatctcacactcttaaaacaaccagttgttttaaacaacccgctcattacggccaggaaggcacgaagccattcacgaagccatccctataactcagacacctcccactaggccccacctgcaacactggggatcatatttcacttttatctcctttgtgtgaccccaaaatatctgagacaggtctcagtcaatttagaaagtttattttgccaaggttaagattgtgcccgtgacacagcctcaggaggttctgaaaacttgtgcccagggtggtctgggcacagcttggttttacacattttagggaaacatgagacattaatatatgtaaggtgtatgttggtttggtctggaaaggtgggacaactcaaatcagggagggggcttctaggtcataggtaaataaaagacaaagaatttcattatttttgagtttctgattagctttttcaaaggaggcaatcagatatgcatttatctcagcagatgaatgacttgaagttctgtctgtcgtttgtctgcaaggattttccttgtgattaggggattcgtgattagggtttgtgattaggggatcccaagatttattttcttttcacagcctttattctctgctttttggtgagtggagaccatatcttcccccatttttttttcttgtagttctactctacttacataaggtagtgtgttgctaccagtgtgcctttgctgcacttcttttgaaacatattgtcatgaccttaggctgaaacaaaatttacctgataatggatgggttgtcaacccaaaggtgctaatgaacctgaagaccttttctcatggcctttttaatggtaattttttccattgaaacttttttctcttatgtgaaaccatattgattttctctaattcttgattataatggagtcctttcatatacacatttaacttgaaaattcagccattcttgcttggccaaacaaaagaggaagaaaaatacagtttcaccaaagtgtaagttgtctatactggtatctacaatgtctccccttccactttctccactttagtcagactttatccccaccactttacctgaatattttctgtcagtctccacgttggaaatttcagtggtcaattcatagtccttaccagctgccctctcaatggcatttgacacagttgatgactcctacctgcttgaaacattttcttcacttgccttccaggacaccacactttcctgatttttctgtaacctttttacccttcgtttctcaatctcctaaggatttctgctttacctcttaatagaaaggagccctcagggttataccttaggcctctcatcttttatgtccacattcacttggtgattcctttcacttgcaaaactgtaaataccagctataaactattaattcacaaatgtatgaatctagcccatacctcccttctaacttcagattcgtgtatacggatgcctgttcagcatcagcacttggatgtctgatttaaatgttgaaaacatttaatgatccccactctgctccctctccccccaaaaatccctgcatttcccacattatcttcatttcagttcatgacaatattatccttccatgtgctgaaaccaaaaaccctgactttgtgctggtctcttctctttatcagacacctttatctaatctataagcaattatttttgctctgtctttaaaatatatcagtaaacaggctgggtactgtggctcatgcctgtaatcccagcactttgggaggcaggtggatcacatgaggtcaggagttcgagaccagcctggccaacatggtgaaaccccatctctactaaaaatacaaaaaaattagccatgcatggtggcacgtgcctgtagttccagctactcaagaggccaaggcaagagaatcacttaaacctgggaggcatagtctgcagtgagccaagatcacaccactgcactccagcctgggcgacagagtgaggctccgtctccaaataaataaataaaataaaatatatcagtaaacagactacttgtcatcacctgcactaccattctcttccaggccaccatcatctctcacctgtattagagcaataacttcttaactgcttttttcatgctccctttcagtatgttcttaccatcatagtgagagtgagacttttttaaaaatgtaagttctatcactttttaaaatttatttatttatttatttgagaaggaatcttgttctgttgcccaggctggagtgcagtggcatgatctcggctcactgcaacctccgcctcctcggttcaagcgattttcctgtctcagcctcccgagtagctgggattacaggctgtgccaccacacccgggtaatttttgtatttttagtagagacagagtttcaccatgttggccaggctggtctcaaattcctggcctccagtgatctgaccgccttggcctaccaaaggattacagacgtgagccactgtgcccagcctgtcacttttttttttttccaagctggggtcttgctctgttgcccagactggagtatagtggcaagatcgtggctcatggcaacctcgaactcctaggctcaaacgatcctcccactgtggcctcaaaagtagctgggactgcaggaatgtgtcaccacacacagctagtagtttttaaattgttaatagagacagaatctccctacattgcccagactggtctttaactcctggcctcaagtgatcctcctgcttcggccacccaggtgttgggattacaggtgtgagccactgtgtccagtgtcatgtcgcctttctactcaaacattcagtgtcttcccaatcccgtcacagttaaaaaatcagtctgtagggctgggtgtggtggctcacgtctgtaatcccagcactttgggagtctgaggcgggtggatcacaaggtcaagagttggagaccttcctggccaacatggtgaaaccccatctctactaagcatacaaaaattagccgggcatggtggcacatgcctgtaatcccagctactcaggaggctgaggcaggagaattgcttgaacccaggaggcagaggttgcagtgagccgagattgtgccactgcactccagcctgggcgacagagcaagactctgtctcggggcaaaaaaaaaaaaaaaaaaaaatcggtctttaaaatggcccacaaggcactacactcacttgtatctctgacctaagctactcctcttcactctctcactggtctcagagcctttgtgttgcattccctttacctgaatgtatttttccccataagccactttgccagttcctttacttccttaagtttttagtctgatgtcatcaccaaaggcctgccttgactatttttattattcttgttacttgggcatataaacaagagaaatgtatttctcacagttgtgcagactcgaagtctgagatcagggtgccagcatggttgggttctgtgagggcctcttctgggtgtcagagtgccttcttctcattgtatcctcacatgacagaaggagcccttaatactttcttaaatgttttattttggaaattttcaaacatatacaaagaaggatagagaacattaaccatcatacttaaatcattcttttttttgtttggagacagagttttgctcttgttgcccaggctggagtgcaatggcacgatcttggctcaccgcaacctccgtctcctgggttcaagcaattcttctgcctcatcagcctcccaagtagctgggattacaggcatgcgccaccacacctgactaattttgtatttttagtacaaatggggtttctccatgttggtcaagctggtgtcaaactcccaacctcaggtgatctgccggcctcggccccccagagttctgggattacaggtgtgagccacctcgcccggccacttaaatcattcttaacaaaattaataatttcttagtattatctagtacccagtccatgttcaaatgtccttaattgtctccagaatgatattttacagttgtttttcctaacatggcccacacgttgtatttggttgataatgaccaaccaaaacctctctcccagccaggtgctgcggttcacatgtgtaatcccagcactttgggaggccgaagcgggaggatcgcttgaacctacaagttcgagaccaggctgggcaacatagtggaaccccctctgtacaaaaaaaaaataacaaaaattagctggtgtagtggcatgtgcctatagtcccaactactcgggaggctgaagcagcggaagggttgcttgagcctgggagatcaaggctacagtgagccatggtcataccactgcactccatccagagtgacacagtgagatcctctctcagaaaaaaaaaaaaaaaaggccaggtgtggtggctcacacctgtaatcccagcactttgggaggctgaggcgggcagatcatgaggtcggaagatcaagaccatccttgctaacacagtgaaaccccgtctttactaaaagtacaaaaaattagccgggcgtggtggcacgcgcctgtagtcccagctacttaggaggctgaggcaggagaatcacttgaacctgagggggcggaggttgcagtgacctgagatcgcgccactgcactccagcctgggtgacagagggagaatgcgtctcaaaaaaaaaaaggagtgtttaacccatagggtttaagtctcttagtatgtgcgaagcacttcttagaatagtccttggtacctagtaaatgttcaactaatgttattcttactagtctcagttccagcttctcatagtatgaccattacagcatgctaaataggattctaatatttaaagacataatttttttgttttgttttttattttttatttttgagacagagtcttgctccgttgcctaggttggattgcaatggcatggtctcagctcactgcaacctccgcctcccgggttcaaatgattctcctgcttcagcctcctgagtagctgggactacagttgcctgacaccacgccccgttaatttttttgtatttttagtagagctgaggtttcactatgttggccaggctggtctcgaactcctgatctcgtgatccacccgcctcggcctcccaaagtattgggattacaagcgtgagccaccgcgcctggccaagacattggtttttaatataacatgcaagtcaccttcttaatttgataacagtgatttttttgcaaccctagaagaagaactgggcatattgggtatatagagactcagagttggccttgaagaaggtgtctttggaaattttctaggtctgtcatacagcgttagaagtcaaatgttaaaatctaatcttcagccaggcgtggtgcctcatacctgtaatcccagcactttgggaggccgagtcaggcagatcacctgaggtcgggagttcgagaccagcctgaccaatatggagaaaccccgtctctactaaaaatgcaaaattagccgggtgtggtggcgcatgcctgttatcccagctactcgggaggctgaggcaggagaattgcttgaacctgggaagtgaaggttgcagtgagccaatatcgtgccattgcactccagcctgggcaacaagggcaaaactccacctcaaaaaaaaaaaaaaaataataataataatagtaatcagaactctagatctgggaataaccctgtatctatttctttacatttttctttcattaatgtatttatcactattttttttttgtttttctttgcaggcctcagctgttgaagaacgctctgcagagagcagtagagaggggccagttagaacagataactggcaaaggtgcttcggggacattccaggttagagatcagaggcctggttgtggagaagtgcttcttaaagtttttggtttcaggacctccttatactgtaaaaatttattgaggacctcaaagaacttttgtttatgtgggttatatctgtcaacatttactatgttagaaattaacattgaggtctgggtgcggtggctcacacctgtaatcccagcactttgggaggctaaggcaggtggatcacctgcggttgggagttcgagaccagcctggtgaaaccctgtcgtctccactaaaaatacaaaaatgagctgggcgtgggggcacatgcctgtggtcccaactacttgggaggctgaggcaggagaatcacttgaacgcgggaggtggaggttgcattgagccaagattgcaccactgtgctctaggctaggtgacagagcgagatgccatctcaaacaaacaaaaaaacacaaagaaattaacactgaggaaaaatttaaatatttattgatttactttaaaatactagtagaaaacccattacatattaacataaatgacatattttttagtgaaaaatagctgtcctccccctgccacctcccggccttttttttgagacagtgtttctctctgtttcccaggctggagtgcagtggcacaatcacagctcactgtagcctctatctcccaggttcaaggggtcctccagcgtcagcctcccaaagtgctgggattgtaggtgtgagcctataatccgtcttccccaattttttttttttaatgagaagtcgtcaggcactgtttacatttttgcaaacatctttaacatctagcataacagaagacagctagtatctgttccagtttattttgggttacttatttgaagaaaatctaaccttacacagaaatacaattagaaaaggatggaatattttaagataactttgagatagttgtagaaattattctttgatactacaccaaaactcaacaaatcgttatttttttaacagctttattgaggttgatttgcataccttatacaatttaatttatataattacagtttataactcagtgattttcagtaactttatagaattgtacaactatcacagtccaattttcggacatttctgtcacccaaaaaagatcccttgtagccatttgcagtcactccctattccaccagcagcctcaggcaacctctagtctgttctgtctctctgcagatttgcattttgttcacatttcatatggatagaatctagaatcatgtactatatgatcttttgtgtctggcttcttttggcatgatgtttttgaattttatccacgttgcagcatgtaccagtgctttcattcttttttattgtccaatagtatttcattctatggatgtcacattttgtttatccattcatgagatgatgatggacatttggattatttctacttttcagctaattatgaataatactgcctatgaacatttatgttcaagtctgcgtggatatgtttttaggacttgctgggccatatggtaaatttatgttctaagaaactggcagtgtttataagggctcaagtcgttttgttttgttttgagatagggtctcactctgtcacccaggctagagtgcagtggtgtgatcttggctcactgcaacctccacctccctggctcaagcaatcctcccatcttagcctccctaatagctgggattataggcgtgcaccaccaccatgcctgattaatttttgtattttttgtagaaatggggtttcgccgtgttgcccaggctactcttgaactcctgggttcagtgaagtagtctgcctgcctcagcttcccaaagtgttggaattacaggtgtgatccaccacacctgaccagggctcgagtttctccatatcctcctcaacgtttgttactcttttttattatagccatactagtggatatagggtatctcgttgtagttttgattggcatttccctaataattactgatgttgagcatctcttgtgcttaaggccatttgtttattgtctgtagtgaaatgtttattcaaatcttttgcccatttttaaaagggggttggttattcgttaacaagaattcattactctagacataaagtctcatcagattttttctcctattctgtgactttctcagtagtatcttttgaagcgtttactttttgatgaagtcctatttatcatttttaaaaattgcttttgcagttttatggttatctaagaaacattgcctaattaaaggtaatgaaaatttactcgtacgttttaagagttttataattttggctcctacatttaggtctgtgatctatattgttttgtttatagtgagaggtaagggtataatttatctttttgcatgtgggtgtgtgattattccagcaccttttattgaaaagactgtcccttccctattgaattgccgtagcatcttatgaaaatcaattgaccataaatataagggtttatttccggattctgagttctcttttgttctgtaggtgtatccttcatgctaatactgcactgtcttactgactgtagctttatagtgaattttgaaatttggaattataagccctctaactttttcaggaatgttttgactatgccgggtcctgtacagttccatacaaattgtccatttctgccaaaaaaaaaaaaccaaaaaaacagctggagttttggtaggaattgccttgaacctatagatcaatttggggagactcactgtcaacaacgttgagttttccaatccatgacacagaggtctctttatttaatttctctcagcagtgttttgtagttgttcggtgtacgagtcttgaattttttttgttaaatttattgccaagtattttattctttttccatgctgtcttgaatggtggaagtgttttctaattttcgttttcaggttgttaacgctaacctgtagaaatacaatcgatttgtccattgctcttgtatccttcgcccttgctgaactcaccagttgtagtagtttctttgtgaattccttacagttttctacatacaggatctgttatctgcaaataaagagcattttacttctttgtttctagtctggatgtcttttacttcttctgattgcctgattgctctagattaacctccattacagtgttgagtagaagtggtaacagcagacatcttcgccttgttccacatcctggagagaaagcattcagtccttcacaagttagctataggtttttcatagatgcctattgtcaggttgagcaagttcccttctatatatactactagtttcctgggagtttttatcatgaatggctattggatttgtcaagtggtttttcagtgtctgttgagatgattgtgtggtttgtgtcctttgttcgtgtggtctgttaacattatttgttttgtggtaaattctttaaagtttagttgccatgtgaaacctgaaaccctaatcagtgaatttcttggactgtgttaccttaaaattcattgaactttgaataggtattttaatccttcataattttgtagcacgatacattggtcatttgaaaaatagtggcacagagttacatagattttccaaatgttggcatttcattatatacgacaacaaaaattacaatcattggtgttggccactgatcttataagaacagtatttaagtattgggaagataacagactcacagtgatggacacaagtttttcaggatttaaattttctcttgaaaggttgaattttatcattggcaacaaatactattatttttttacatgacaggctcttttagttcatttgcaagatactgtctacctcataaccaagtctgaataatgataggttagctgtcagttatttctttaagtaaaaaagtattacaggtcaggcgcggtggctcatgcctgtaatcccagcactttggggaggccgaggtgggcgaatcacgaggtcaggagatccagaccatcctggctaacatggtgaaacccaatctctagtaaaaatacaagaaattagccgggcatggtggcacatgcctgcaatcccagctactcgggaggctgaggcaggagaatcccttgaacccaggaggcagaggttgcagtaagccaagatcacgccactgcactccagcctgggtgacagaatgagactccgtctcaaaaaaaaaaaacgtgttccaagaaaaatgcagctaattcagctcataactttaacaattacacaagtgcttttcctggataccatcatgtctacatatgtagcagatacggattatgtggttcttcctgtttcatcccataaaatattctaaagacattcaaaagttgagatttaataaaataatttttagtactttatcaagggcattctaagtgaattcgtgctcttttttttaaaccataagtacatagcagtaaagaagacaataaccacatttttgtgtctctgcctttatctgtggtaagctgacagcagttttacccaccattgcttctgcaccatcagtgcaaatgtcaaaatagtgaaaaggccaggtgcagtggctcacacctgtaatcctagcaatttgggatgctgaggcgggtggtttacctggtcaggagtttgaggccagcctggccaacatggtgaaaccccatctctactgaaaatacaaaaattagccaggtgtggtgggcgcctgtagtcccagctactcgggaggtagacgcaggagaatcgctggaatccgggaggcggaggttgcagtgagccgagaccgcgccattacactccagcctgggcaacacagcgaaactctgtctccaaaaaaaaaaagacagtgaaaaagcaaatcgcatcttaggtttttgtttgtttgttttttgagatggagtcttgttgcagtgagtacagtggcttgatctcggcttactgcaacctccacctcccgggttcaagcgattctcctgccccagccttgcccaagtagctgggattacaggcatgcaccaccatgcccggctaatttttgtatttttagtagagatggggtttcaccatgttggccaggctggtcttgagctcctgacctcagctgatccacccgcctcagcctcccaaagtgctgggattacaggcatgagccactgcgtctggcatatcttagttttattatgcaaatagttttgaccttgcagatcctctgaaagggtctcaggaacccagacaattgtaaccagaccattctttaagaaccactaaacagttttgtagagcatttctggttttctccttttccctttttgcatattatttgctaacctttgttaccacacctttcattttcaaagtatgctatgtaattttcttttgtatgatacttttttttttttttagtttattatttatttttagagacagagtcttggtctgtcactcaggctggagtatagtgatgtaatcatagctcactaatagcctcaacttcctgggcttaagccatcctcccccctcaccctttcatgtaggtaggctacaggcatgccgccattcatagctagtttttttatttttagtagagagagagtctcactatgttgccgaggttggtcttgaactcttggcctcaagcagtcctcccccattagcctcccaaagtactgggattacagatatgaactaccgtgctccctgataccctaaatatttatcaaaatttttcactgctattttcctcataggattaaaagggctatttattattttttataactacagctgacccttgaacaacataggggttaaaggtgcagatcccccgtgcagtaaaaaaaaaaaatcataaaaaactttagattcccagaaaacttgactattaatagcctactgttgaccggaagccttacaaacagttaatacacattttgtatgttgtatgtattatataatgtactcttataataaagcaagctagagaaaagaaaatgttattgagaaaatcttaagaaagaggaaataatggccggccacagtgggtcacacctataatcccagcacgtcaggaggccgaggcaggcagatctcctgaggtctggagttcgagactagcctggccaacatggtgaaaccgtgtctctactaaaaataaaaaattagcgagacctggtggtgggcgcctgtaatcccagctactcgggaagttgaggcaggagaattgcttaaacccaggagaccgaggttgcagtgagctgaaaccacgtcattgcaatccagcctgggcaacagagcgagactctgtctcaaaaaaaaaaaaaaaaaaagagagaaaatatatttattgttcattaagtggaagtggatgatcgtacatgtctttatccttgtcatctttgagttgagtaggctgaggaggacaaggaggtgttggtcttgctgtcttggggtggcgggcagaggcagaagaaaatccacatataagtggaccagcacagataaaattgtgttgtgttcaagggtcagctatacttcatttttcagattcagaaaagtgaagtattctcaaataaaataatctttttttttttaaatttattttatttatttatttttttagacagaatcttactctgtcgccgaggctggagttcagtggcatgatttcggcacactgcaaccccgcgtcttgggttcaagtgactctcctgcctcagcctcccaagtagctgagaccacaggcacctgccacacctggctattttgtgtgtgtgtgtgtgtgtgtgtgtgtgtgtgtgtgtgtgtgtgtgtgtgtgtgtgtttttagtagagacaggtttcgccatgttggccaggctggtctcgaactcctggccttaagtgatctgcctgcctctgcctcccaaagtgctggggctataggtgtgagcacccagccaaaagaatcttaatttttagggacataactggttaacctgcttattgggtacagttgtcagtatctttgggttaggttggctattattttagggtggatggagggtagatggaaggagaaaatatccataggagggttgggacttctcagttagattgaatacctgttgaatgggaagagaaagtccctaagctgacaatttattgtaaaacatatctgtgctaatgcaggaactccgacccacctggtgcagaggagtcttgtcttgacctgctttgggagagtgttgtcttgatgcttttctcttcctccttggaaaacagctgaagaaatcaggggagaaacccctgcttggtggaagcctgatggaatatgcaatcttgtctgccattgctgccatgaatgagccgaagacctgctctaccactgctctgaagaagtatgtcctagagaatcacccaggaaccaattctaactatcaaagtaagactcggttgtgtatatttaactgggattaggagaattttcttttgaaaaaaccgtggagggccaggcactgtggctcacgcctgtaatcccagcactttgggaggctgaggcgggtggatcacgaggtcgggagtttgagaccagtctggccaacatagtgaaaccccatctctactacaaatacaaaaaaattagcagggtgtagtggtgtgcatctgtagtcccagctactcgggaggctgaggcaggagaaacgcatgaacccaggaggtggaggttgcagtgagccgagattgcaccattgtactccaatccggacaatagttgcgagactatgtatcaaaaaaaaagaaaagaaaagaaaagaaaaaaaaatcatagagatcatgctattaatgtcaaagtattaactactgactgaaaaccaagagggaacagctttacaaatttcatatttacaaaaagaaaaacaaataatcaaaactgaattcttaatttaaagcatctgcttataagaagttgcttttactgtaaagatttttctgatatttattgtaatttagataaatctctaggttcaaagcaactctaaattatagtgtattttttcctacttttgaatgttcaccaaaaacatctaattttactttgaaacaaagccaggattttagagtacttactacttatattatttcttattaacctaagccccacaacagacaatactttatttcagtaaagtatatttactctaggaggtggtgatttgagatgagacaccctgccttatcagcattatcgtgtggattggtgagactgggtgacttctcaatgaactattagaagaggcacaatgttgtagggtgagggatatggaaattaagtaacagaagaagacaatccagaatatattattgtaattaaaaggtaattttgaagtctttttttttttttagacggagtctcgctgtgttgcccaggctggggggcgcagtggtgcgatcttggctcactgcaagctccgcctcccctgggttcacgccattctcctacctccaccccctgagtagctgggactacaggcacctgccaccacccctggctaatttttttgtttttgtattatttgtttttagtagagacagggtttcaccgtattagccaagatgatctcaatctccttacctcgtgatctgccggcctcggcctcccaaagtgctgggattacaggcgtgagccgccacgcccggcctatttctatatgccagatgttttaagagaagatgaatttggttaacaagcctttcagtttcactgatatttgcagctgttttttggatactgaatcaccataaaatatattttggatatgtctctgtaagaaagatgagaatgaaggacttcaggaaccatgatattgttttgttactgtttactgatttatgaataattagttctgttcatctttataagagattctcctagatgattatcaatacctataggtacacaatagatgtttaagtgaatggaaataattaaatacttagttttaggtctgctgtttatgtgctaccttagagcaagtcacttaactactttgagctcaagtcacttaaccactctgggctttttttttttccctgtgaaataaggtatttgactcaatggtctctaatgtgtcttttcattataactcttgccaggtatggtggctcatgcctggagtcccagcagtctgggaagccaaggtgggagtattgcttgagcccaggagtttgagaccagcctgggcaacatagtgagactttgtctctatattttgcaaaattttaaaatatagatatatgtatgtatgtatgtatataatttaactcttgccaaacttatgggcaataagtaaatgtttaattaaatacctttgaacacataggattcacttagtgtatgtcaattaccgtatgtgacaggatattaaattgatgggcatctgtttgtggttgagggaattatctaatctgaataactagataactttcatttctgaattttttttttcagtgcatttgctgaaaaaaaccctgcagaaatgcgaaaagaatgggtggatggaacagatctctgggaaagggttcagtggcaccttccagctctgttttccctattatcccaggtaagtacttagcctataatagatcactgtaaatttatagtctaagttacacactcagtttaatttattttacccttattactgttttagtgaactggaaatacagtcgtcctttgttacatataggggattggttacagaactgcccgcatacccaaatgcgcatgtactcagccctgtggaatccatgtatctgaaaagtctgtcctctttgtatgcaggcttcgcatcctgtggatgttgtatttctgatctgtgtctggttgaaaaaaaaaagtccacatataaagtgggctaatgcgttgccaacctgtgttgttcaagggacaactgtatttgaaaataaagatgacttttaaggcagtattattttggagtaaaaggttttgtataaaaatagtgattttagccaggcataagattatttgagatcctcggatggtcattttgatgttcattccttctttatcaagtaaatgataatgacagattcttagaggattatgtataagtttttgtttttgttttttgagacagggtctcactctatcgcccaggctggagcagtggtataatctcggctcactgcaatctccgcctcctgggctcaagtgatcctcccacctcaatatcccacgtagctgggactacaggtgcgcgccaccacacccagctaatttttgtgttttttgtagagatgggggtcttaccatattatctaggctggccttgaactcctggctcaagcagtcctctcgcctcagcctcccaaagtgatgggattatatgcataagttttaattgtccaataccaagtggggagaacattgactgttttcaagaatcttaactctacctccatactgtagagacaggaacacttatctgaaaatttgtttcttgcaaataccttatttattctttgaaacaaaaaaatatattgatcacctcctgtggtccaagcattgtttcatgcactgggtttaaagccttttgatttccagtaaagtacataacatataccactaagaccctgttttagcaagactattgtgtaactttcttatattattatttctgtacaaacataagtgttacttggcttaatacatattatataaatttttcgaacattaaacattaaatttaattcccaaagtcacacacacacaaaatgttacattctgccaggtgtggtgggatgcacctgtagtcctaactacttgggaaggtgaggtgggaggatcccttgagcctaggagtttgattccagcctgggcagcatagcaagaccctgtgtctgaaaaaggcaagaaacacacacacacacacacacacacacacacacacacacacatatatgtatgtatgttatcatttaaggatatgttaatcaaaggaatcaaggttcataccaccaaggacaaaaaagagtttaggagatccttgccgaatacctttgaagctttgaacagatttaggcctttgaggtctttttttttaagacttggaggtcttttgccagtattatgaggctgaagtgtgtattccatgcagactgttcattgctgtgtactcattggctaatacagtgccagatacatattaggagtttaagtaattgtttactaaataaatgactatggattaattttattaaatagtgggtatagaattaggtatggtgcaggacttttatagatttggcataactttatatgtatgttcaaaatacggtaaattgtaacctgatacgtgtaacctagcttgacatttttgggaagggtgggaagaagtgggatatgtccaggtaagagcatctaggttcacattatttttcttgttttatatgggacttgtgttttaatctaatttttccccgtatagcccaggagttctgtttccgaagaaagagccagatgattctagagatgaggatgaagatgaagatgagtcatcagaagaagactctgaggatgaagagccgccacctaagagaaggtgtggacatgtgaaaaccccttgtggggaggacactaaatacctcagagctgaaaaatagtgctataggaggggctaaagctaaaaagcatttcagaaactcaggatccttctcaagttctttatataaatttggattgatcttctcctttgaaaatcaagggctccagacttttagggcaagcctgtgtgtatccatagtttagttattcaaagaaaaataattacatatttccctaggaacaacgtcatgaaattgtgtctagacttcatgaattggttgaatttttatacaattttagtaaaatctctagtaaaaaattgtcacattcctattcttaacgtaagtgaccacttcatatgccgtttctctttagaaagcatctggttgtcccaacaaaacgaatctcttaagtactaaatgacggcctttgctctttggttctcacaggttgcagaagaaaaccccagccaagtccccagggaaggccgcatctgtgaagcagagagggtccaaacctgcacctaaagtctcagctgcccagcgggggaaagctaggcccttgcctaagaaagcacctcctaaggccaaaacgcctgccaagaagaccagaccctcatccacagtcatcaagaaacctagtggtggctcctcaaagaagcctgcaaccagtgcaagaaaggaagtaaaattgccgggcaagggcaaatccaccatgaagaagtctttcagagtgaaaaagtaaattttataggaaaaaagggtatcatgatgaaattcaaaatcttattttctaaggtcagtgtgcatttgtttagttttgatgcttttcaaattacattattttcctcccctatgaacattgtggggagggactctaaataaaccagtttaggcatttgctagctttaggtgcttttattggtgcctgcccttttccttgttcattttaatttctgcaataatcctggactttcctaaactatgtaatgtatacttgtcctttttctctgcctcccccaaccccctgttgtttttatggtcagctttgccttttttttttcttccaattttatctaaacagttgcagagatttttatatttgtagaaagcatcaagaacggtatgccagtcaggtcctggaagtaaaatggaggcacaatatagcactgactgagttgtaaagcctcctgcctggagacttcagttatagctgtaataattaatcttatttataaaagccactccactaaccttttctctccaactgtaaacacagagacagctttgggaataagccaaaaacagggtgatctcattagattttgaagatatatgactcctttgggctacatttcatattgatcaatttctaggtatttttcactggcccaaagtattgcattcccttaacagcaagcacaagttctctatatcacttgttttttgttgttgttgttgttgtcgtcgttgttttgagacggagtcttgctcaggtgccccggagtgcagtggtgcaatctcagctcactgcaacctccacctcctgggttcaagcaattctcctgcttcagcctcccgagtagctgggattacaggtgtgtaccaccacgcctggcaatttttttgtatttttagtagagatggggtttcgccgtgttggtcaggctggtctcgaactcctgacctcaggtgatccgcctgcctcggcctcccaaagtgctgggattacaggagtgagccactgtgcctggcctatcccacttggtttttgactgaaggggaagtgtagaaatatattgatttgtgatttctggtgtcacctgtgttaccaaaaatcaaaacaaatcttttttattttttattattattattatttttgagacagagtctcgctctgtcgcccagtgtggagtgcagtggtgtgatcttggctcactgcaaactccgcctcccaggttcaagcgattctcccacctcagcctcctgagttgggtcctacaggcgcacacgaccacgcccagctaattttttgtatttttagtagagttggggtttcaccatgttagccaggatggtctcgatctcctgacctcgtgatccactcacctcagcctcccaaaatcctggggttacagatgtgagctaccactcacggcccaaatcttcttgatcatatgtttaaatatattttttaatatttggagcatgagttgtcacttcttgtttgccttttttataaggaaatgttggagagttacatcattgctaatgtagaaatgttaagtggaaaaatatacagtttggtaaaataaactagattctacatttatttgtgggtttttttcccctcctttctttccacagcacttttgatatcaagcaagtggcttcctttttgagatattaaaaaaaaaaagaaaaggaaaaaagtaaatgaagcccaactacctaaccctttcttatttgtatttgttttagtattgtgaagttgtgttaaatagtactagctagaaatacaaatttctggttatcatttctcttccctgtggcacttgacattttaattgtcttaaagtttttgaagtacatcttctggccccttgagtactgccagaggcaaaagatgtttgtttcttattcattccacttttgtctcctgggatcccttctgtagcctaaagtatggctgggaaatggacttgagaagattggcttgaattagatcataatcatgtgtgatcccatcatgaattcattggaatttgtgttgcatgtaaggcaatctttcctgttgtaaatcttccttttttaatgtacatatattttgaaaaatatgaataaacatgaaattttaaaa

SEQ ID NO: 15614 - DNA, 30114 bp, Homo sapiens
gcggcagagctcggcggctgggactggaggacagcggtggcggaggcgactagcggcggcgggagcggcgccgagaggccgtgcgggacgcgggcgccaggaccggccgaacgcagaggtaacgcaggaccgaacaggcggccggggagtgggcgcgggctcgctgggccccgaaggcgagtggcggaggccgctcgcccggggcgccgacgccgctcccagagaggagggggcggggcgcccgggtccccggaggtggcgccttttgtctgccttacccggccgctccgccccgctcccttcctctctcctgcgacctagccccctgcccttttggtggactcctcctcaggggccctccggcgcgcgcgctcccgcccttgttttgtttggatttgggggaggagggggagctcttctctggccgtgcgaccctgcgtcccagcgcgcctgcgtcggcgtcctctgcccgccccgattggctgagggctgcgcatgctccgaggcccgccgcggtccggcgtccgcccgcgccctcccctcaccccactccctcagcggttttcggagccggttcgaaagatgccggcggcggtgactggctgcggcgggcccgccccccgggttctccgcccccgccgccgccattacggagctcccagtggtgagtgtgcggagcgccgaggctcgcgttccgccgctgcttccgtcgccggggcgggcgccgcggtgtccctgccgagcgtgagccccgaactgtcaccgcgccgagccccagcctcatccgtcggtgtccgcggtccgagctttccccgcctcgctggcggcccgcgctctcccccgccgtgcgcgttcgccgctgtggcctgtagctacctcgcctcgctgctttgtctccgctgctcttgccgtccttcccgcggccttctgcgggcggggctgtcggctgtcgctttgctgctccgcgacggcggccttgagtctcgctcccccggtgggaaacgtagaactggttactcgccaccttaggcggtggggtttgaatgagagcggtgcctcggtaggtcgtcagaaagttacagtcgcccatctgagcgtttgtaagagatggaggcaggagtggtgaggtgagagccccagatctgagggttggtactgcattaacagctgtgaccggggacagccacttaacctttttgagaaagagttgtctcccgtacggagaccggaccgggtgaactgtgctgccgcatccgcgtgcacgttctctctgttgtttattgtgcttcctgactttgcattgcattaaaaagtgagaatccaattcgaaataacgtctaaaaatcgcctggggctttttgagcacgctgtcttgtcttagagtgaaattagaggtgactagtgtcatttttgaaaggtgctctaattttgtttaacctgacataggcaaaaaacttgttagctttttgatttttcattgctcttctcaaaagtttagtgtaatttgtttcaaaatagaagtaacattttaaagtttgctgggttggttggttttggctttgtttttaagcttgcttggaagattgtagggctggaagttagtggagaacgtatactgaactcttcatttccggatgaaagttttaactccttacccagttagattgtgattttattgagatgagacactgtagtgtccttagtatctatgcccaaaacagacactgagtatatgtttgcttatataacttacatttgaaaatgaaaaacaagtggtgtcagcagtcaaattacaggcatgctttttgtgacatgactcgttaaatctgagtgtagtgaatgacttaagattgggaacaatgtgaggtgttcagcgcatcactaatgacatgtattacatatattttatggtaaaatgtgaaattatagtgctttccctaaaatgcatattatcaaggatatcagtaaactgaaatacgttgttaaactcctcacttttctacagccttctcttaatgtagaggaaataaattaaaactgaaatttggggctttttatttctacaatacttttttttattgcttgcattcaaataatttaaagccgtgcatggtggctcacacctgtaatcctaacactttgggaggccaaagaggaggatcgcttgaatccaggagttagagaccagcttgggcaaccctgtctctacagaaaatacaaaaactatccggctgtggtggcgcatacctgaagtcccagctactcaggtggctgaggtgggaggagatcgcttgagcccaggaggtcgaggctacagtgatccctggtcatgccactgtactccagactgagactctgtctcaaaataaacaaccgatttaatttaagcatttcccttgacaaaaagcaaatatttgttattgttgtaacattaagtttaagcaagctgatgttcataagaggaccatgtaaaccacaagtaaactcagactgtttatttttggcacatataaaaaccaagatgaaaaacatgaataggccgggcacggtggctcacgcctgtaatcccagccctttgggaggctgaggtgggcggatcacgaggtcaggagatcgagaccatcctggctaacacggtgaaaccccgtctctactgaaaatacaaaaaattagctgggtgtcgtggcggacgcctgtagtcccagctactcaggaggctgaggcaggagaatggcgtgaaccgggaggggaggttgcagtgagccgagatcgcgccaccgcactccagcctgggcgacagagcaagactcggtctcaaaaaaaaaaaaaaaaaaaagggaaaacacaaataagttttatttgttcatcctttagtttaacaaatattaattgagcatctattctgtgcctggtatgttcttaggcatcaggtatgcagcaaatgaaccaggtagataagatccctgccaggaacaagtgtggcagcctcaaaatttgatcattcagagtgcaatagtaaaaagtttagttaataggtacactgggtcagatgcagtggcttacacctgtaatcccaacacgttgagaggccgaggcagatggatcgcttgagcccaggagtttgtgaccagcctgggcaacatggcaaaaccctgttgatacaaaaaagagaaaaattagccgggcatggcggtgcgtgcctgtagtcccagctactagggagactaaggtgggagagtcgcttgagcctgggaggttgaggctgcagtgagctgtgatactacaacctgagcatcagagtgagaccgtgtcttaaaacaaacaaacaaaaaacataggtacagtgatgttaaggcagtgtgaattaacgttgcatatacttagctctgtaatgaacagtgagtttattaaatagccaattaacccaactattctaaagcaggtactacagattgaagctttgaagttctatgactttgacttttattaaggaaatgcagagctgaggctaacatctctttttttttttttttttttttttttgagacagagtctcacactgttacccaggctggagtgcagtggcatgatctcggctcactgcaacttcggattcccgggttcaagtgattctcctgcctgagcctcccgagtagctgggactaacccaactattctaaagaaagtactacagattgaacctttgaagttctacagcttttactaaggaaatgcagagctctaacatctctattttttttgttttttttttaaattgttgttgtttgttttttgagatggagtctcactcttcacccaggcttggagtgcagtggcatgatctcaggtcactgcaacctccgcctcccaggttcaagtgattcttctccctcagcctcctgagtagctgagactacaggtgtacaccacagcgcctggctaacttttgtgtttttagtagagatggggtttcaccatgttggccaggctggtctcggactcctgacctcaggtgatccctgcctcagcctaccaaagtgctgggattacaggcatgagccactgtacccagccctaacgtctcttaatatttatcccaaataactgggttttaagtgttcttcacacataatgaatgtagtcataagtactaccagatgtctttgttcattcaacttttattattattattattattattgagccaaggtcttactctgtcacccagactggagtgccgtggtgcaattctagctcactgtagcctggaactcctggacactggcagtcctcccatctcagtcttccaagtagctgggactacgggcatgtgccacagtgaccagctaattttttatcttttgtgtgtgtgggttttttctttctttttttttttttttttttcttttttttgagaaggagtcttgctctgtcgcccaggctggagtgcagtggcacaatctcggctcactgcaatctccgcctcccaggttcaagtgattcttctgcctcagcctcccaagtatctgggattacaggcgcgcaccaccacacccggctaatttttgtatttttagtagagacggggtttcaccatactggccaggctggtctcgaactcctgaccttgtgatctatccgcctcggcctcccaaagtgctgagatacaggcgtgagccaccatgcctggcccttttgtgtttttttttaaattattatttttttttcttgaggcaggctctgctctgtcacctaggctggaatgcagtggctcgatttcaggttactgcatccaaaaccttctgggctcaagcagtcctcccagtctcagcttcccaagtagctgggactacaggcgcatgccaccattcccagctgatttttaattttttttttttagagacaacgtctgtattgcccaggctggtcttgaactcctgggctcgagtgaacctcctaccttagcctcccaaagtgctgggattacaggtgtgagccaccacacctggcctgtttttaaattttaatttatttacttttggtaaagaccaagtctaatgttgactaggctagttttgaatttctagcttcaagggatcctcccacctctgcctcccaaagtgctggggttgcaggcatgagctactacaccaaatgggaaagtatttttttaaagatgcctatgaacggagactcctgaaggttgttgacttcacggtagcattttcagcctagctagtgttatcgtgggttaagaaagataaattcattagcaatataactttactaaggataacctgattgtgatattgttttatttccatatcatatttgcatgtaaaaataccagcagatttgcataaggctttttatcattaagaaaaatgggccgggtgcggtgggtcacgcctgccatcccagcactttgggaggctgaggcgggcagatcatctgagatcaggagctcgagaccagcctgaccaacatggtgaaaccccatctctactaaaaatacaaaattagctgggcatggtggcgcatgcctgtaatcccagctactcaggaaggtgaggcaggagaatcgcttgaaccaaggaggcggaggttgcagcgagctgagatcgtgccaccgcactccagcctgggcaacagagcaagactccgtctcaaaaaaagaaaaaaaaaatttaatattaatggatattctggttccctaagtatgagtgtgttacactgcactgaattctttcagctgactgaaagatttccttgcagctgactgacaattgacaagtctggtattgttcttggtgttcccataaaaatattttcccgataagtgtgaatgcatcctctttgtttcaatcttccggatttatcctagttgttgtaggttgggactgttacttgccaagttgaaagctcttcaattcttagacaaggttagaccttaatgtagaagttgcatgactgtcattccctactcattgttaatagttcattagcacagagatctagatacttaagtggtcttttttttttatattgaggaatttttgtataaaatgtcattgagtctcagatgagatttttggggaagagggggtgttagtgatcaggtaaacttgggtgactgcatgggtttttatctttgaatatttaattatattcttctgtactagttttccttacattaaaaatatgacagtcttagaagcatacttttattctcctaggtgatggtctaaatttgcttctgtgggtctggaagctattagaatgtcatgttattcagcagtatttttccccttgtgttttcccttaatagaaggaaaaaaaaagtactttaatagagatagagtttaagattacagttaattttcctgactctttcgagaacagtaacaacaaaagccttctcttggtaaactgatctttgactaactgttccttagtctctttattctatccttctaagttcctgatggtggcaggaggggatggggttaggttccttaggagcttccttgcccttgttgtctttgttcatgtggaaggtgcaacagctgccgtggcttatgcattcgtcttagttgctgctttatgtagtctatattttggtagttttatctttctgagtaaccaaatcatctgtcacttacctataaattttatagttatattttttccctttggatgtgtattaaatttagacgttttagtttagttttgtttctgttaatcttcacaccaggtcttttctgtgctttaggttgattcttcaccacactgaaaccattaggaaaaatccttgtggttaacagcagaggcttcagagtgtaacctgtactcgggcctagaaattatttaaaatggcgactgatacgtctcaaggtgaactcgtccatcctaaggcactcccacttatagtaggagctcagctgatccacgcggacaagttaggtgaggtaggggctgacacattcttgaagctcactcttggatcaatccctgacttcaggccctgctgggtccttcttggtacatgttccttcccttactttggggagtctaggttgtgaatttgaaacaaaatcagattcttttcatcttccctttcccctcaaattcctgagaaaacctccaaccttctaaatttatagcaaatcaactataattatgtgtttccatttgaaattcaagctaaaataacatactttaaaaagtgtatcttaaaaatcatatttcacttcaaaaaaaacttgttaaaagtaatttgcatcagatcctggagtcgacttgaagaattctcctacatctgacacccagttaggccctttgagaaagagagaaaagagaattttttaatgcatgtttgattatggccatctcttttcttagaaggtagaagatagcaccatgccgattcgtcgaactgtgaattctacccgggaaactcctcccaaaagcaagcttgctgaaggggaggaagaaaagccaggtaaagtaaaatggtgacacagcttaaaacatcaaaagttatactgcaatttggagtgtcccataaattcctttgaacttaattgtttttttttttttttcatggctaagtgttttggggaaacatttagagagaatcagtagctattggtatgtcattgccagaccatgagggcaaagtaaggtttcatcttctctataaaggtttttggaaggtgaaaatgttatgttggaattaaaaacaaaaatgtttggggatgacaggaatggccagagagtagcattctggacataaagtgtcatggggatcagtgcagtgtgggagaatggaaaacgtgggcctttagaatagacagtggaaggttcatccagaaatcatctggaggccttcagagaagcaaatggtgatctgttgatctataacaggtattggtagagagaagattggccagtcagtggtgggagcataacaaatggaaagaaacatagacccatcaacatggagtactaatgctcctttatggcatgtataaccacctcttctccttttcccgtctttatttttcttctcatgatctttttggtttttttccttatcttttcccttttttcctttctctcttgccttttatctcaggtttttcagggataagcacactgtgctgcctctgttgtggctgttagaatcaattatttgctgaccagcatgtattaggaatagagggccgggcacagtggctcacacctgtaatcccagcactttgggaggccaaggagggcagatcacctgaggtcaggagttcgagaccagcctggccatcatggtgaaaccccatctctactaaaattataaacattatctgggcatggtggtgcatgcctgtaatccctgctactcaggaggctgaggcacaagaattgcttgagcccaggaggcagaggttgcagtgagctgagatcacgccattgtattccagcctgggcaacagagggaaactgtctccaaaaaaaagaaaaaaaaaaaaaagaggagtagaaaatacatgcatccttggtgcatcagggcagacatcaataaccagtcaatatactcttttctggctgagcctggattttttctctaaatccttagatgaatgctataagcaatttgggcaccctggcctaaggcagttaagaaacacgggaatccaaatatttaaaaaagtaaacgggtgctggtaagttgaagataggttatcttgtccagcactgggataagccacttggtggtccatcttaatccatgtttaacagccagctgaagccactaaatcactaataacatcagttttcagaatatatgccagagggttcagatgtaaagtattagaaaactcaaccagaagtttatgaagaaacagtgtcacttcacaagttgtatgtttgtttaatcttctctctatcccattttgtacacagtattttgtacatagaaattagacttcacttattttaaattttgtaaactctatgttttacacagaaacacagtagtttaatgagttggaaacagtcttatacataatacatattcaatatctgttgagtgactgaactttattaagccataactcttgagcagttattcttgagaagagaaaataatgtaaatttataagtcttactaccgtaaaacccctgaatgattcttagcttttcatcttttttagaataagacaaagtgtaaataaacatgactaactaatagtaaattcttgcccatgcagccatttaggtcaaattgttgggttgaggggcagtaaaagatatatcatgatgaaaaatacattttattgtggaaaacctaaatgtagttattatctttatccccagataccattgttatagtgaagttctatccataatactttgtcatcctaagcatatgggaaacaattctagaagcagagaattccaaaggaggatggaaatcactcgcttagtataagtgttagaattgtacttatgtgatttggttttaagaaagaagtggcattttaaaattctctttatagctgggcgcggtggctcacgcctgtaatcccagaattttgggaggctgaggcgggtggatcacgaggtcaggagatcgagaccatcctggctaacacaatgaaaccctgtcactactaaaaatacaaaaaatcagctgggcatggcggcacgcacctgtagtcccagctactagggaggctgaggcaggagaatcgcttgaacctggggaggtggaagttgcagtgagccaagattgcgccacagcactctagcctgggagacagagcgagactccgtctcaaaaaaaaaataaataaataaataaaattctctttatgggaaggccacaaagaagtcctcgtcattattgcaataattagttcacataatttaaatgatcaaattcttcaagcatatactttggcttgaagtatatgcttgccactggagtcctttttctttcatgttttttttattttttttatttttatttttttttggagttctctgaagtccctgcataaccagtgcctggggttctgtgttttatagtagctactcagagacatgctgtgaaggaaaggcacaaatagcagcagacctccatgttcccctcatatttctactcttgcttcagtcattcctcttggagaatacatgagtttttaaattacttattctctgagatttgcctgttgaattataaaatggctagtttcttaattatgagtctcatgaatattgcaaagtagaataattaaacaattggggatgaaatgagttttcctttctatgtaatttcctggtctatttttctaataatagataaataaccacctgaccaggaaacttgagtgacataaagaatgtaagaaaactgcattagtggtcattcattttcattttagaattcatttgttaattggagactttggctggtccgtttaataagataagcttttaccttttattgactcagattggaatacatctgcttatgcaattctgctcacctgattttttagaaccagacataagttcagaggaatctgtctccactgtagaagaacaagagaatgaaactccacctgctacttcgagtgaggcagagcagccaaagggggaacctgagaatgaagagaaggaagaaaataagtcttctgaggaaaccaaaaaggagtaaggagttatgtcttcttgctatttatatttgaagaatgtgtaaaaggactttagattagattgttttaaagtgttataacattggtttatgctaggtatttgctatttggatttaatttttagaattaccatttgaaataggtttattatatagttgtttgacctgttagaatatgctgtagttagcagaacacaatggtttgaataatccaaaagtctttgtcattggctttggaatgtgtttttgagcttgtaatttattgtgggagtatctgatattttaagcattggcaagacttcaataagaaatgaaacataactataaaaatctgacctagaagacatttcactattttattcctacttctgtgccaggagtgggttgtttttgtgtgcttatgttagaaggcattgatttgtatcaagccattggtagtgtgacctaaaagtctatatatgtttgatgaaatattcagttgaagaattggctttgagaatctgaaagtaaaatttgctattgatgtgtatctatataaagtgatggcagttactttttaatttttaatttttttttttttttttttgcaggagagctgatagtattcattccactcttttcataattggtcagaacagttagaaattgcttttaactatagtcatgcattgcttaacaatgggtatacattctgagagatacatctttaggcgatttcatcatcgtgccaacatcataaagtgtacttacacaaacctacgtggtacagcctactacatacctaggctttatgggatagtctgttgcttctaggctacaaacctgtacagcatgttactgtactaaatactgtaggcagttataacacaacggtaagtatttgtgtatttaaacatagaaaaggtacagtaaaaatataatataaaagataaaaaatggtatacctgtgtaggacacctaccatgaatggaccttaaaggattggaagttgtttgggtgagtgagtgagtggtaagtgaatgcaaaggcctaggactactgtgtgcaacttttaaaactaaaaagtttttatttttagcaacttttaaaactaaaaagtttttatttttaaaaacttttaaaactttaccaaaaacaaagacacaagccggacgcaatggtgcacagctgtagccctagctacttaggaagctgaggtggggggattgcttgagtcctgaaatttgaatctagattgggcaacgttgtgagacctcatatttataaaaaaacaaaactaagacacatacacacaccttaacctaggcctgcacaaggtcagggtcatcaatatcactgtcttccacctccagatcttgtcccactcaaggccttcaggggcagcaacacacatggacctgtcatttcctatgataacagtgctgtcttttggaataccttctgaaggacctgcttgaggctgttttacagttaactttttttttgtaggtagaaaacatatactctaatgataaaaagtatagtatagtaaacacataaactagtagcatagctgtttattatcaggtattatgtataattgtaatgtgctttttttttttttttgagatggagtcttactctgtcacccaggttggagtgtggagtgcagtggcgcgatctgggctcactgcaacctccacctcccaggttcaagcgattctcctgcctcaacctgccaagtagctgggactacaggcgtgcacctccacacctagctaatttttgtattttcaggagagacgggggtttcaccatgttggccaggatggtctcaatcttttgaccttgtgatccgcccaccttggcctcccaaagtgctgggattacaggcatgagtcaccgcgcccagccaatatgctatatttttgtatgactggcagcactgtaggtttgtttacaccaatgtcaccacaaacaagtgagtaacgtgctgcgctgtgatattaccacagctatcatgttaaccaggtaataggaggttttcagttccattataatcttaagggaccaccattgtatatgtggtctgttgaccaaatattgttacacagcacatgaccataaaagaataacttagtaataactataccttctagctataatcttcagggtattctttatctgagtttcataagtatagctaaggtctgtggaatttatagcaactatcgtgtgtgggtgtgggtgtgtttgtgtgtgtgtgtgtgtgtttaatggagatggcgtctcactatgttggctaggttgggcttgaactcctggcctcaagctgtcctccctcctcagcctcctaaattgctgggattacaggcatgagccactgcacccagcctatcgtctgttgttaaatgttctaatgcacctattaggtgcacagagtactgttatatactcagaataaaatttacataatgctttaaatctcacaaaattgttttgataaacatactcttataattcttgcaacaccttgggaaatagttggttctatattactgttttatagctgaggagaaagactcacatcatttactaagatcatatagctagctagtaaatgtttgagtgaaaatacaaacaaaggttttctgactttaagagcttgagttttttccactataccatattgcatctgttgtaattgttaactaatgtgcattttaaaattctcatttgtcttatgtactgagcccttataccagtgctaatttatgtgactcctttctcctgcagctaagagaaaaatacctttttaattcatttatagtacccagtttttaaagaagatttattttgtaaaattttgcttatggtacatgtcatcttagcctgtaaataaattaaagcattaatttttatccctccctggtcttttcctccttctgactttatacgtctttctagagagcttatcttctataataacaattctttgttttaaagtgagaaagatcagtctaaagaaaaggagaagaaagtgaaaaaaacaattccttcctgggctaccctttctgccagccagctagccagggcccagaaacaaacaccgatggcttcttccccacgtcccaagatggatgcaatcttaactgaggccattaaggcaagtttttatttcaagcaattcatcttagatttattatgttcatttttttcttatttgaaaatggcatatatctgtctagacatcataaatcttgttctgcttcctaaaggagttttaaagagaggaaagtcattataagttcatgtttttctaatataatcacatttggtgaacactgttaatttttttaaaaaaattatatttaatatagcaaatattttaactttagaatttttaaatgcagtttatcgattaagtacagtttttatttgaaggctgaaaatgttaattcattgaacaaacatttaaggactaccttcctctgttgggcgcccctgctagtggtgaattaactaaggctagcaaagtccttgcccttataaatctaattgtgactcagtaactgaaaaatattgagaatttttgtttaaaaaatatctctaggttcatttctaaagctaagtgatcttggtagtggttatctttcacacctgaaccctgttaataaacactgctttattacctagacattccaaaatgcttacaaaaattatcctccttacatagatttatgatttcattgactttcattagatgtagttttcctattttaatttttaaaggttatcttctaatttgacattgcctttattgtataagtcttttcatttaattttgccttgtttagttcatatgatcagatgataagaggagttagaacagacccatctttcagggaccctgttgttaggatctgaggcaggactggggagacagggatacagatgattttaaccagaaaaggggggatgtgtacgaaaaggagcagcctggttgtcattctcagaatatgagaagatagcactaacacataaactggaaaaagggtttgccttcagacttctccctttactccttcaagacttcttatgctctcacctcattaagaaaactttattggtctagattacctcactgtagtgaaatctctgttctttgtatagcctttcttcaaggatttcacttgatgaccactcagcctgggtttgaaggagcagcatcatagtgaggatggaaaaagggctgaaactttaaaatagtgaaataaaaaattaaaacaatatcaatttggcttaaagaatggtttgaatataattgtgcatatttatggagatgattgattttatatagataatgtgtattccatgcaatatgacaaattattgtttcagaccatggataccattttctgtattgaacaggaatcatgatgtctactaccatctcactgtcggattggtggagcaaaagattatttgtttcagcattagtgttcttttctgcttgattttctttgctctgtgttttcttttaagatcaggagtaaacctcagtaggtcattaatagttcagagacatagacttgaattacatgacccatattaatacaacttgtttcgtgttgtgcaatcttttctggaccatctacctgtgagttatttttctttgttgtcaaaatgtataaaaacattcaacgaagttcttatccaatgagaatgaataagtgctacattgatttaatagacactgtggcagtacaaaattgatggactagctcattagataaatgacagatgctacttttgtgtgtttcaaaatttaaagtatttgatttcaagtcagtgaccagttggaaaacaaaattttaagcatttgaaaaaaattaagtatttgctgcctttgtgacataatgagctacttaattcttccaggtgcattagtcaaatggagtataagtaaaataggatggaaatggaagagggcacattaaattcaaatagaacaccttcactattacccaaaactctccttcagcactttgccatctgtaaacccatttttatgccacttattcagattatctttgattcttctttctgctgacattcatacagagccttcagggaaatgtcctggcatgctcattccttaagctcgtgccttaaaatgggacagatctgtgatcctgtaagtgataggtttgttctgcttttctcattttgatgccaaagattcatcttctaaatacagaatggaattaaaatggaaagaggttcttcattatacatagaatgttgttcgtgttcagtatggtctcttaggctgttttgaacaatttaaaattgtagtagaaatatttagtaattctgttacttctctgtagtcattatgaactgaagtcttctgaagttcattcttccctaccgtttttgtcatctatcatcaaattcacttccaaaataatttattttgaaaatatatgtcaggctctatctaataaaaaaaaacaactagtttaataaatcttttctaggcatgcttccagaagagtggtgcatcagtggttgctattcgaaaatacatcatccataagtatccttctctggagctggagagaaggggttatctccttaaacaagcactgaaaagagaattaaatagaggagtcatcaaacaggtattacacaattgttagtagtaagatcatttcattgtgtattagctttaagtctacagttagtaacatttaggctttttgtgccttttttgttaaaaataagtttcatgatgatgaaattccttaagtttaacctagttgaattatctgaggctaggtttcgaaaatgctggtgccattaagatagtgtaacttttttctagcttactttgctcttaattggatattttttggggggctgcttgtgcttgaaatcatgtagcactgaacatgaaaaagaggtaaggaatcctactactgaaacagcaaaaatgaggctagggatggtggcctacacctgtagtcccagcaccttgggaggcttagttgggaggatcacttgagcccaggagttcgagaccagcctgggcaacatagcaagaccccttctctacaaaaaatacaaaatcagcagggtttggtgacacatgcctctagtcccaggtacttggaaggcagaggcaggaggaccgcttgagcctgggaggttgaggctattgtgagttacgatctcaccactccagcctcggtgagagtgagaccctgtctgaaaacaaaaaggaataacagaaataataattgcccttgtcttaggtttgtttcctttaaagcctaacttacatgatagacttgttactattaatttttagcttcataaatgtgctcaccttaactgattagtatctaaactattaaagcctgttaagagtatcagagaaacccgagtgaaatgtgactagtactagaacaaatgttgatttcaggcataaatctactttatcttgcatagtgcatggaaacttagaaccatagaaatctaaagctagaataaactttatattatgttaccctcttcagaggtccagagtgatgaaataactgctaaggtcttacggtagtggcaaaaattttaaaaacctagttcaccccattcctagagtcttgttaagttttttctataccccctgcctgtttgatcagaacagaattctgtgccactcaggcatttcagctctgcttagggacttccaactagtacttaattgcacagatacgtcttgtctcctatgtgccagttgcctggaggtctgttagtgaataaaacagattgctgctctgtggagctaggagtccagctttctcaaaatgtaaaactgatatttaaatggcctttaaaattatcactgacggccaggcacagtggctcatacctgtacgctgaggtgggagggttgcttcaggccaggagtttgagaccagcctgggcaacatagcaaggtgaggccctgtctctacaaaaaaattatttctttattctattttattttactttttgagacaggatctcactctggcccaggctggggtgcagaggtgcaatgtcagctcaccgcactctctacctgctgggctccagccgtcttcccacctcagcctcccgagtacctgggactataggtgtgcaccagcacacccagctaatttttgtattctttgtagagacaaggttttgccatgttgcccaggctggtctcaagctcctgggcccaagtgattcacccacctcagcctcccaaagtgctgggattacagacgtgagccaccatgcccagcctttacaaaaaacttaaaaattagccaaatgtaggggtgcatgcctctagtcccaactcatgaggctgaggcaggaggatcgcttgagttgagctatgagctaacatagcaatgagctatgattgtgccactgcactccagcatgggtgacagagtgagaccctgtctctaaaataaaacaaaattatcgttgactaaaaagtcttacctagttaatataattattagagccaaggacctgttgtgtaacatgtcagcaaagcttatgagatggcttcatgttttagtttatgacctgctctagcctacatagcctgaccacccttggtttgatgcctaaacaactcttagtaggctaaaagcattccagcttgattgctgcattgatagcagtgtaggtaaaactaagctgtggaggactttagttattgtgaatcaactttttttttgagatggagtctcgctctgttacacaatggcatggtctcagctcactacaccctctgcctcccgtgttcaagcaattctcctgccttagtctcctgagtagctgggattacaggcgcccgctaccacacccagctaatttttgtatttttagtggagatggggttttaccacattggccaggctggtttcaaactcttgacctcaagtgatctgcccacctcggccttccaaaatgctgggattataggaatgaaccaccgtgcctggcctattgtgaatcaactttaaaattttatgaaagtgctttgtgaactggaaatatgtggtaaaacttaacataccattgtgtgcagtggctaaaaaattgtttgtttgttttttgagacggagtatcgctctgtcacccaggttggagtggagtggagcgatctcagctcactgcaagctctgcctcctgggttcacgccattctcctgcctcagcctcccgaatagctgggactacaggcacccgccaccacgcccggctaattttttgtatttttagtagagacggggtttcactgtgttagccaggatggtgtcgatctcctgacctcgtgattcgcccgcctcggcctcccaaagtgctgggattacaggcatgagccaccgcgcccagccaaaaaattgttggataacccttcccataaggaataatgtatcattggtaaactgtgggaagttacgtggtctgagactaattaggctctaaactttttccaaggtgcttttaagacagtgagggcttttcttatttccctaagagattgtgtcccttccttttttgggacatttttgttttgattttttatttcattttgaaagtttttaataaactgtttaacgtggtatcacagtagcattcttcccaaaattttgtagatgagaaaacaaaagctcagagggttaactgggttgtccagtattactcagcatcagctagatggtatataaaggagctttcatctgaagtcttttgactctgcattgactgtttttttttttttctctgaagaagtaaacaccactttacattagctcttgcattaccatggcctgtaatttccttagcctactgtaaagttatgaatactagaataacaaaaattaatttactttaggttaaaggaaaaggtgcttctggaagttttgttgtggttcagaaatcaagaaaaacacctcagaaatccagaaacagaaaggtaagacatctataccacagtttgagtgctgtggagctgttactgctactaaaaatagcaacattcattgagtgtttgctgtgtgcctggcactatgcaaggttcagcctttctgctaaggcctagggaagttataaataatttgttcctctagtgagtagaatagccaaggtgcagatccaagcagtccaacctggttaagcctgtgctcttaagtgccttatattaaattatgggcagctatataaattacactgttttttgttttgagatggagtcttgctctgttgcccatgctgtagtgcagtgacatgatctcagctagctgcaacctccgcctcctggattcaagcaattctcctgcctcagcctcctgagtagctgggattacaggcactcgccacagtgcctgactaattttttttgttagtagagacagggttttaccgtgttggccaggctggtcttgaactcttgacctcagtgatctgcccgcctctgcctcccaaagtgctgggatttacagggtgagccattgctcccagctgaattatactgctttttgtgaaatatcttttaaactagaggaggtataagagtcctctgtttttttgtttgtttgtttgtttgttttcttttctaagatagaatcttgctctattgcccgggctggagtgcagtggcacgatcttggctcactgcaacctctgcttcccggattcaagtgcttgtcctgcctcagcctccccagtagctgggactgctacaggcatgtgccaccgttcccagctaatgtttgtatttttagtagagatggagtttcactatgttggccaggctggcctccacctcctgacctcaggtgatctgcctgcctccgcctcccaacgtgctgggatgatagatgtgaaccacaccatgcccagcctaaaagtacatttttaccaaatactagacccaaaaacaatacccagatccaatttttcttcctgtttttgtaaatactaacattcttcttcccaacacatataatttcatttgtgtaaagtatttctacaataataaagtgaaatgtcttgtactcatttatatcagaaattgaaataatatttttctacaccttttttttttgttttacaactctgaagctttttatccttttttcatagacttttcaaacactttcaaaatgaactttatgcatttttttctggtgctgtacttcataaattaggacctttaaaatctacactcctttttacttttatgtgtgttttttgtgtgtgtgttttgagacggagtttcgctcttgttgctcaggctggagtgcaataatgcaatctcggatctctgcaacctccgccttccgggttcaagtgattctcctgcctcagcctcctgagtaaatgagattgcaggtgcatgccaccatgcctggctaattatgtatttttattagagacagagttttaccatgttggtcaggctggtctcaaacttgagacctcaggttatcagcccacctcagccccccaaagtgctgggattacagacgtgagccaccacacctggctcctttttcttgttttgttgtgttttttttgtttttttttttttttgagacggagtctcgttctgtcacccaggctggagtgcggtggctccatcttgcatcactgcaatctccacctcccgggttcaagcagttcttgtgcctcagccttccaagtatctgggattacaggctacgacgtctggctaatttttgtatttttagtagagaggaggttttgcaatgttggccaggctggtctttaactcctgacctcaggtgatctgcccacctcggcctcccaaagtgctgggattacaggtgtgagccaccacacccagcttttatatgtatttttaatgctgtccattgaaaattttatatcaaagaaattgccataaaattgacaaatttggtaatcaactgaggaaagcccttgagttgtatgtagaaacatttacgttctataatgatcataatttttgataattacttttcagaataggagctctgcagtggatccagaaccacaagtaaaattggaggatgtcctcccactggcctttactcgcctttgtgaacctaaagaagcttcctacagtctcatcaggaaatatgtgtctcagtattatcctaagcttagagtggacatcaggtatgagccattggcctggcctttaaaacatgatgtgttacttcctttagctcccttttcatgggaaaagagatagattaaatactgaggaaggattactttcagctaaaaataaatcttttttattggttttatttttttgccccattatgtttttattttcatatctccatgtataattttttttttttttttttttttagttttttgagacagatttgttcttgtcacccaggctggagtgcagtggcaccatctcaactcactgcagcctctgcctcccgggttcaaaggattctcctgcctccgcctcccgggtagctgcgcctacaggcacccgccacgacacccagctaatttttgtatttttagtagagccaaggtttcatcatgttggccaggctggtctcgaactcttgaactcaagtgatccacctgcctcggcctcccaaagtgctaggattacaggcgtgagccgctgtggccagcctttttttttttgagatgaagtcttgctcttgttacccaggctggagtgcaatagcgcagtctcagctcactgcagcctctaactcccgggttcaagcgattttcctgccacagcctccgaatagctgggattacaggccccggttaccgtgcctggcctagttttgttttttgtgtggtttttttttttttttttccaaacccaaatcttatctttctttgtaagatcctggtagagtaactcttttaaatgttgtcagctgttaagatatgtagtattgaactgtgtatcttctcagatatgaaatatcttaacagttgacaacattaaaagagttactctaccaggtttaaaagaaaaaaaacaaaaaaaaaactaggctggctgtggtggtgggcatgtgcagtctcagctactcaggaggctgaggcaggagaatcgcttgaacccaggaggtggagttcgcagtgagccgagattgcgccattgcactccagcctgggcaccaagagcaaaactccgtctcaaaaaaaaaaccataagagtaaaaaggagtgtagactttaagggtcctaatttattcttagcctttaataactaaataatgaagtacagcaccagaaagtaatacataaagttcattttgaaaatgtttgaaaagtctgtgaaaaaaaggatagaaagcttcagggttgtaagaaaaaaaagtgtagaaaatactatttcaatttctgatataaatgagtacaagacatttcattttattatagaaatactttacacaaatgaaattatatgtgttgggaagaagaatgttagtatttacaaaaacaggaagaaaaattgcatctgggtatagtttttgagtctagtattgggttaaaatgtacttttaggctgggcacggtggctcacgcctgtaatcctagcactccagcctgggtgacagagtgagactcagtctcaaaaaacatatatatgatagatatatgcatacatatgtacatacatatacatcatatatatatttcatgagaattcaggcttcaataacacctgtacatagaaatagcataatgtttccatcatttaaacatgcagcataaaattctgagataattttgttagtaattgatacgtaaaatttgccatttaacgtcttgacagatcatttagattgtcacatttgctcagttgtagattcatgcagatatatcaatttgtttaaatttgtaattcacagactctgagagtgtttgtgtgagatgacttctagaaaattatgtttaatccagatttctgtctacagaagactaccatattgaatgcacattgtcccgatacagtgtagtaccagtatttacttgcattactgaggcatgcaattagaagtgctgaggtttcagtccagaagccacattttcagaaaatcagtagtggtcatcagaatgccaaattaaagagctagtgaaatagtgcaaaagaaaagggaattatagaagcagaaagttctaaattaatgtgctgatattttcatgcttcttatatgctgagtatagtggtagtaggcagacacaattgtggatcaaaaatgcgttatatgatgcatttaaagatggaaacatatttcactattctttaacaaagaataaagtttatttggctcatggtactgcaggctgtacaagaagcatagtgcaggcgtctgcttctagtgagggcttcaggaaacttacaatcatggtggaaggaggagctatcgtatcacatggcaaaaaagggagcaagagaggagggaaaggtgccacactcttaaccagatctcacactcttaaaacaaccagttgttttaaacaacccgctcattacggccaggaaggcacgaagccattcacgaagccatccctataactcagacacctcccactaggccccacctgcaacactggggatcatatttcacttttatctcctttgtgtgaccccaaaatatctgagacaggtctcagtcaatttagaaagtttattttgccaaggttaagattgtgcccgtgacacagcctcaggaggttctgaaaacttgtgcccagggtggtctgggcacagcttggttttacacattttagggaaacatgagacattaatatatgtaaggtgtatgttggtttggtctggaaaggtgggacaactcaaatcagggagggggcttctaggtcataggtaaataaaagacaaagaatttcattatttttgagtttctgattagctttttcaaaggaggcaatcagatatgcatttatctcagcagatgaatgacttgaagttctgtctgtcgtttgtctgcaaggattttccttgtgattaggggattcgtgattagggtttgtgattaggggatcccaagatttattttcttttcacagcctttattctctgctttttggtgagtggagaccatatcttcccccatttttttttcttgtagttctactctacttacataaggtagtgtgttgctaccagtgtgcctttgctgcacttcttttgaaacatattgtcatgaccttaggctgaaacaaaatttacctgataatggatgggttgtcaacccaaaggtgctaatgaacctgaagaccttttctcatggcctttttaatggtaattttttccattgaaacttttttctcttatgtgaaaccatattgattttctctaattcttgattataatggagtcctttcatatacacatttaacttgaaaattcagccattcttgcttggccaaacaaaagaggaagaaaaatacagtttcaccaaagtgtaagttgtctatactggtatctacaatgtctccccttccactttctccactttagtcagactttatccccaccactttacctgaatattttctgtcagtctccacgttggaaatttcagtggtcaattcatagtccttaccagctgccctctcaatggcatttgacacagttgatgactcctacctgcttgaaacattttcttcacttgccttccaggacaccacactttcctgatttttctgtaacctttttacccttcgtttctcaatctcctaaggatttctgctttacctcttaatagaaaggagccctcagggttataccttaggcctctcatcttttatgtccacattcacttggtgattcctttcacttgcaaaactgtaaataccagctataaactattaattcacaaatgtatgaatctagcccatacctcccttctaacttcagattcgtgtatacggatgcctgttcagcatcagcacttggatgtctgatttaaatgttgaaaacatttaatgatccccactctgctccctctccccccaaaaatccctgcatttcccacattatcttcatttcagttcatgacaatattatccttccatgtgctgaaaccaaaaaccctgactttgtgctggtctcttctctttatcagacacctttatctaatctataagcaattatttttgctctgtctttaaaatatatcagtaaacaggctgggtactgtggctcatgcctgtaatcccagcactttgggaggcaggtggatcacatgaggtcaggagttcgagaccagcctggccaacatggtgaaaccccatctctactaaaaatacaaaaaaattagccatgcatggtggcacgtgcctgtagttccagctactcaagaggccaaggcaagagaatcacttaaacctgggaggcatagtctgcagtgagccaagatcacaccactgcactccagcctgggcgacagagtgaggctccgtctccaaataaataaataaaataaaatatatcagtaaacagactacttgtcatcacctgcactaccattctcttccaggccaccatcatctctcacctgtattagagcaataacttcttaactgcttttttcatgctccctttcagtatgttcttaccatcatagtgagagtgagacttttttaaaaatgtaagttctatcactttttaaaatttatttatttatttatttgagaaggaatcttgttctgttgcccaggctggagtgcagtggcatgatctcggctcactgcaacctccgcctcctcggttcaagcgattttcctgtctcagcctcccgagtagctgggattacaggctgtgccaccacacccgggtaatttttgtatttttagtagagacagagtttcaccatgttggccaggctggtctcaaattcctggcctccagtgatctgaccgccttggcctaccaaaggattacagacgtgagccactgtgcccagcctgtcacttttttttttttccaagctggggtcttgctctgttgcccagactggagtatagtggcaagatcgtggctcatggcaacctcgaactcctaggctcaaacgatcctcccactgtggcctcaaaagtagctgggactgcaggaatgtgtcaccacacacagctagtagtttttaaattgttaatagagacagaatctccctacattgcccagactggtctttaactcctggcctcaagtgatcctcctgcttcggccacccaggtgttgggattacaggtgtgagccactgtgtccagtgtcatgtcgcctttctactcaaacattcagtgtcttcccaatcccgtcacagttaaaaaatcagtctgtagggctgggtgtggtggctcacgtctgtaatcccagcactttgggagtctgaggcgggtggatcacaaggtcaagagttggagaccttcctggccaacatggtgaaaccccatctctactaagcatacaaaaattagccgggcatggtggcacatgcctgtaatcccagctactcaggaggctgaggcaggagaattgcttgaacccaggaggcagaggttgcagtgagccgagattgtgccactgcactccagcctgggcgacagagcaagactctgtctcggggcaaaaaaaaaaaaaaaaaaaaatcggtctttaaaatggcccacaaggcactacactcacttgtatctctgacctaagctactcctcttcactctctcactggtctcagagcctttgtgttgcattccctttacctgaatgtatttttccccataagccactttgccagttcctttacttccttaagtttttagtctgatgtcatcaccaaaggcctgccttgactatttttattattcttgttacttgggcatataaacaagagaaatgtatttctcacagttgtgcagactcgaagtctgagatcagggtgccagcatggttgggttctgtgagggcctcttctgggtgtcagagtgccttcttctcattgtatcctcacatgacagaaggagcccttaatactttcttaaatgttttattttggaaattttcaaacatatacaaagaaggatagagaacattaaccatcatacttaaatcattcttttttttgtttggagacagagttttgctcttgttgcccaggctggagtgcaatggcacgatcttggctcaccgcaacctccgtctcctgggttcaagcaattcttctgcctcatcagcctcccaagtagctgggattacaggcatgcgccaccacacctgactaattttgtatttttagtacaaatggggtttctccatgttggtcaagctggtgtcaaactcccaacctcaggtgatctgccggcctcggccccccagagttctgggattacaggtgtgagccacctcgcccggccacttaaatcattcttaacaaaattaataatttcttagtattatctagtacccagtccatgttcaaatgtccttaattgtctccagaatgatattttacagttgtttttcctaacatggcccacacgttgtatttggttgataatgaccaaccaaaacctctctcccagccaggtgctgcggttcacatgtgtaatcccagcactttgggaggccgaagcgggaggatcgcttgaacctacaagttcgagaccaggctgggcaacatagtggaaccccctctgtacaaaaaaaaaataacaaaaattagctggtgtagtggcatgtgcctatagtcccaactactcgggaggctgaagcagcggaagggttgcttgagcctgggagatcaaggctacagtgagccatggtcataccactgcactccatccagagtgacacagtgagatcctctctcagaaaaaaaaaaaaaaaaggccaggtgtggtggctcacacctgtaatcccagcactttgggaggctgaggcgggcagatcatgaggtcggaagatcaagaccatccttgctaacacagtgaaaccccgtctttactaaaagtacaaaaaattagccgggcgtggtggcacgcgcctgtagtcccagctacttaggaggctgaggcaggagaatcacttgaacctgagggggcggaggttgcagtgacctgagatcgcgccactgcactccagcctgggtgacagagggagaatgcgtctcaaaaaaaaaaaggagtgtttaacccatagggtttaagtctcttagtatgtgcgaagcacttcttagaatagtccttggtacctagtaaatgttcaactaatgttattcttactagtctcagttccagcttctcatagtatgaccattacagcatgctaaataggattctaatatttaaagacataatttttttgttttgttttttattttttatttttgagacagagtcttgctccgttgcctaggttggattgcaatggcatggtctcagctcactgcaacctccgcctcccgggttcaaatgattctcctgcttcagcctcctgagtagctgggactacagttgcctgacaccacgccccgttaatttttttgtatttttagtagagctgaggtttcactatgttggccaggctggtctcgaactcctgatctcgtgatccacccgcctcggcctcccaaagtattgggattacaagcgtgagccaccgcgcctggccaagacattggtttttaatataacatgcaagtcaccttcttaatttgataacagtgatttttttgcaaccctagaagaagaactgggcatattgggtatatagagactcagagttggccttgaagaaggtgtctttggaaattttctaggtctgtcatacagcgttagaagtcaaatgttaaaatctaatcttcagccaggcgtggtgcctcatacctgtaatcccagcactttgggaggccgagtcaggcagatcacctgaggtcgggagttcgagaccagcctgaccaatatggagaaaccccgtctctactaaaaatgcaaaattagccgggtgtggtggcgcatgcctgttatcccagctactcgggaggctgaggcaggagaattgcttgaacctgggaagtgaaggttgcagtgagccaatatcgtgccattgcactccagcctgggcaacaagggcaaaactccacctcaaaaaaaaaaaaaaaataataataataatagtaatcagaactctagatctgggaataaccctgtatctatttctttacatttttctttcattaatgtatttatcactattttttttttgtttttctttgcaggcctcagctgttgaagaacgctctgcagagagcagtagagaggggccagttagaacag

SEQ ID NO: 15615 - DNA, 47042 bp, Homo sapiens
agagctcggcggctgggactggaggacagcggtggcggaggcgactagcggcggcgggagcggcgccgagaggccgtgcgggacgcgggcgccaggaccggccgaacgcagaggtaacgcaggaccgaacaggcggccggggagtgggcgcgggctcgctgggccccgaaggcgagtggcggaggccgctcgcccggggcgccgacgccgctcccagagaggagggggcggggcgcccgggtccccggaggtggcgccttttgtctgccttacccggccgctccgccccgctcccttcctctctcctgcgacctagccccctgcccttttggtggactcctcctcaggggccctccggcgcgcgcgctcccgcccttgttttgtttggatttgggggaggagggggagctcttctctggccgtgcgaccctgcgtcccagcgcgcctgcgtcggcgtcctctgcccgccccgattggctgagggctgcgcatgctccgaggcccgccgcggtccggcgtccgcccgcgccctcccctcaccccactccctcagcggttttcggagccggttcgaaagatgccggcggcggtgactggctgcggcgggcccgccccccgggttctccgcccccgccgccgccattacggagctcccagtggtgagtgtgcggagcgccgaggctcgcgttccgccgctgcttccgtcgccggggcgggcgccgcggtgtccctgccgagcgtgagccccgaactgtcaccgcgccgagccccagcctcatccgtcggtgtccgcggtccgagctttccccgcctcgctggcggcccgcgctctcccccgccgtgcgcgttcgccgctgtggcctgtagctacctcgcctcgctgctttgtctccgctgctcttgccgtccttcccgcggccttctgcgggcggggctgtcggctgtcgctttgctgctccgcgacggcggccttgagtctcgctcccccggtgggaaacgtagaactggttactcgccaccttaggcggtggggtttgaatgagagcggtgcctcggtaggtcgtcagaaagttacagtcgcccatctgagcgtttgtaagagatggaggcaggagtggtgaggtgagagccccagatctgagggttggtactgcattaacagctgtgaccggggacagccacttaacctttttgagaaagagttgtctcccgtacggagaccggaccgggtgaactgtgctgccgcatccgcgtgcacgttctctctgttgtttattgtgcttcctgactttgcattgcattaaaaagtgagaatccaattcgaaataacgtctaaaaatcgcctggggctttttgagcacgctgtcttgtcttagagtgaaattagaggtgactagtgtcatttttgaaaggtgctctaattttgtttaacctgacataggcaaaaaacttgttagctttttgatttttcattgctcttctcaaaagtttagtgtaatttgtttcaaaatagaagtaacattttaaagtttgctgggttggttggttttggctttgtttttaagcttgcttggaagattgtagggctggaagttagtggagaacgtatactgaactcttcatttccggatgaaagttttaactccttacccagttagattgtgattttattgagatgagacactgtagtgtccttagtatctatgcccaaaacagacactgagtatatgtttgcttatataacttacatttgaaaatgaaaaacaagtggtgtcagcagtcaaattacaggcatgctttttgtgacatgactcgttaaatctgagtgtagtgaatgacttaagattgggaacaatgtgaggtgttcagcgcatcactaatgacatgtattacatatattttatggtaaaatgtgaaattatagtgctttccctaaaatgcatattatcaaggatatcagtaaactgaaatacgttgttaaactcctcacttttctacagccttctcttaatgtagaggaaataaattaaaactgaaatttggggctttttatttctacaatacttttttttattgcttgcattcaaataatttaaagccgtgcatggtggctcacacctgtaatcctaacactttgggaggccaaagaggaggatcgcttgaatccaggagttagagaccagcttgggcaaccctgtctctacagaaaatacaaaaactatccggctgtggtggcgcatacctgaagtcccagctactcaggtggctgaggtgggaggagatcgcttgagcccaggaggtcgaggctacagtgatccctggtcatgccactgtactccagactgagactctgtctcaaaataaacaaccgatttaatttaagcatttcccttgacaaaaagcaaatatttgttattgttgtaacattaagtttaagcaagctgatgttcataagaggaccatgtaaaccacaagtaaactcagactgtttatttttggcacatataaaaaccaagatgaaaaacatgaataggccgggcacggtggctcacgcctgtaatcccagccctttgggaggctgaggtgggcggatcacgaggtcaggagatcgagaccatcctggctaacacggtgaaaccccgtctctactgaaaatacaaaaaattagctgggtgtcgtggcggacgcctgtagtcccagctactcaggaggctgaggcaggagaatggcgtgaaccgggaggggaggttgcagtgagccgagatcgcgccaccgcactccagcctgggcgacagagcaagactcggtctcaaaaaaaaaaaaaaaaaaaagggaaaacacaaataagttttatttgttcatcctttagtttaacaaatattaattgagcatctattctgtgcctggtatgttcttaggcatcaggtatgcagcaaatgaaccaggtagataagatccctgccaggaacaagtgtggcagcctcaaaatttgatcattcagagtgcaatagtaaaaagtttagttaataggtacactgggtcagatgcagtggcttacacctgtaatcccaacacgttgagaggccgaggcagatggatcgcttgagcccaggagtttgtgaccagcctgggcaacatggcaaaaccctgttgatacaaaaaagagaaaaattagccgggcatggcggtgcgtgcctgtagtcccagctactagggagactaaggtgggagagtcgcttgagcctgggaggttgaggctgcagtgagctgtgatactacaacctgagcatcagagtgagaccgtgtcttaaaacaaacaaacaaaaaacataggtacagtgatgttaaggcagtgtgaattaacgttgcatatacttagctctgtaatgaacagtgagtttattaaatagccaattaacccaactattctaaagcaggtactacagattgaagctttgaagttctatgactttgacttttattaaggaaatgcagagctgaggctaacatctctttttttttttttttttttttttttgagacagagtctcacactgttacccaggctggagtgcagtggcatgatctcggctcactgcaacttcggattcccgggttcaagtgattctcctgcctgagcctcccgagtagctgggactaacccaactattctaaagaaagtactacagattgaacctttgaagttctacagcttttactaaggaaatgcagagctctaacatctctattttttttgttttttttttaaattgttgttgtttgttttttgagatggagtctcactcttcacccaggcttggagtgcagtggcatgatctcaggtcactgcaacctccgcctcccaggttcaagtgattcttctccctcagcctcctgagtagctgagactacaggtgtacaccacagcgcctggctaacttttgtgtttttagtagagatggggtttcaccatgttggccaggctggtctcggactcctgacctcaggtgatccctgcctcagcctaccaaagtgctgggattacaggcatgagccactgtacccagccctaacgtctcttaatatttatcccaaataactgggttttaagtgttcttcacacataatgaatgtagtcataagtactaccagatgtctttgttcattcaacttttattattattattattattattgagccaaggtcttactctgtcacccagactggagtgccgtggtgcaattctagctcactgtagcctggaactcctggacactggcagtcctcccatctcagtcttccaagtagctgggactacgggcatgtgccacagtgaccagctaattttttatcttttgtgtgtgtgggttttttctttctttttttttttttttttttcttttttttgagaaggagtcttgctctgtcgcccaggctggagtgcagtggcacaatctcggctcactgcaatctccgcctcccaggttcaagtgattcttctgcctcagcctcccaagtatctgggattacaggcgcgcaccaccacacccggctaatttttgtatttttagtagagacggggtttcaccatactggccaggctggtctcgaactcctgaccttgtgatctatccgcctcggcctcccaaagtgctgagatacaggcgtgagccaccatgcctggcccttttgtgtttttttttaaattattatttttttttcttgaggcaggctctgctctgtcacctaggctggaatgcagtggctcgatttcaggttactgcatccaaaaccttctgggctcaagcagtcctcccagtctcagcttcccaagtagctgggactacaggcgcatgccaccattcccagctgatttttaattttttttttttagagacaacgtctgtattgcccaggctggtcttgaactcctgggctcgagtgaacctcctaccttagcctcccaaagtgctgggattacaggtgtgagccaccacacctggcctgtttttaaattttaatttatttacttttggtaaagaccaagtctaatgttgactaggctagttttgaatttctagcttcaagggatcctcccacctctgcctcccaaagtgctggggttgcaggcatgagctactacaccaaatgggaaagtatttttttaaagatgcctatgaacggagactcctgaaggttgttgacttcacggtagcattttcagcctagctagtgttatcgtgggttaagaaagataaattcattagcaatataactttactaaggataacctgattgtgatattgttttatttccatatcatatttgcatgtaaaaataccagcagatttgcataaggctttttatcattaagaaaaatgggccgggtgcggtgggtcacgcctgccatcccagcactttgggaggctgaggcgggcagatcatctgagatcaggagctcgagaccagcctgaccaacatggtgaaaccccatctctactaaaaatacaaaattagctgggcatggtggcgcatgcctgtaatcccagctactcaggaaggtgaggcaggagaatcgcttgaaccaaggaggcggaggttgcagcgagctgagatcgtgccaccgcactccagcctgggcaacagagcaagactccgtctcaaaaaaagaaaaaaaaaatttaatattaatggatattctggttccctaagtatgagtgtgttacactgcactgaattctttcagctgactgaaagatttccttgcagctgactgacaattgacaagtctggtattgttcttggtgttcccataaaaatattttcccgataagtgtgaatgcatcctctttgtttcaatcttccggatttatcctagttgttgtaggttgggactgttacttgccaagttgaaagctcttcaattcttagacaaggttagaccttaatgtagaagttgcatgactgtcattccctactcattgttaatagttcattagcacagagatctagatacttaagtggtcttttttttttatattgaggaatttttgtataaaatgtcattgagtctcagatgagatttttggggaagagggggtgttagtgatcaggtaaacttgggtgactgcatgggtttttatctttgaatatttaattatattcttctgtactagttttccttacattaaaaatatgacagtcttagaagcatacttttattctcctaggtgatggtctaaatttgcttctgtgggtctggaagctattagaatgtcatgttattcagcagtatttttccccttgtgttttcccttaatagaaggaaaaaaaaagtactttaatagagatagagtttaagattacagttaattttcctgactctttcgagaacagtaacaacaaaagccttctcttggtaaactgatctttgactaactgttccttagtctctttattctatccttctaagttcctgatggtggcaggaggggatggggttaggttccttaggagcttccttgcccttgttgtctttgttcatgtggaaggtgcaacagctgccgtggcttatgcattcgtcttagttgctgctttatgtagtctatattttggtagttttatctttctgagtaaccaaatcatctgtcacttacctataaattttatagttatattttttccctttggatgtgtattaaatttagacgttttagtttagttttgtttctgttaatcttcacaccaggtcttttctgtgctttaggttgattcttcaccacactgaaaccattaggaaaaatccttgtggttaacagcagaggcttcagagtgtaacctgtactcgggcctagaaattatttaaaatggcgactgatacgtctcaaggtgaactcgtccatcctaaggcactcccacttatagtaggagctcagctgatccacgcggacaagttaggtgaggtaggggctgacacattcttgaagctcactcttggatcaatccctgacttcaggccctgctgggtccttcttggtacatgttccttcccttactttggggagtctaggttgtgaatttgaaacaaaatcagattcttttcatcttccctttcccctcaaattcctgagaaaacctccaaccttctaaatttatagcaaatcaactataattatgtgtttccatttgaaattcaagctaaaataacatactttaaaaagtgtatcttaaaaatcatatttcacttcaaaaaaaacttgttaaaagtaatttgcatcagatcctggagtcgacttgaagaattctcctacatctgacacccagttaggccctttgagaaagagagaaaagagaattttttaatgcatgtttgattatggccatctcttttcttagaaggtagaagatagcaccatgccgattcgtcgaactgtgaattctacccgggaaactcctcccaaaagcaagcttgctgaaggggaggaagaaaagccaggtaaagtaaaatggtgacacagcttaaaacatcaaaagttatactgcaatttggagtgtcccataaattcctttgaacttaattgtttttttttttttttcatggctaagtgttttggggaaacatttagagagaatcagtagctattggtatgtcattgccagaccatgagggcaaagtaaggtttcatcttctctataaaggtttttggaaggtgaaaatgttatgttggaattaaaaacaaaaatgtttggggatgacaggaatggccagagagtagcattctggacataaagtgtcatggggatcagtgcagtgtgggagaatggaaaacgtgggcctttagaatagacagtggaaggttcatccagaaatcatctggaggccttcagagaagcaaatggtgatctgttgatctataacaggtattggtagagagaagattggccagtcagtggtgggagcataacaaatggaaagaaacatagacccatcaacatggagtactaatgctcctttatggcatgtataaccacctcttctccttttcccgtctttatttttcttctcatgatctttttggtttttttccttatcttttcccttttttcctttctctcttgccttttatctcaggtttttcagggataagcacactgtgctgcctctgttgtggctgttagaatcaattatttgctgaccagcatgtattaggaatagagggccgggcacagtggctcacacctgtaatcccagcactttgggaggccaaggagggcagatcacctgaggtcaggagttcgagaccagcctggccatcatggtgaaaccccatctctactaaaattataaacattatctgggcatggtggtgcatgcctgtaatccctgctactcaggaggctgaggcacaagaattgcttgagcccaggaggcagaggttgcagtgagctgagatcacgccattgtattccagcctgggcaacagagggaaactgtctccaaaaaaaagaaaaaaaaaaaaaagaggagtagaaaatacatgcatccttggtgcatcagggcagacatcaataaccagtcaatatactcttttctggctgagcctggattttttctctaaatccttagatgaatgctataagcaatttgggcaccctggcctaaggcagttaagaaacacgggaatccaaatatttaaaaaagtaaacgggtgctggtaagttgaagataggttatcttgtccagcactgggataagccacttggtggtccatcttaatccatgtttaacagccagctgaagccactaaatcactaataacatcagttttcagaatatatgccagagggttcagatgtaaagtattagaaaactcaaccagaagtttatgaagaaacagtgtcacttcacaagttgtatgtttgtttaatcttctctctatcccattttgtacacagtattttgtacatagaaattagacttcacttattttaaattttgtaaactctatgttttacacagaaacacagtagtttaatgagttggaaacagtcttatacataatacatattcaatatctgttgagtgactgaactttattaagccataactcttgagcagttattcttgagaagagaaaataatgtaaatttataagtcttactaccgtaaaacccctgaatgattcttagcttttcatcttttttagaataagacaaagtgtaaataaacatgactaactaatagtaaattcttgcccatgcagccatttaggtcaaattgttgggttgaggggcagtaaaagatatatcatgatgaaaaatacattttattgtggaaaacctaaatgtagttattatctttatccccagataccattgttatagtgaagttctatccataatactttgtcatcctaagcatatgggaaacaattctagaagcagagaattccaaaggaggatggaaatcactcgcttagtataagtgttagaattgtacttatgtgatttggttttaagaaagaagtggcattttaaaattctctttatagctgggcgcggtggctcacgcctgtaatcccagaattttgggaggctgaggcgggtggatcacgaggtcaggagatcgagaccatcctggctaacacaatgaaaccctgtcactactaaaaatacaaaaaatcagctgggcatggcggcacgcacctgtagtcccagctactagggaggctgaggcaggagaatcgcttgaacctggggaggtggaagttgcagtgagccaagattgcgccacagcactctagcctgggagacagagcgagactccgtctcaaaaaaaaaataaataaataaataaaattctctttatgggaaggccacaaagaagtcctcgtcattattgcaataattagttcacataatttaaatgatcaaattcttcaagcatatactttggcttgaagtatatgcttgccactggagtcctttttctttcatgttttttttattttttttatttttatttttttttggagttctctgaagtccctgcataaccagtgcctggggttctgtgttttatagtagctactcagagacatgctgtgaaggaaaggcacaaatagcagcagacctccatgttcccctcatatttctactcttgcttcagtcattcctcttggagaatacatgagtttttaaattacttattctctgagatttgcctgttgaattataaaatggctagtttcttaattatgagtctcatgaatattgcaaagtagaataattaaacaattggggatgaaatgagttttcctttctatgtaatttcctggtctatttttctaataatagataaataaccacctgaccaggaaacttgagtgacataaagaatgtaagaaaactgcattagtggtcattcattttcattttagaattcatttgttaattggagactttggctggtccgtttaataagataagcttttaccttttattgactcagattggaatacatctgcttatgcaattctgctcacctgattttttagaaccagacataagttcagaggaatctgtctccactgtagaagaacaagagaatgaaactccacctgctacttcgagtgaggcagagcagccaaagggggaacctgagaatgaagagaaggaagaaaataagtcttctgaggaaaccaaaaaggagtaaggagttatgtcttcttgctatttatatttgaagaatgtgtaaaaggactttagattagattgttttaaagtgttataacattggtttatgctaggtatttgctatttggatttaatttttagaattaccatttgaaataggtttattatatagttgtttgacctgttagaatatgctgtagttagcagaacacaatggtttgaataatccaaaagtctttgtcattggctttggaatgtgtttttgagcttgtaatttattgtgggagtatctgatattttaagcattggcaagacttcaataagaaatgaaacataactataaaaatctgacctagaagacatttcactattttattcctacttctgtgccaggagtgggttgtttttgtgtgcttatgttagaaggcattgatttgtatcaagccattggtagtgtgacctaaaagtctatatatgtttgatgaaatattcagttgaagaattggctttgagaatctgaaagtaaaatttgctattgatgtgtatctatataaagtgatggcagttactttttaatttttaatttttttttttttttttttgcaggagagctgatagtattcattccactcttttcataattggtcagaacagttagaaattgcttttaactatagtcatgcattgcttaacaatgggtatacattctgagagatacatctttaggcgatttcatcatcgtgccaacatcataaagtgtacttacacaaacctacgtggtacagcctactacatacctaggctttatgggatagtctgttgcttctaggctacaaacctgtacagcatgttactgtactaaatactgtaggcagttataacacaacggtaagtatttgtgtatttaaacatagaaaaggtacagtaaaaatataatataaaagataaaaaatggtatacctgtgtaggacacctaccatgaatggaccttaaaggattggaagttgtttgggtgagtgagtgagtggtaagtgaatgcaaaggcctaggactactgtgtgcaacttttaaaactaaaaagtttttatttttagcaacttttaaaactaaaaagtttttatttttaaaaacttttaaaactttaccaaaaacaaagacacaagccggacgcaatggtgcacagctgtagccctagctacttaggaagctgaggtggggggattgcttgagtcctgaaatttgaatctagattgggcaacgttgtgagacctcatatttataaaaaaacaaaactaagacacatacacacaccttaacctaggcctgcacaaggtcagggtcatcaatatcactgtcttccacctccagatcttgtcccactcaaggccttcaggggcagcaacacacatggacctgtcatttcctatgataacagtgctgtcttttggaataccttctgaaggacctgcttgaggctgttttacagttaactttttttttgtaggtagaaaacatatactctaatgataaaaagtatagtatagtaaacacataaactagtagcatagctgtttattatcaggtattatgtataattgtaatgtgctttttttttttttttgagatggagtcttactctgtcacccaggttggagtgtggagtgcagtggcgcgatctgggctcactgcaacctccacctcccaggttcaagcgattctcctgcctcaacctgccaagtagctgggactacaggcgtgcacctccacacctagctaatttttgtattttcaggagagacgggggtttcaccatgttggccaggatggtctcaatcttttgaccttgtgatccgcccaccttggcctcccaaagtgctgggattacaggcatgagtcaccgcgcccagccaatatgctatatttttgtatgactggcagcactgtaggtttgtttacaccaatgtcaccacaaacaagtgagtaacgtgctgcgctgtgatattaccacagctatcatgttaaccaggtaataggaggttttcagttccattataatcttaagggaccaccattgtatatgtggtctgttgaccaaatattgttacacagcacatgaccataaaagaataacttagtaataactataccttctagctataatcttcagggtattctttatctgagtttcataagtatagctaaggtctgtggaatttatagcaactatcgtgtgtgggtgtgggtgtgtttgtgtgtgtgtgtgtgtgtttaatggagatggcgtctcactatgttggctaggttgggcttgaactcctggcctcaagctgtcctccctcctcagcctcctaaattgctgggattacaggcatgagccactgcacccagcctatcgtctgttgttaaatgttctaatgcacctattaggtgcacagagtactgttatatactcagaataaaatttacataatgctttaaatctcacaaaattgttttgataaacatactcttataattcttgcaacaccttgggaaatagttggttctatattactgttttatagctgaggagaaagactcacatcatttactaagatcatatagctagctagtaaatgtttgagtgaaaatacaaacaaaggttttctgactttaagagcttgagttttttccactataccatattgcatctgttgtaattgttaactaatgtgcattttaaaattctcatttgtcttatgtactgagcccttataccagtgctaatttatgtgactcctttctcctgcagctaagagaaaaatacctttttaattcatttatagtacccagtttttaaagaagatttattttgtaaaattttgcttatggtacatgtcatcttagcctgtaaataaattaaagcattaatttttatccctccctggtcttttcctccttctgactttatacgtctttctagagagcttatcttctataataacaattctttgttttaaagtgagaaagatcagtctaaagaaaaggagaagaaagtgaaaaaaacaattccttcctgggctaccctttctgccagccagctagccagggcccagaaacaaacaccgatggcttcttccccacgtcccaagatggatgcaatcttaactgaggccattaaggcaagtttttatttcaagcaattcatcttagatttattatgttcatttttttcttatttgaaaatggcatatatctgtctagacatcataaatcttgttctgcttcctaaaggagttttaaagagaggaaagtcattataagttcatgtttttctaatataatcacatttggtgaacactgttaatttttttaaaaaaattatatttaatatagcaaatattttaactttagaatttttaaatgcagtttatcgattaagtacagtttttatttgaaggctgaaaatgttaattcattgaacaaacatttaaggactaccttcctctgttgggcgcccctgctagtggtgaattaactaaggctagcaaagtccttgcccttataaatctaattgtgactcagtaactgaaaaatattgagaatttttgtttaaaaaatatctctaggttcatttctaaagctaagtgatcttggtagtggttatctttcacacctgaaccctgttaataaacactgctttattacctagacattccaaaatgcttacaaaaattatcctccttacatagatttatgatttcattgactttcattagatgtagttttcctattttaatttttaaaggttatcttctaatttgacattgcctttattgtataagtcttttcatttaattttgccttgtttagttcatatgatcagatgataagaggagttagaacagacccatctttcagggaccctgttgttaggatctgaggcaggactggggagacagggatacagatgattttaaccagaaaaggggggatgtgtacgaaaaggagcagcctggttgtcattctcagaatatgagaagatagcactaacacataaactggaaaaagggtttgccttcagacttctccctttactccttcaagacttcttatgctctcacctcattaagaaaactttattggtctagattacctcactgtagtgaaatctctgttctttgtatagcctttcttcaaggatttcacttgatgaccactcagcctgggtttgaaggagcagcatcatagtgaggatggaaaaagggctgaaactttaaaatagtgaaataaaaaattaaaacaatatcaatttggcttaaagaatggtttgaatataattgtgcatatttatggagatgattgattttatatagataatgtgtattccatgcaatatgacaaattattgtttcagaccatggataccattttctgtattgaacaggaatcatgatgtctactaccatctcactgtcggattggtggagcaaaagattatttgtttcagcattagtgttcttttctgcttgattttctttgctctgtgttttcttttaagatcaggagtaaacctcagtaggtcattaatagttcagagacatagacttgaattacatgacccatattaatacaacttgtttcgtgttgtgcaatcttttctggaccatctacctgtgagttatttttctttgttgtcaaaatgtataaaaacattcaacgaagttcttatccaatgagaatgaataagtgctacattgatttaatagacactgtggcagtacaaaattgatggactagctcattagataaatgacagatgctacttttgtgtgtttcaaaatttaaagtatttgatttcaagtcagtgaccagttggaaaacaaaattttaagcatttgaaaaaaattaagtatttgctgcctttgtgacataatgagctacttaattcttccaggtgcattagtcaaatggagtataagtaaaataggatggaaatggaagagggcacattaaattcaaatagaacaccttcactattacccaaaactctccttcagcactttgccatctgtaaacccatttttatgccacttattcagattatctttgattcttctttctgctgacattcatacagagccttcagggaaatgtcctggcatgctcattccttaagctcgtgccttaaaatgggacagatctgtgatcctgtaagtgataggtttgttctgcttttctcattttgatgccaaagattcatcttctaaatacagaatggaattaaaatggaaagaggttcttcattatacatagaatgttgttcgtgttcagtatggtctcttaggctgttttgaacaatttaaaattgtagtagaaatatttagtaattctgttacttctctgtagtcattatgaactgaagtcttctgaagttcattcttccctaccgtttttgtcatctatcatcaaattcacttccaaaataatttattttgaaaatatatgtcaggctctatctaataaaaaaaaacaactagtttaataaatcttttctaggcatgcttccagaagagtggtgcatcagtggttgctattcgaaaatacatcatccataagtatccttctctggagctggagagaaggggttatctccttaaacaagcactgaaaagagaattaaatagaggagtcatcaaacaggtattacacaattgttagtagtaagatcatttcattgtgtattagctttaagtctacagttagtaacatttaggctttttgtgccttttttgttaaaaataagtttcatgatgatgaaattccttaagtttaacctagttgaattatctgaggctaggtttcgaaaatgctggtgccattaagatagtgtaacttttttctagcttactttgctcttaattggatattttttggggggctgcttgtgcttgaaatcatgtagcactgaacatgaaaaagaggtaaggaatcctactactgaaacagcaaaaatgaggctagggatggtggcctacacctgtagtcccagcaccttgggaggcttagttgggaggatcacttgagcccaggagttcgagaccagcctgggcaacatagcaagaccccttctctacaaaaaatacaaaatcagcagggtttggtgacacatgcctctagtcccaggtacttggaaggcagaggcaggaggaccgcttgagcctgggaggttgaggctattgtgagttacgatctcaccactccagcctcggtgagagtgagaccctgtctgaaaacaaaaaggaataacagaaataataattgcccttgtcttaggtttgtttcctttaaagcctaacttacatgatagacttgttactattaatttttagcttcataaatgtgctcaccttaactgattagtatctaaactattaaagcctgttaagagtatcagagaaacccgagtgaaatgtgactagtactagaacaaatgttgatttcaggcataaatctactttatcttgcatagtgcatggaaacttagaaccatagaaatctaaagctagaataaactttatattatgttaccctcttcagaggtccagagtgatgaaataactgctaaggtcttacggtagtggcaaaaattttaaaaacctagttcaccccattcctagagtcttgttaagttttttctataccccctgcctgtttgatcagaacagaattctgtgccactcaggcatttcagctctgcttagggacttccaactagtacttaattgcacagatacgtcttgtctcctatgtgccagttgcctggaggtctgttagtgaataaaacagattgctgctctgtggagctaggagtccagctttctcaaaatgtaaaactgatatttaaatggcctttaaaattatcactgacggccaggcacagtggctcatacctgtacgctgaggtgggagggttgcttcaggccaggagtttgagaccagcctgggcaacatagcaaggtgaggccctgtctctacaaaaaaattatttctttattctattttattttactttttgagacaggatctcactctggcccaggctggggtgcagaggtgcaatgtcagctcaccgcactctctacctgctgggctccagccgtcttcccacctcagcctcccgagtacctgggactataggtgtgcaccagcacacccagctaatttttgtattctttgtagagacaaggttttgccatgttgcccaggctggtctcaagctcctgggcccaagtgattcacccacctcagcctcccaaagtgctgggattacagacgtgagccaccatgcccagcctttacaaaaaacttaaaaattagccaaatgtaggggtgcatgcctctagtcccaactcatgaggctgaggcaggaggatcgcttgagttgagctatgagctaacatagcaatgagctatgattgtgccactgcactccagcatgggtgacagagtgagaccctgtctctaaaataaaacaaaattatcgttgactaaaaagtcttacctagttaatataattattagagccaaggacctgttgtgtaacatgtcagcaaagcttatgagatggcttcatgttttagtttatgacctgctctagcctacatagcctgaccacccttggtttgatgcctaaacaactcttagtaggctaaaagcattccagcttgattgctgcattgatagcagtgtaggtaaaactaagctgtggaggactttagttattgtgaatcaactttttttttgagatggagtctcgctctgttacacaatggcatggtctcagctcactacaccctctgcctcccgtgttcaagcaattctcctgccttagtctcctgagtagctgggattacaggcgcccgctaccacacccagctaatttttgtatttttagtggagatggggttttaccacattggccaggctggtttcaaactcttgacctcaagtgatctgcccacctcggccttccaaaatgctgggattataggaatgaaccaccgtgcctggcctattgtgaatcaactttaaaattttatgaaagtgctttgtgaactggaaatatgtggtaaaacttaacataccattgtgtgcagtggctaaaaaattgtttgtttgttttttgagacggagtatcgctctgtcacccaggttggagtggagtggagcgatctcagctcactgcaagctctgcctcctgggttcacgccattctcctgcctcagcctcccgaatagctgggactacaggcacccgccaccacgcccggctaattttttgtatttttagtagagacggggtttcactgtgttagccaggatggtgtcgatctcctgacctcgtgattcgcccgcctcggcctcccaaagtgctgggattacaggcatgagccaccgcgcccagccaaaaaattgttggataacccttcccataaggaataatgtatcattggtaaactgtgggaagttacgtggtctgagactaattaggctctaaactttttccaaggtgcttttaagacagtgagggcttttcttatttccctaagagattgtgtcccttccttttttgggacatttttgttttgattttttatttcattttgaaagtttttaataaactgtttaacgtggtatcacagtagcattcttcccaaaattttgtagatgagaaaacaaaagctcagagggttaactgggttgtccagtattactcagcatcagctagatggtatataaaggagctttcatctgaagtcttttgactctgcattgactgtttttttttttttctctgaagaagtaaacaccactttacattagctcttgcattaccatggcctgtaatttccttagcctactgtaaagttatgaatactagaataacaaaaattaatttactttaggttaaaggaaaaggtgcttctggaagttttgttgtggttcagaaatcaagaaaaacacctcagaaatccagaaacagaaaggtaagacatctataccacagtttgagtgctgtggagctgttactgctactaaaaatagcaacattcattgagtgtttgctgtgtgcctggcactatgcaaggttcagcctttctgctaaggcctagggaagttataaataatttgttcctctagtgagtagaatagccaaggtgcagatccaagcagtccaacctggttaagcctgtgctcttaagtgccttatattaaattatgggcagctatataaattacactgttttttgttttgagatggagtcttgctctgttgcccatgctgtagtgcagtgacatgatctcagctagctgcaacctccgcctcctggattcaagcaattctcctgcctcagcctcctgagtagctgggattacaggcactcgccacagtgcctgactaattttttttgttagtagagacagggttttaccgtgttggccaggctggtcttgaactcttgacctcagtgatctgcccgcctctgcctcccaaagtgctgggatttacagggtgagccattgctcccagctgaattatactgctttttgtgaaatatcttttaaactagaggaggtataagagtcctctgtttttttgtttgtttgtttgtttgttttcttttctaagatagaatcttgctctattgcccgggctggagtgcagtggcacgatcttggctcactgcaacctctgcttcccggattcaagtgcttgtcctgcctcagcctccccagtagctgggactgctacaggcatgtgccaccgttcccagctaatgtttgtatttttagtagagatggagtttcactatgttggccaggctggcctccacctcctgacctcaggtgatctgcctgcctccgcctcccaacgtgctgggatgatagatgtgaaccacaccatgcccagcctaaaagtacatttttaccaaatactagacccaaaaacaatacccagatccaatttttcttcctgtttttgtaaatactaacattcttcttcccaacacatataatttcatttgtgtaaagtatttctacaataataaagtgaaatgtcttgtactcatttatatcagaaattgaaataatatttttctacaccttttttttttgttttacaactctgaagctttttatccttttttcatagacttttcaaacactttcaaaatgaactttatgcatttttttctggtgctgtacttcataaattaggacctttaaaatctacactcctttttacttttatgtgtgttttttgtgtgtgtgttttgagacggagtttcgctcttgttgctcaggctggagtgcaataatgcaatctcggatctctgcaacctccgccttccgggttcaagtgattctcctgcctcagcctcctgagtaaatgagattgcaggtgcatgccaccatgcctggctaattatgtatttttattagagacagagttttaccatgttggtcaggctggtctcaaacttgagacctcaggttatcagcccacctcagccccccaaagtgctgggattacagacgtgagccaccacacctggctcctttttcttgttttgttgtgttttttttgtttttttttttttttgagacggagtctcgttctgtcacccaggctggagtgcggtggctccatcttgcatcactgcaatctccacctcccgggttcaagcagttcttgtgcctcagccttccaagtatctgggattacaggctacgacgtctggctaatttttgtatttttagtagagaggaggttttgcaatgttggccaggctggtctttaactcctgacctcaggtgatctgcccacctcggcctcccaaagtgctgggattacaggtgtgagccaccacacccagcttttatatgtatttttaatgctgtccattgaaaattttatatcaaagaaattgccataaaattgacaaatttggtaatcaactgaggaaagcccttgagttgtatgtagaaacatttacgttctataatgatcataatttttgataattacttttcagaataggagctctgcagtggatccagaaccacaagtaaaattggaggatgtcctcccactggcctttactcgcctttgtgaacctaaagaagcttcctacagtctcatcaggaaatatgtgtctcagtattatcctaagcttagagtggacatcaggtatgagccattggcctggcctttaaaacatgatgtgttacttcctttagctcccttttcatgggaaaagagatagattaaatactgaggaaggattactttcagctaaaaataaatcttttttattggttttatttttttgccccattatgtttttattttcatatctccatgtataattttttttttttttttttttttagttttttgagacagatttgttcttgtcacccaggctggagtgcagtggcaccatctcaactcactgcagcctctgcctcccgggttcaaaggattctcctgcctccgcctcccgggtagctgcgcctacaggcacccgccacgacacccagctaatttttgtatttttagtagagccaaggtttcatcatgttggccaggctggtctcgaactcttgaactcaagtgatccacctgcctcggcctcccaaagtgctaggattacaggcgtgagccgctgtggccagcctttttttttttgagatgaagtcttgctcttgttacccaggctggagtgcaatagcgcagtctcagctcactgcagcctctaactcccgggttcaagcgattttcctgccacagcctccgaatagctgggattacaggccccggttaccgtgcctggcctagttttgttttttgtgtggtttttttttttttttttccaaacccaaatcttatctttctttgtaagatcctggtagagtaactcttttaaatgttgtcagctgttaagatatgtagtattgaactgtgtatcttctcagatatgaaatatcttaacagttgacaacattaaaagagttactctaccaggtttaaaagaaaaaaaacaaaaaaaaaactaggctggctgtggtggtgggcatgtgcagtctcagctactcaggaggctgaggcaggagaatcgcttgaacccaggaggtggagttcgcagtgagccgagattgcgccattgcactccagcctgggcaccaagagcaaaactccgtctcaaaaaaaaaaccataagagtaaaaaggagtgtagactttaagggtcctaatttattcttagcctttaataactaaataatgaagtacagcaccagaaagtaatacataaagttcattttgaaaatgtttgaaaagtctgtgaaaaaaaggatagaaagcttcagggttgtaagaaaaaaaagtgtagaaaatactatttcaatttctgatataaatgagtacaagacatttcattttattatagaaatactttacacaaatgaaattatatgtgttgggaagaagaatgttagtatttacaaaaacaggaagaaaaattgcatctgggtatagtttttgagtctagtattgggttaaaatgtacttttaggctgggcacggtggctcacgcctgtaatcctagcactccagcctgggtgacagagtgagactcagtctcaaaaaacatatatatgatagatatatgcatacatatgtacatacatatacatcatatatatatttcatgagaattcaggcttcaataacacctgtacatagaaatagcataatgtttccatcatttaaacatgcagcataaaattctgagataattttgttagtaattgatacgtaaaatttgccatttaacgtcttgacagatcatttagattgtcacatttgctcagttgtagattcatgcagatatatcaatttgtttaaatttgtaattcacagactctgagagtgtttgtgtgagatgacttctagaaaattatgtttaatccagatttctgtctacagaagactaccatattgaatgcacattgtcccgatacagtgtagtaccagtatttacttgcattactgaggcatgcaattagaagtgctgaggtttcagtccagaagccacattttcagaaaatcagtagtggtcatcagaatgccaaattaaagagctagtgaaatagtgcaaaagaaaagggaattatagaagcagaaagttctaaattaatgtgctgatattttcatgcttcttatatgctgagtatagtggtagtaggcagacacaattgtggatcaaaaatgcgttatatgatgcatttaaagatggaaacatatttcactattctttaacaaagaataaagtttatttggctcatggtactgcaggctgtacaagaagcatagtgcaggcgtctgcttctagtgagggcttcaggaaacttacaatcatggtggaaggaggagctatcgtatcacatggcaaaaaagggagcaagagaggagggaaaggtgccacactcttaaccagatctcacactcttaaaacaaccagttgttttaaacaacccgctcattacggccaggaaggcacgaagccattcacgaagccatccctataactcagacacctcccactaggccccacctgcaacactggggatcatatttcacttttatctcctttgtgtgaccccaaaatatctgagacaggtctcagtcaatttagaaagtttattttgccaaggttaagattgtgcccgtgacacagcctcaggaggttctgaaaacttgtgcccagggtggtctgggcacagcttggttttacacattttagggaaacatgagacattaatatatgtaaggtgtatgttggtttggtctggaaaggtgggacaactcaaatcagggagggggcttctaggtcataggtaaataaaagacaaagaatttcattatttttgagtttctgattagctttttcaaaggaggcaatcagatatgcatttatctcagcagatgaatgacttgaagttctgtctgtcgtttgtctgcaaggattttccttgtgattaggggattcgtgattagggtttgtgattaggggatcccaagatttattttcttttcacagcctttattctctgctttttggtgagtggagaccatatcttcccccatttttttttcttgtagttctactctacttacataaggtagtgtgttgctaccagtgtgcctttgctgcacttcttttgaaacatattgtcatgaccttaggctgaaacaaaatttacctgataatggatgggttgtcaacccaaaggtgctaatgaacctgaagaccttttctcatggcctttttaatggtaattttttccattgaaacttttttctcttatgtgaaaccatattgattttctctaattcttgattataatggagtcctttcatatacacatttaacttgaaaattcagccattcttgcttggccaaacaaaagaggaagaaaaatacagtttcaccaaagtgtaagttgtctatactggtatctacaatgtctccccttccactttctccactttagtcagactttatccccaccactttacctgaatattttctgtcagtctccacgttggaaatttcagtggtcaattcatagtccttaccagctgccctctcaatggcatttgacacagttgatgactcctacctgcttgaaacattttcttcacttgccttccaggacaccacactttcctgatttttctgtaacctttttacccttcgtttctcaatctcctaaggatttctgctttacctcttaatagaaaggagccctcagggttataccttaggcctctcatcttttatgtccacattcacttggtgattcctttcacttgcaaaactgtaaataccagctataaactattaattcacaaatgtatgaatctagcccatacctcccttctaacttcagattcgtgtatacggatgcctgttcagcatcagcacttggatgtctgatttaaatgttgaaaacatttaatgatccccactctgctccctctccccccaaaaatccctgcatttcccacattatcttcatttcagttcatgacaatattatccttccatgtgctgaaaccaaaaaccctgactttgtgctggtctcttctctttatcagacacctttatctaatctataagcaattatttttgctctgtctttaaaatatatcagtaaacaggctgggtactgtggctcatgcctgtaatcccagcactttgggaggcaggtggatcacatgaggtcaggagttcgagaccagcctggccaacatggtgaaaccccatctctactaaaaatacaaaaaaattagccatgcatggtggcacgtgcctgtagttccagctactcaagaggccaaggcaagagaatcacttaaacctgggaggcatagtctgcagtgagccaagatcacaccactgcactccagcctgggcgacagagtgaggctccgtctccaaataaataaataaaataaaatatatcagtaaacagactacttgtcatcacctgcactaccattctcttccaggccaccatcatctctcacctgtattagagcaataacttcttaactgcttttttcatgctccctttcagtatgttcttaccatcatagtgagagtgagacttttttaaaaatgtaagttctatcactttttaaaatttatttatttatttatttgagaaggaatcttgttctgttgcccaggctggagtgcagtggcatgatctcggctcactgcaacctccgcctcctcggttcaagcgattttcctgtctcagcctcccgagtagctgggattacaggctgtgccaccacacccgggtaatttttgtatttttagtagagacagagtttcaccatgttggccaggctggtctcaaattcctggcctccagtgatctgaccgccttggcctaccaaaggattacagacgtgagccactgtgcccagcctgtcacttttttttttttccaagctggggtcttgctctgttgcccagactggagtatagtggcaagatcgtggctcatggcaacctcgaactcctaggctcaaacgatcctcccactgtggcctcaaaagtagctgggactgcaggaatgtgtcaccacacacagctagtagtttttaaattgttaatagagacagaatctccctacattgcccagactggtctttaactcctggcctcaagtgatcctcctgcttcggccacccaggtgttgggattacaggtgtgagccactgtgtccagtgtcatgtcgcctttctactcaaacattcagtgtcttcccaatcccgtcacagttaaaaaatcagtctgtagggctgggtgtggtggctcacgtctgtaatcccagcactttgggagtctgaggcgggtggatcacaaggtcaagagttggagaccttcctggccaacatggtgaaaccccatctctactaagcatacaaaaattagccgggcatggtggcacatgcctgtaatcccagctactcaggaggctgaggcaggagaattgcttgaacccaggaggcagaggttgcagtgagccgagattgtgccactgcactccagcctgggcgacagagcaagactctgtctcggggcaaaaaaaaaaaaaaaaaaaaatcggtctttaaaatggcccacaaggcactacactcacttgtatctctgacctaagctactcctcttcactctctcactggtctcagagcctttgtgttgcattccctttacctgaatgtatttttccccataagccactttgccagttcctttacttccttaagtttttagtctgatgtcatcaccaaaggcctgccttgactatttttattattcttgttacttgggcatataaacaagagaaatgtatttctcacagttgtgcagactcgaagtctgagatcagggtgccagcatggttgggttctgtgagggcctcttctgggtgtcagagtgccttcttctcattgtatcctcacatgacagaaggagcccttaatactttcttaaatgttttattttggaaattttcaaacatatacaaagaaggatagagaacattaaccatcatacttaaatcattcttttttttgtttggagacagagttttgctcttgttgcccaggctggagtgcaatggcacgatcttggctcaccgcaacctccgtctcctgggttcaagcaattcttctgcctcatcagcctcccaagtagctgggattacaggcatgcgccaccacacctgactaattttgtatttttagtacaaatggggtttctccatgttggtcaagctggtgtcaaactcccaacctcaggtgatctgccggcctcggccccccagagttctgggattacaggtgtgagccacctcgcccggccacttaaatcattcttaacaaaattaataatttcttagtattatctagtacccagtccatgttcaaatgtccttaattgtctccagaatgatattttacagttgtttttcctaacatggcccacacgttgtatttggttgataatgaccaaccaaaacctctctcccagccaggtgctgcggttcacatgtgtaatcccagcactttgggaggccgaagcgggaggatcgcttgaacctacaagttcgagaccaggctgggcaacatagtggaaccccctctgtacaaaaaaaaaataacaaaaattagctggtgtagtggcatgtgcctatagtcccaactactcgggaggctgaagcagcggaagggttgcttgagcctgggagatcaaggctacagtgagccatggtcataccactgcactccatccagagtgacacagtgagatcctctctcagaaaaaaaaaaaaaaaaggccaggtgtggtggctcacacctgtaatcccagcactttgggaggctgaggcgggcagatcatgaggtcggaagatcaagaccatccttgctaacacagtgaaaccccgtctttactaaaagtacaaaaaattagccgggcgtggtggcacgcgcctgtagtcccagctacttaggaggctgaggcaggagaatcacttgaacctgagggggcggaggttgcagtgacctgagatcgcgccactgcactccagcctgggtgacagagggagaatgcgtctcaaaaaaaaaaaggagtgtttaacccatagggtttaagtctcttagtatgtgcgaagcacttcttagaatagtccttggtacctagtaaatgttcaactaatgttattcttactagtctcagttccagcttctcatagtatgaccattacagcatgctaaataggattctaatatttaaagacataatttttttgttttgttttttattttttatttttgagacagagtcttgctccgttgcctaggttggattgcaatggcatggtctcagctcactgcaacctccgcctcccgggttcaaatgattctcctgcttcagcctcctgagtagctgggactacagttgcctgacaccacgccccgttaatttttttgtatttttagtagagctgaggtttcactatgttggccaggctggtctcgaactcctgatctcgtgatccacccgcctcggcctcccaaagtattgggattacaagcgtgagccaccgcgcctggccaagacattggtttttaatataacatgcaagtcaccttcttaatttgataacagtgatttttttgcaaccctagaagaagaactgggcatattgggtatatagagactcagagttggccttgaagaaggtgtctttggaaattttctaggtctgtcatacagcgttagaagtcaaatgttaaaatctaatcttcagccaggcgtggtgcctcatacctgtaatcccagcactttgggaggccgagtcaggcagatcacctgaggtcgggagttcgagaccagcctgaccaatatggagaaaccccgtctctactaaaaatgcaaaattagccgggtgtggtggcgcatgcctgttatcccagctactcgggaggctgaggcaggagaattgcttgaacctgggaagtgaaggttgcagtgagccaatatcgtgccattgcactccagcctgggcaacaagggcaaaactccacctcaaaaaaaaaaaaaaaataataataataatagtaatcagaactctagatctgggaataaccctgtatctatttctttacatttttctttcattaatgtatttatcactattttttttttgtttttctttgcaggcctcagctgttgaagaacgctctgcagagagcagtagagaggggccagttagaacagataactggcaaaggtgcttcggggacattccaggttagagatcagaggcctggttgtggagaagtgcttcttaaagtttttggtttcaggacctccttatactgtaaaaatttattgaggacctcaaagaacttttgtttatgtgggttatatctgtcaacatttactatgttagaaattaacattgaggtctgggtgcggtggctcacacctgtaatcccagcactttgggaggctaaggcaggtggatcacctgcggttgggagttcgagaccagcctggtgaaaccctgtcgtctccactaaaaatacaaaaatgagctgggcgtgggggcacatgcctgtggtcccaactacttgggaggctgaggcaggagaatcacttgaacgcgggaggtggaggttgcattgagccaagattgcaccactgtgctctaggctaggtgacagagcgagatgccatctcaaacaaacaaaaaaacacaaagaaattaacactgaggaaaaatttaaatatttattgatttactttaaaatactagtagaaaacccattacatattaacataaatgacatattttttagtgaaaaatagctgtcctccccctgccacctcccggccttttttttgagacagtgtttctctctgtttcccaggctggagtgcagtggcacaatcacagctcactgtagcctctatctcccaggttcaaggggtcctccagcgtcagcctcccaaagtgctgggattgtaggtgtgagcctataatccgtcttccccaattttttttttttaatgagaagtcgtcaggcactgtttacatttttgcaaacatctttaacatctagcataacagaagacagctagtatctgttccagtttattttgggttacttatttgaagaaaatctaaccttacacagaaatacaattagaaaaggatggaatattttaagataactttgagatagttgtagaaattattctttgatactacaccaaaactcaacaaatcgttatttttttaacagctttattgaggttgatttgcataccttatacaatttaatttatataattacagtttataactcagtgattttcagtaactttatagaattgtacaactatcacagtccaattttcggacatttctgtcacccaaaaaagatcccttgtagccatttgcagtcactccctattccaccagcagcctcaggcaacctctagtctgttctgtctctctgcagatttgcattttgttcacatttcatatggatagaatctagaatcatgtactatatgatcttttgtgtctggcttcttttggcatgatgtttttgaattttatccacgttgcagcatgtaccagtgctttcattcttttttattgtccaatagtatttcattctatggatgtcacattttgtttatccattcatgagatgatgatggacatttggattatttctacttttcagctaattatgaataatactgcctatgaacatttatgttcaagtctgcgtggatatgtttttaggacttgctgggccatatggtaaatttatgttctaagaaactggcagtgtttataagggctcaagtcgttttgttttgttttgagatagggtctcactctgtcacccaggctagagtgcagtggtgtgatcttggctcactgcaacctccacctccctggctcaagcaatcctcccatcttagcctccctaatagctgggattataggcgtgcaccaccaccatgcctgattaatttttgtattttttgtagaaatggggtttcgccgtgttgcccaggctactcttgaactcctgggttcagtgaagtagtctgcctgcctcagcttcccaaagtgttggaattacaggtgtgatccaccacacctgaccagggctcgagtttctccatatcctcctcaacgtttgttactcttttttattatagccatactagtggatatagggtatctcgttgtagttttgattggcatttccctaataattactgatgttgagcatctcttgtgcttaaggccatttgtttattgtctgtagtgaaatgtttattcaaatcttttgcccatttttaaaagggggttggttattcgttaacaagaattcattactctagacataaagtctcatcagattttttctcctattctgtgactttctcagtagtatcttttgaagcgtttactttttgatgaagtcctatttatcatttttaaaaattgcttttgcagttttatggttatctaagaaacattgcctaattaaaggtaatgaaaatttactcgtacgttttaagagttttataattttggctcctacatttaggtctgtgatctatattgttttgtttatagtgagaggtaagggtataatttatctttttgcatgtgggtgtgtgattattccagcaccttttattgaaaagactgtcccttccctattgaattgccgtagcatcttatgaaaatcaattgaccataaatataagggtttatttccggattctgagttctcttttgttctgtaggtgtatccttcatgctaatactgcactgtcttactgactgtagctttatagtgaattttgaaatttggaattataagccctctaactttttcaggaatgttttgactatgccgggtcctgtacagttccatacaaattgtccatttctgccaaaaaaaaaaaaccaaaaaaacagctggagttttggtaggaattgccttgaacctatagatcaatttggggagactcactgtcaacaacgttgagttttccaatccatgacacagaggtctctttatttaatttctctcagcagtgttttgtagttgttcggtgtacgagtcttgaattttttttgttaaatttattgccaagtattttattctttttccatgctgtcttgaatggtggaagtgttttctaattttcgttttcaggttgttaacgctaacctgtagaaatacaatcgatttgtccattgctcttgtatccttcgcccttgctgaactcaccagttgtagtagtttctttgtgaattccttacagttttctacatacaggatctgttatctgcaaataaagagcattttacttctttgtttctagtctggatgtcttttacttcttctgattgcctgattgctctagattaacctccattacagtgttgagtagaagtggtaacagcagacatcttcgccttgttccacatcctggagagaaagcattcagtccttcacaagttagctataggtttttcatagatgcctattgtcaggttgagcaagttcccttctatatatactactagtttcctgggagtttttatcatgaatggctattggatttgtcaagtggtttttcagtgtctgttgagatgattgtgtggtttgtgtcctttgttcgtgtggtctgttaacattatttgttttgtggtaaattctttaaagtttagttgccatgtgaaacctgaaaccctaatcagtgaatttcttggactgtgttaccttaaaattcattgaactttgaataggtattttaatccttcataattttgtagcacgatacattggtcatttgaaaaatagtggcacagagttacatagattttccaaatgttggcatttcattatatacgacaacaaaaattacaatcattggtgttggccactgatcttataagaacagtatttaagtattgggaagataacagactcacagtgatggacacaagtttttcaggatttaaattttctcttgaaaggttgaattttatcattggcaacaaatactattatttttttacatgacaggctcttttagttcatttgcaagatactgtctacctcataaccaagtctgaataatgataggttagctgtcagttatttctttaagtaaaaaagtattacaggtcaggcgcggtggctcatgcctgtaatcccagcactttggggaggccgaggtgggcgaatcacgaggtcaggagatccagaccatcctggctaacatggtgaaacccaatctctagtaaaaatacaagaaattagccgggcatggtggcacatgcctgcaatcccagctactcgggaggctgaggcaggagaatcccttgaacccaggaggcagaggttgcagtaagccaagatcacgccactgcactccagcctgggtgacagaatgagactccgtctcaaaaaaaaaaaacgtgttccaagaaaaatgcagctaattcagctcataactttaacaattacacaagtgcttttcctggataccatcatgtctacatatgtagcagatacggattatgtggttcttcctgtttcatcccataaaatattctaaagacattcaaaagttgagatttaataaaataatttttagtactttatcaagggcattctaagtgaattcgtgctcttttttttaaaccataagtacatagcagtaaagaagacaataaccacatttttgtgtctctgcctttatctgtggtaagctgacagcagttttacccaccattgcttctgcaccatcagtgcaaatgtcaaaatagtgaaaaggccaggtgcagtggctcacacctgtaatcctagcaatttgggatgctgaggcgggtggtttacctggtcaggagtttgaggccagcctggccaacatggtgaaaccccatctctactgaaaatacaaaaattagccaggtgtggtgggcgcctgtagtcccagctactcgggaggtagacgcaggagaatcgctggaatccgggaggcggaggttgcagtgagccgagaccgcgccattacactccagcctgggcaacacagcgaaactctgtctccaaaaaaaaaaagacagtgaaaaagcaaatcgcatcttaggtttttgtttgtttgttttttgagatggagtcttgttgcagtgagtacagtggcttgatctcggcttactgcaacctccacctcccgggttcaagcgattctcctgccccagccttgcccaagtagctgggattacaggcatgcaccaccatgcccggctaatttttgtatttttagtagagatggggtttcaccatgttggccaggctggtcttgagctcctgacctcagctgatccacccgcctcagcctcccaaagtgctgggattacaggcatgagccactgcgtctggcatatcttagttttattatgcaaatagttttgaccttgcagatcctctgaaagggtctcaggaacccagacaattgtaaccagaccattctttaagaaccactaaacagttttgtagagcatttctggttttctccttttccctttttgcatattatttgctaacctttgttaccacacctttcattttcaaagtatgctatgtaattttcttttgtatgatacttttttttttttttagtttattatttatttttagagacagagtcttggtctgtcactcaggctggagtatagtgatgtaatcatagctcactaatagcctcaacttcctgggcttaagccatcctcccccctcaccctttcatgtaggtaggctacaggcatgccgccattcatagctagtttttttatttttagtagagagagagtctcactatgttgccgaggttggtcttgaactcttggcctcaagcagtcctcccccattagcctcccaaagtactgggattacagatatgaactaccgtgctccctgataccctaaatatttatcaaaatttttcactgctattttcctcataggattaaaagggctatttattattttttataactacagctgacccttgaacaacataggggttaaaggtgcagatcccccgtgcagtaaaaaaaaaaaatcataaaaaactttagattcccagaaaacttgactattaatagcctactgttgaccggaagccttacaaacagttaatacacattttgtatgttgtatgtattatataatgtactcttataataaagcaagctagagaaaagaaaatgttattgagaaaatcttaagaaagaggaaataatggccggccacagtgggtcacacctataatcccagcacgtcaggaggccgaggcaggcagatctcctgaggtctggagttcgagactagcctggccaacatggtgaaaccgtgtctctactaaaaataaaaaattagcgagacctggtggtgggcgcctgtaatcccagctactcgggaagttgaggcaggagaattgcttaaacccaggagaccgaggttgcagtgagctgaaaccacgtcattgcaatccagcctgggcaacagagcgagactctgtctcaaaaaaaaaaaaaaaaaaagagagaaaatatatttattgttcattaagtggaagtggatgatcgtacatgtctttatccttgtcatctttgagttgagtaggctgaggaggacaaggaggtgttggtcttgctgtcttggggtggcgggcagaggcagaagaaaatccacatataagtggaccagcacagataaaattgtgttgtgttcaagggtcagctatacttcatttttcagattcagaaaagtgaagtattctcaaataaaataatctttttttttttaaatttattttatttatttatttttttagacagaatcttactctgtcgccgaggctggagttcagtggcatgatttcggcacactgcaaccccgcgtcttgggttcaagtgactctcctgcctcagcctcccaagtagctgagaccacaggcacctgccacacctggctattttgtgtgtgtgtgtgtgtgtgtgtgtgtgtgtgtgtgtgtgtgtgtgtgtgtgtgtgtttttagtagagacaggtttcgccatgttggccaggctggtctcgaactcctggccttaagtgatctgcctgcctctgcctcccaaagtgctggggctataggtgtgagcacccagccaaaagaatcttaatttttagggacataactggttaacctgcttattgggtacagttgtcagtatctttgggttaggttggctattattttagggtggatggagggtagatggaaggagaaaatatccataggagggttgggacttctcagttagattgaatacctgttgaatgggaagagaaagtccctaagctgacaatttattgtaaaacatatctgtgctaatgcaggaactccgacccacctggtgcagaggagtcttgtcttgacctgctttgggagagtgttgtcttgatgcttttctcttcctccttggaaaacagctgaagaaatcaggggagaaacccctgcttggtggaagcctgatggaatatgcaatcttgtctgccattgctgccatgaatgagccgaagacctgctctaccactgctctgaagaagtatgtcctagagaatcacccaggaaccaattctaactatcaaagtaagactcggttgtgtatatttaactgggattaggagaattttcttttgaaaaaaccgtggagggccaggcactgtggctcacgcctgtaatcccagcactttgggaggctgaggcgggtggatcacgaggtcgggagtttgagaccagtctggccaacatagtgaaaccccatctctactacaaatacaaaaaaattagcagggtgtagtggtgtgcatctgtagtcccagctactcgggaggctgaggcaggagaaacgcatgaacccaggaggtggaggttgcagtgagccgagattgcaccattgtactccaatccggacaatagttgcgagactatgtatcaaaaaaaaagaaaagaaaagaaaagaaaaaaaaatcatagagatcatgctattaatgtcaaagtattaactactgactgaaaaccaagagggaacagctttacaaatttcatatttacaaaaagaaaaacaaataatcaaaactgaattcttaatttaaagcatctgcttataagaagttgcttttactgtaaagatttttctgatatttattgtaatttagataaatctctaggttcaaagcaactctaaattatagtgtattttttcctacttttgaatgttcaccaaaaacatctaattttactttgaaacaaagccaggattttagagtacttactacttatattatttcttattaacctaagccccacaacagacaatactttatttcagtaaagtatatttactctaggaggtggtgatttgagatgagacaccctgccttatcagcattatcgtgtggattggtgagactgggtgacttctcaatgaactattagaagaggcacaatgttgtagggtgagggatatggaaattaagtaacagaagaagacaatccagaatatattattgtaattaaaaggtaattttgaagtctttttttttttttagacggagtctcgctgtgttgcccaggctggggggcgcagtggtgcgatcttggctcactgcaagctccgcctcccctgggttcacgccattctcctacctccaccccctgagtagctgggactacaggcacctgccaccacccctggctaatttttttgtttttgtattatttgtttttagtagagacagggtttcaccgtattagccaagatgatctcaatctccttacctcgtgatctgccggcctcggcctcccaaagtgctgggattacaggcgtgagccgccacgcccggcctatttctatatgccagatgttttaagagaagatgaatttggttaacaagcctttcagtttcactgatatttgcagctgttttttggatactgaatcaccataaaatatattttggatatgtctctgtaagaaagatgagaatgaaggacttcaggaaccatgatattgttttgttactgtttactgatttatgaataattagttctgttcatctttataagagattctcctagatgattatcaatacctataggtacacaatagatgtttaagtgaatggaaataattaaatacttagttttaggtctgctgtttatgtgctaccttagagcaagtcacttaactactttgagctcaagtcacttaaccactctgggctttttttttttccctgtgaaataaggtatttgactcaatggtctctaatgtgtcttttcattataactcttgccaggtatggtggctcatgcctggagtcccagcagtctgggaagccaaggtgggagtattgcttgagcccaggagtttgagaccagcctgggcaacatagtgagactttgtctctatattttgcaaaattttaaaatatagatatatgtatgtatgtatgtatataatttaactcttgccaaacttatgggcaataagtaaatgtttaattaaatacctttgaacacataggattcacttagtgtatgtcaattaccgtatgtgacaggatattaaattgatgggcatctgtttgtggttgagggaattatctaatctgaataactagataactttcatttctgaattttttttttcagtgcatttgctgaaaaaaaccctgcagaaatgcgaaaagaatgggtggatggaacagatctctgggaaagggttcagtggcaccttccagctctgttttccctattatcccaggtaagtacttagcctataatagatcactgtaaatttatagtctaagttacacactcagtttaatttattttacccttattactgttttagtgaactggaaatacagtcgtcctttgttacatataggggattggttacagaactgcccgcatacccaaatgcgcatgtactcagccctgtggaatccatgtatctgaaaagtctgtcctctttgtatgcaggcttcgcatcctgtggatgttgtatttctgatctgtgtctggttgaaaaaaaaaagtccacatataaagtgggctaatgcgttgccaacctgtgttgttcaagggacaactgtatttgaaaataaagatgacttttaaggcagtattattttggagtaaaaggttttgtataaaaatagtgattttagccaggcataagattatttgagatcctcggatggtcattttgatgttcattccttctttatcaagtaaatgataatgacagattcttagaggattatgtataagtttttgtttttgttttttgagacagggtctcactctatcgcccaggctggagcagtggtataatctcggctcactgcaatctccgcctcctgggctcaagtgatcctcccacctcaatatcccacgtagctgggactacaggtgcgcgccaccacacccagctaatttttgtgttttttgtagagatgggggtcttaccatattatctaggctggccttgaactcctggctcaagcagtcctctcgcctcagcctcccaaagtgatgggattatatgcataagttttaattgtccaataccaagtggggagaacattgactgttttcaagaatcttaactctacctccatactgtagagacaggaacacttatctgaaaatttgtttcttgcaaataccttatttattctttgaaacaaaaaaatatattgatcacctcctgtggtccaagcattgtttcatgcactgggtttaaagccttttgatttccagtaaagtacataacatataccactaagaccctgttttagcaagactattgtgtaactttcttatattattatttctgtacaaacataagtgttacttggcttaatacatattatataaatttttcgaacattaaacattaaatttaattcccaaagtcacacacacacaaaatgttacattctgccaggtgtggtgggatgcacctgtagtcctaactacttgggaaggtgaggtgggaggatcccttgagcctaggagtttgattccagcctgggcagcatagcaagaccctgtgtctgaaaaaggcaagaaacacacacacacacacacacacacacacacacacacacacatatatgtatgtatgttatcatttaaggatatgttaatcaaaggaatcaaggttcataccaccaaggacaaaaaagagtttaggagatccttgccgaatacctttgaagctttgaacagatttaggcctttgaggtctttttttttaagacttggaggtcttttgccagtattatgaggctgaagtgtgtattccatgcagactgttcattgctgtgtactcattggctaatacagtgccagatacatattaggagtttaagtaattgtttactaaataaatgactatggattaattttattaaatagtgggtatagaattaggtatggtgcaggacttttatagatttggcataactttatatgtatgttcaaaatacggtaaattgtaacctgatacgtgtaacctagcttgacatttttgggaagggtgggaagaagtgggatatgtccaggtaagagcatctaggttcacattatttttcttgttttatatgggacttgtgttttaatctaatttttccccgtatagcccaggagttctgtttccgaagaaagagccagatgattctagagatgaggatgaagatgaagatgagtcatcagaagaagactctgaggatgaagagccgccacctaagagaaggtgtggacatgtgaaaaccccttgtggggaggacactaaatacctcagagctgaaaaatagtgctataggaggggctaaagctaaaaagcatttcagaaactcaggatccttctcaagttctttatataaatttggattgatcttctcctttgaaaatcaagggctccagacttttagggcaagcctgtgtgtatccatagtttagttattcaaagaaaaataattacatatttccctaggaacaacgtcatgaaattgtgtctagacttcatgaattggttgaatttttatacaattttagtaaaatctctagtaaaaaattgtcacattcctattcttaacgtaagtgaccacttcatatgccgtttctctttagaaagcatctggttgtcccaacaaaacgaatctcttaagtactaaatgacggcctttgctctttggttctcacaggttgcagaagaaaaccccagccaagtccccagggaaggccgcatctgtgaagcagagagggtccaaacctgcacctaaagtctcagctgcccagcgggggaaagctaggcccttgcctaagaaagcacctcctaaggccaaaacgcctgccaagaagaccagaccctcatccacagtcatcaagaaacctagtggtggctcctcaaagaagcctgcaaccagtgcaagaaaggaagtaaaattgccgggcaagggcaaatccaccatgaagaagtctttcagagtgaaaaagtaaattttataggaaaaaagggtatcatgatgaaattcaaaatcttattttctaaggtcagtgtgcatttgtttagttttgatgcttttcaaattacattattttcctcccctatgaacattgtggggagggactctaaataaaccagtttaggcatttgctagctttaggtgcttttattggtgcctgcccttttccttgttcattttaatttctgcaataatcctggactttcctaaactatgtaatgtatacttgtcctttttctctgcctcccccaaccccctgttgtttttatggtcagctttgccttttttttttcttccaattttatctaaacagttgcagagatttttatatttgtagaaagcatcaagaacggtatgccagtcaggtcctggaagtaaaatggaggcacaatatagcactgactgagttgtaaagcctcctgcctggagacttcagttatagctgtaataattaatcttatttataaaagccactccactaaccttttctctccaactgtaaacacagagacagctttgggaataagccaaaaacagggtgatctcattagattttgaagatatatgactcctttgggctacatttcatattgatcaatttctaggtatttttcactggcccaaagtattgcattcccttaacagcaagcacaagttctctatatcacttgttttttgttgttgttgttgttgtcgtcgttgttttgagacggagtcttgctcaggtgccccggagtgcagtggtgcaatctcagctcactgcaacctccacctcctgggttcaagcaattctcctgcttcagcctcccgagtagctgggattacaggtgtgtaccaccacgcctggcaatttttttgtatttttagtagagatggggtttcgccgtgttggtcaggctggtctcgaactcctgacctcaggtgatccgcctgcctcggcctcccaaagtgctgggattacaggagtgagccactgtgcctggcctatcccacttggtttttgactgaaggggaagtgtagaaatatattgatttgtgatttctggtgtcacctgtgttaccaaaaatcaaaacaaatcttttttattttttattattattattatttttgagacagagtctcgctctgtcgcccagtgtggagtgcagtggtgtgatcttggctcactgcaaactccgcctcccaggttcaagcgattctcccacctcagcctcctgagttgggtcctacaggcgcacacgaccacgcccagctaattttttgtatttttagtagagttggggtttcaccatgttagccaggatggtctcgatctcctgacctcgtgatccactcacctcagcctcccaaaatcctggggttacagatgtgagctaccactcacggcccaaatcttcttgatcatatgtttaaatatattttttaatatttggagcatgagttgtcacttcttgtttgccttttttataaggaaatgttggagagttacatcattgctaatgtagaaatgttaagtggaaaaatatacagtttggtaaaataaactagattctacatttatttgtgggtttttttcccctcctttctttccacagcacttttgatatcaagcaagtggcttcctttttgagatattaaaaaaaaaaagaaaaggaaaaaagtaaatgaagcccaactacctaaccctttcttatttgtatttgttttagtattgtgaagttgtgttaaatagtactagctagaaatacaaatttctggttatcatttctcttccctgtggcacttgacattttaattgtcttaaagtttttgaagtacatcttctggccccttgagtactgccagaggcaaaagatgtttgtttcttattcattccacttttgtctcctgggatcccttctgtagcctaaagtatggctgggaaatggacttgagaagattggcttgaattagatcataatcatgtgtgatcccatcatgaattcattggaatttgtgttgcatgtaaggcaatctttcctgttgtaaatcttccttttttaatgtacatatattttgaaaaatatgaataaacatgaaattttaaaagctgctgaaccgtagcttatatttaaaggttttgagtatagtatatcctcagaagtagctaagtgtcgccctcactttaagtcttttctactccttgaaatgaacaccatcattttcctttttaaatacaagctccagttcatgtgttttggaattcttatagagggtaaacgatgtttccagatacattgaatgctaattacttaatgaatcaaaggtttaaaaaatcattttgtattttattaaagactgcttccaagatcatagagtacaatcatgttcaataaatgttcaatattcagataagtccttggactagaaaaaattacagtactgcaaaagataacagataaatcctagacatcaaattctagaagtaattgtagtaattactcctgtgctctctagcaagtaatgattcttaatagtatggatgttaggtacctgtgctcagaattctgtactcttctggaatcaaaagttgggagattttggttggtttctttgctttatgatactgcttttaaagagacttactgaataatcacctggtggctgtattgcacaccaggcacttaagcacaggctgagaagtttagatcatttaaagtttcttccaactctaacgttctgttaactataaggacagtttgtttcagtgtgatgtaaagggaaaagacaggaaggtcatcgcactcttccacgaacatccacaactgtcaaagacatacgccttacttacattgagataaaagaatgtttgatttttcccttccaggcattccaaaggagcagaacacatttataatttttacttccatgttcagaaaggggaacaacaaaccccagaggtaatcccagaaatctctagcatggatcaatagcttcagtactctgttggtggcttagtgacctcatttacagtgtttcatacactctgaaactacctacaagctacctttgataaatgagtctcagaaagtgctgggagagagattgttggcttcttaacctacaaaatgaggaaggaaagatactattgttgagaaatgtggagacctttccttagcactatgacagaagcattcattgcacatggattctgactatgcatccacatggacttaattaaaggaaacctggtcctgtataaatcttaggaaacaggtgtatgttttaatcatgtcttttgggtataattaacaggaaaatgacatgaaaacaaaactaaacaatctgctaacaccttttgacatttgttttttcatcattgctgtttttccaaattttgttagcccttgtcaaggtttgctaaccaattcttaattaatacttactttaaagagcctgtgaaattattctctctcaggctgtgaccctcttgccatcttgatacgtcatgagaacgaaactcaccagccatgttcattaaatactgcatttaactaagagaaactttaaaaatttgggattatagttaaggtctcctatctttggaacctgattaatttatctttctttggattaagcaaaaattctaattttagctatgaaagaaaagaaattctattcttaattggaaaagaccattaaactgtttccccagaggttctggttgacattactttctagcatgtagattttgcttttgcattttcatggtggaacagatggtcactcacttctgcagagccaaagccaaggaagcagaactgttgaagttttggcttaggaaccacttgacaaagatttgtttagaagccattacagatggttaaacagtacccctaatcagctgcattattttcttaagaaattaatctctaccgtctttataactatattcttttacttattatttttttgagatggagtttgctgtgtcactaaggctgcagcgcagtggtgtgatcttggctcactgcagctttgaactcgtgtgctcaagcagttctccccacctcagcctcccaagtagccaggactacaggcaagctaataaatgcctggctaatttatcttttctagagatggggcctcactgtgttgcccaggctggtcttgaactcgtggcctcacgtgatcttcccacctgggctttccaaagtgccaggattacaggcgtgagtcgccatacctggccctattctttcttctgttcttttccacaagactgttaacttcagtggcttttttcctgttggaaaactttctacctttgatgatttaattttatcagctttttaactgttttaactgttcttaattctgtcttgtcaaccactggtatgtcaaaggaggcctcaaaaggctgaagcgattttcctcaaaaattacaactcttttttttcctgatattgtatataatgtataattaacactgttcactattaaatctttgcttagcaaaagagaa

SEQ ID NO: 15616 - DNA, 30729 bp, Homo sapiens
cgggctcctgcaggcggggcgctgtgcgcgccgcgatccggtacgtgggcctccgggctgtcccctctgggggcggcgatcctccctccggagccccccttcaaccctcccggaagtgaggtagggtccctaggggtcccggagcgggcccactcctagcctcacccactccgggcgtgtggccgtgggccggtcgcttcctcgctcggggccaaagttcctcagccgtgaagaggggtggatgtcacaagtcaagcctccttcccagggtggccgtgaggttcgggggtggggggaggtggggatttggggtgaaactggacagaaactggcgtgctaggcaaacgggagccccgcggcggcgaactgctgactcgctctctccagagactcaggggcagggccgggctccgaaggtgtgggaccccagaaggagctgctgaagacgggaccaagggccacagggaggtttgctggggtccagatggtgaaagtgggcgctgggggtcgccccaggttggccccccgccatctggagctcctttcgtcagtgagtcccctccgagttccctttctagggcaagatagcgaggtgaagcggaagtctcagtgtgacaccggcgaggttctcttcccagcagcctttgggaagcatccccctgtttcgggaatatggcattcgggccaatcatgtgggtgatggagcccgtctcagggttcggctgctaaaggccgaactcgtaacagcagtctctgtggcgggtagtcacttgcctcttactggctcacagtgcttgacttcctaattaagttttctgttgttcctgccctctattcaaatatgaatgattccggaaccagattgattaatcctgttatttgaagaagggaagctgggaaataggaataatgatccccacacctatgtaagaacgcagtttgctaaggttactttgcagcttgcctggtcactcccatgatctaaccctgtagggaggtagagtaggggatgttgctctgtttctccgcaggagtttgaggctcagagaggtttatgggacttggcaaagccaaaactagaacctggtcccagatgcctttcctgttagtttccttccattcatcgtatcatcccaggatccccactcccttcaccgggactgcatcctcaccacctgggatgtgctatgctgtctcccgtcagtcactcctagcaagctccctggggctgcttggggagctctgagtgacccgcagaagtgagagcacttcatgggaacaaaggaggaaggaacaaaagtgggcacctgctctgtgcaaagggctgtgctggccgggttcctattctccattatgggaggtgaggggcaggatcccagatatgttcttagcagactgcctcagggcctggagagaccagggaccacgcagcccttctccagcttgtcctttctcaacgggcagcagtcaagaccagggcatctgcctgccctcatattctctctgttttaagcatttgcaggaccagggatgctgtgctgctctcccatgagccagtcaccgagtcggtctgctgcagccctttctgaacctctggccgtctggatgctccactgtgcttgccaaggtagatgatcttgccccacctggggaggacagggaggcaggcagcatccaccctggggctttgggaggcagatggaatgaggtaggcagtggactgagtgctactgggctctgcacacctgctcatcccctccccagccctgcatcctgaggccacccccatcctgatgcctcatctctccttcacccctcgaatccaggcaggtcatcacagcctgctgcatctttaaagctcctcccagcccccaccaaggggtgagcactcattacctgacacccgcacctagatgaccgccttcatgaccttgacctgcccatctccagccagccggtcacttctccgctcacaaccacagcctccattccatagcccactgctccctaacccatacactctggtcagctttgtcacatgtacctgggagtcccagagcagcctcttcaggtccacccgcctctcccagcaacctccttttcacacctgttgcactctcagtgtctgccttggcattgagtaattctgtgggaataggctgcattccttcttcactgtgctgttatgtctcctggcatttgccataaataccttgggaccagttgcaccaagttagtttgggaggaattcagtaaggaccactaagctggacatggggatgacggaacacaagacctggagatgctgtgatcctcccaagaaaactggaaatccacttgtgtgagagttacagcagagcttcctaatcattgtcatggcttagcgcacataccacatgattatatctgcgtgacaccctgaggcacataagaggatttgaaaccactgcctgaggcctcttagctgcagcagccagcctggagcactgtcctcaccagcctggtcaggctgccccaagttttagaagatcgagggtttgccgcacgcagagggccatggcacacagtgtgggaagctgtattaaagatcttccagtgggtgaatagttaagacatttcttacataatcaagcacagagtgtgtggtgtgtgtgtgtgtggcgggggggtggggaaggagatttgggagggctgaagacactggtggctgtggccctagaagctgcagcctactaggtacaggggctttaggcagcctctgttctcaccatgaacagggagagcagcatttgaatgaaacttctgtggtgctgaagtaaattcaggggctttgaggctcatcttctggagctgttttttgtttgtttgtttgtttgtttgtttgttttttcagacagagtctcgctctgtcacccaggctggagtgcagtggtgtaatctcggctcactgcaacctctgcctcccgggttcaagcaattctcctgcctcagcagttatcccgagtagctgggataacaggcacttgccaccatgcctggctaatttttgtatttttagtagagacggggtttcaccatgttggccaggctggtctcgaactcctgacttcaggtgatccaccccccttggcctcccaaagtgctgggattacaggcgtgagccaccgcgcccagccctggaactgtttttatctgagggagagatatctctggactgcccagagatggaggtgcaccagtgccctccgatccacaccaggcactaactggctgccgtgagcatggcctccctgggcattcggctccatgtctaggccaagacctgggtcccttcctgtgccagtctggttccagtaggccccgtggtgggtctgttgctgtgctgagagggaccagataccacagaggaaagggccccagccttggcatcaaacaggtctgggtccagatcccagctttgccacttcaggctgtgcctgtgtcctgctctctaaaatgggggtacctgaagagttctactttgtccagttgtgagggtgcaacaaaaatggaagtcccttgtgatgcctggtgtgcagaaggggctcactgaatgtttgctgaggttggggtcctcttcgttactcagactgagctcatagatgttggggctggaggctgaccttgaccttgcctttccctggcagatgaagtgcgtcttggtggccactgagggcgcagaggtcctcttctactggacagatcaggagtttgaagagagtctccggctgaagttcgggcagtcagagaatgaggaagaagaggtgagtgcagggtaggcagtcccaggaggggtggataggaaggaaccatacaaaactcccagcaggcagagaggcaggaaaacctgtgttcaccctgtcctgggcagcatgagcagggtgctgggtggggtccagcatccttcacacctagacccttatcctcaaggttggcctcttgatgctctgagctcggtgaccccacccccacaccccaccagtcctctctggactaaatgagggcaagaagaagtcgaattttatcacgtaacagaagaacttggagccatcagtttctgtaacctaaaaagtttaacaaggctgggcgcggtggctcacgcctgtaatcacaacactttgggaagccaaggtgggccagttgcttgagctcagggatttgagaccagcctgggcagcatggcgaaaccctgtctctacaaaaaaaatacaaaaattagccaggtgtggtggtgcgtgcctatagtcccagctacttgggaggttgaggtgggaggatcacttgagtccaggtggtagaggctgcagtgagccgagactgtgcccatgcattccaacctgggcgacagagcaaaaaaaaaaaaaaaaagtttaacgtaagctgaacacgttaattttttaatagctgtattaaggtatgattaacataccataaattgcacatatttaaagtgcataatttgataagctttgatatgtatatacctatgattctatcacaatcaataaaaggaatatatctaccacctcaaacatttgtaatcccttctttcccatccccatcgcataggaactgctgatctgctttctgtcatgatagattagtttgtatcatatggccttatataaatggagtcatacagtatgtgcttggatttagtttggttttggtttgactgctttcactcagcataattattttgtgattcatctgtgttgtggcatgtatcaatcgttcattccttgtcattgagtagtaatctattgtatcaggatgccaccatttgttcattcatttacttgttgatggacatctgtgttattttcagtttttgactattacaaataaagcaactatgaacatgcacgtacaagtctatgtatacatggatgctttcatgtccaaggacagatacttaggatagactggctaggtcatgtaggtgtatgtgtaactttttaataaactgccaaacttttccaaagtggttgtgtaatttttgattccacctgtagtgtttgagagttcagttcctccatatcctcaccaacactatagtccgtctttttaattttagccattctaatagatgttcactagaatctcactgtgttttaaatttcatttccttaatgactaatgcttttgagcatcttttcatgtgcttatttgccatatcttttgcccagtttttatttgagttgattgtttcttcttcttattcttactgagttttgagagcttctaatatattttggatggaatcctttatcagatacatgttttacaaatattttctttcagtttgtggcttgtgtttgtattctcaatggtatctttcaaagagcagaagtattagaactcgagtttatccattttgcatttatggattatgcttttagtgttatatctaagaaatctttgcccaacttacaaagagttttctctacatattcttttgaaagttttatagttttaggttttatatcaggtctgatgatctactttgaatttttgtgtgtggtatgagctatggattgaagataattttttttttgcatgtggacatccagttcaacagtttaacattacaactcagaaatacttgtcattttcacttacataatttccactctacattttaaaggagtaatttattttgaaaatgttttccagattaattttgggttaaaaatatttttactggggatgcagtggaaggtgttcttacatttctgcagcatgggctgattgcctctctgtccctttctgctctaaggggtctcatcatccagccaatgagtgagctgactccacctcagggagtccatttaccatcaacatcactcgtgttctcatcacagtctttaggcaaacacaagatatcagagatcatagacattcaagtggttttatttaagctaactgttaggcttttttattttttaacagtcaatacatataatatttaaattaagaatttttaaatatttcagtttttaaactactgttacaactatgtcaacttaagaagcaaactatttggtggcctttctcttcctctttattgaaaacctggcaaaggaacgaactcctgaattttcagttcctaaaaatgagtagtgtaaaggaaaggtggtctttaaagttttttttttttgttaatgtgcaacacattcttttctcatcatataaataatgagttaattgtaggaaatttggaaatacaaagagatagtttttaaatgacctataattccatgacccagagctattagctttttaatatactttctttgggtctttattttttctatataattgggattataccacatttacagttttactgcctgtttttttttccacttgccattatatcaagatatttcttctatttttttaaatagtctcagaagcataattcttaatggaaacattgtactccagtacatgaatcagtgtatcatcctttatttaaccattttcctcatatggacataaatattgctcctaatttgctatatcactcttgctttaagaaacatttgtgcttaaattttatctcatgtcagataaattcctaggataaatttaggataaattcctaaaaataaaaatgttgagtcaaaagccattcaaagatattgtactactttataattccgccaagtaatatatgagtatgctcctttatatacaccaaatatttttatctcccctgtattagtccattttcttaccactataaagaaatgcccaagactgggtactctgtaaaggaaagaagtttaattgactcacagttcagaaggctgtggaggcctcaggaaacttacaatcatgtcaaaaggcaaaggggaagcaagacaccttcttcacaaggcagcaggaaggagaagtgctgagtgaaggggaaagagcctcttataaaaccattagatctcatgagaactcactgtcacaagaacagcatgggggaaactgctcccatgattcaattacctccacctggtttctccgttgacatatgaggattgtggggattatggggattacaattcaagatgagatttggatggggacacaaagcctaatcatatcattctgccccaggaccctcccaaatctcatgtcccttttacatttcaaaaccaatcatgccttcccaacagttccccaaagtcataattcattccagcattaaccaaaaagtccaagactgaagtctcacctgagacaaggcaagtcccttccacctatgaccctgtaaaataaaaaacaagttacttccaagacacaatgggggtataggcattgggtaaatgttcccattccaaatgggagaaattggaactatggggctacaggacccatgcaagtccaaaatccagtggggcagtcaaatcttaaagctttgaaatgatctcctttgactctatccacgtccaggtcacactgatacaagaggtgggctcccaaggccttgggcagccctacccctgtgcttctgcagggcacagtcctcttcccagctgttttcacaggctggtgttgagtgtctgcggcttttccaggtgcatggtgcaagctgtcggtggatctaccattctgggggctagaggatgatggccctattcttacagctccactaggcaatgccccagtggggactctgtgtggaggtgtctgaccccacattcccttaatcactctagcagaggttctccatgagggctctgcccctgtagcaaatttctgcctggacatcctgccatttccatacatcctctgaaatctaggtggaggttcccaaacctcagtttttgatttatgtgcacccgtgggcccaataccacatgtaggtcaccaaagcttggggcttgcactgtctgaaacaacagccagagctatatgttggcaccttttagccatggctaggacgcagggcaccatgtccccagagtgcacaaagcagcaaggccctgggcccaacccctgaaacagttttttcttcctaggcctccaggcctgtggcgagagggcctgctgtgaagacctctgacaggccctggagacatttttcccattgtcttggtgattaacgtttggctcttcattatttatgcaaatttctgcagccagggcttgaatttctcctcagaaaatgggcttttcttttctattgcatcatcaggctgcacattttccaaacttttatgttctgcttcccttttaaacataagtcccaattccaaaccatctattagtgaatgcataaaactgagtgctttttagagcacccaagtcactccctgaatgctttgctacctagaaatttcttccaccccaaatcatctctctcaagttcaaagttgcacagatctctagggcaggggcaaaatgctgccggtctctttgctaaagcataacaagagtcacctttgttccagttccaaataagttcctcatctccatctgagactacctcagcctggacttcattgtccatatcactatcagaattttgttcaaaagcattcaatgagtctctgggaagttccaaactttcccacatcttcctgttttcttctgagccctccatactgttccaacctctgcctgttacccagtttcaaagtcactttcacatttttgggtatctttatagtagcacctcactctctgtggtaccaatttactgtgtcagtccgttttcgtaccactataaagaactgcctgagactgggtaatttataaagaaaaaaggtttaattgactcacagttcagcatggctggggagaactcaggaaacttacagtcgtggtggaaggcaaaggggaaacaaggcaccttcttcgcaaggcagcaggaagaagtgtcaagaaaagtggggaagagccccttataaaaccatcagatctggtgaggactcactcattttcatgagaacaagttgagaacagcctgggggaaccacccccatgattcagttatctccaccaggtctcccttgacacgtggggattatggggattacaagtcaagatgagatttgatggggacacaaagcttaaccatgtcatcccctcaccaaaaaaaagttctattcctgcagaaaaagctatagtcatgccctgcttaatgatggtgatacattctgttaataacaaactcatcattaggtgatttccttgtcatgtgaacatcatagtgtgtgcttacacaaacctagatggtgtagccaactacacacctaggctgtacagtatggcctgttgctcctaggctgcaaacctacagcatgtgactgtactgaatactgcaggcagttgtaacacaatggaaatgtttgtgtatctgaatgaacatagagaaggtatagcaaaaataaagcagtataatcttatggggccactatcatgcgtggtctgttgctgaccaaaacattgctcttcagtatgtgactatactgcttttacgatgagtttctatcaacatctagattcataagtgacttctctattaataaaatttgttcaagaaaatcatggtatatgaataattcagcaaatatttgaattcttgcctgtttatggaattctcgcctatctgtggggtattcattaaccaaatattaattgggaacctaccatgtgccagtctctcggggtaaagcagtaaacgtagcaacatgatccttgctttcatggaacttagagtctaaagaaggacattgtacagtgaaccagatggcaaataagtaccatgagttcagatagtgacaaatagtctggagaagttaaatggggtatgggatggggagtgacagaggtggagggcggtagcctgaggtggccagaaaaaaaaaaatctgagctggaaccagaatgataagtaggagccactgtgaaagctggacagactaactgtgggagctgggtacagtccttggttcccgaatgttggcaggaaaacctactccatagtgctgtgtcccacttgtacttcaatgctgcaccttcccgctggccagttgcctgtctttcttttcaaggcaaggtcttactcagcttcttgtagacttccccagctccaagttaggactgtgccttccccatatttcattcacgtctcctgaaatcttcttgggaagtctgctgttttcttcctttctttttattccactacggagaatttgagttgtaactgttccactggctttatcccattttattcacacatttgcaacaaacttgtccagttcctttttgtttttgtttatttgttttgttccttcttttggagagctgagagaatggatggaggaagagcttatcaaagtcaatgcaggcttgttatggaaaataggaaaagtacagaaacatacttaaaaatagagggaaaaaaatcactcctaattcctctatccagaagtaactttaatagtgttggctttctcagtattttatcaatacttcgttttttctatgcattcacattcttgttttatttttagctacaacattgtatcagaggaattttccatgtcattgaaacactctaatattttaagtggctatagacccttccataattttgatgtgctgctatttatttaactatttccctgatactagatgttaacattttttttccagttgtttgctattataaattaggcagtagtgaacatctttgtgcatgtatctttgtcccaatctctgatcattttccttaggacaaattttccaaagtagacttattgcaaaaaacagcatagactttggtacatgctacaaacttccttccagctccccgttcagtgctccccacattccactgttgtaatgaggcccaattccttaatgtttccttctagattcagagcctaaacagcaccattacccagctggccctccccattcttcctaaccaccacccgaagtgttggggacagtctctttttgctcccctccctaccaggacagtgataccctcccaggagggtctaacactatggaacccttgatatcaaggcctgatcttgtcccttccttagttcttggtgtctggcccactctaagctgtgaaattttcccccatttttgcagctccctgccctggaggaccagctcagcaccctcctagccccggtcatcatctcctccatgacgatgctggagaagctctcggacacctacacctgcttctccacggaaaatggcaacttcctgtatgtccttcacctggtgagtctatagctctggggcccatgttcctcttccctcagcttgatggggagtccacaggcctctcttatttggaactttagactcctttagaaggcagaaacggcatcttatcaaacccgcctgggacccgagcctcccctggcttgtctgcagagaccagggcaggtgaagggagtgcccttggggctggctgacactggcctgcctgtgcctgcagtttggagaatgcctgttcattgccatcaatggtgaccacaccgagagcgagggggacctgcggcggaagctgtatgtgctcaagtacctgtttgaagtgcactttgggctggtgactgtggacggtcatcttatccgaaaggagtgagtcttcaaagctggtcccctctgtcctttgccgagcaccctcgctgggccaggcagcgtgtgcccagcccctgtgaagctgccatttttcacatactgcccccagctgggtccctaggtcagagaaacagctcaagtgaaccttggagaccatctggtctgaccctctgactttatatctggtgaaacagagcagagaatggaactcacttgcctggggtcatctagctggttggtggccacatccaaactggatatttgagctcaggactctcagtccagtgctctttccatcctcccaacatcatcacccgtcattacaaatctggtctgagctagtcctctctggcttctcaagcttcagactctctctccagaaaaacacaaacccatgcacattcatacagtctcgtgaaggttttctcaggagacagaccttaaaacctgtctctgggcccacagtaaagaacttggggaaagagaatcatggttcagagtatacactgaggtgggagggaccccagaaaaggcttgtagttgaaatgtagacctagaaaagagaagttcgtagtatcaccaccccctgattctctaagatggattgggaagctgcggagtgtgaagctctgggactttagttttgtggcgatatgagcaactacccatattgaggcatttctcaaatgcacaaacattgtttcatgagtcattttagcccagataggtcatggtgtcagtggcaaatgctgcaggtggcagatgcctgttacatgaatcacagtggccagtgcagacgttgccagcatccgagatggctgcgaccctgagtagggccctgatgatggaccagatctttctgtgttcagtggcctctgtgtgagaagcttaagcatcaccctggctctctctagctggctttgtatgacatgtgtttgtgtgacagaggctgaggagtgaggtgatttgctcagctgcctgccttccggctccgtgcctatcccaccccactccacagttagagctcggccggaaacctggccccctttcccagctgtgtgggcaggtcatatgggctcaccaagctctgatgctgagctgagactgtggtcctttggttgggtgtgggggagaccagctttcttgtgatctctcccgccctctctggctctgcccccaggctgcggcccccagacctggcgcagcgtgtccagctgtgggagcacttccagagcctgctgtggacctacagccgcctgcgggagcaggagcagtgcttcgccgtggaggtgactactgggcgcgggagtcctcaggacttgaagctgtcaggtcagagggggcgtccacctttaagaccatgttttaaccctaatgaatgaaggcacaagcagcccctgaaactcgtgtattcagagagagttgttctttctggccatatggagggttgggtaccctgatgggctttcccatggtaaaacagctcgatcctggataacacatacttttaatgcaatttttgggttcactgtaaattacaggaatctttgaagacagttccttcaaccctcccctccttttcccacaaaattatattgagctggaactggaggggaaagcagtggagaaaaacacagcgctaaaggcaagattccctgagtgcaaatgataccagcactacagccagtaaatagccttaggccagcagcagcataggagagctgagcctgcaactctaggttaagcccagccccaaaaagttaaagtggctactggtccttttataaagccctagtaaataaaaaactaaaaaattaaaaataaaaactaaagtggctgctggtcagtagcactccttgccttcctaaagaggtaaaccaaattctctttcaagcagtggttttcatactccagtgtgtgtcagaatcctctgtagggcttgttaaatacaggttactgggcctcactttcagcttttctcatttagcgagtctgggatgggggctctagaacttgcatttcttttttttttttttttttgagatggagtctcgctctgttgcccaggctggagtgcagtggagcaatcttggctcactgtgacctctgcttcccgggttcaagcaattctcctgcctcagcctcctgagtagctgggattacaggcacgtgccaccacgcctggctaatttttgtatttttagtagagacggggtttcactatgttggtcaggctggtctcgaactcctgacctcatgatctgcccactcggcctcccaaagtgctgggattacaggcatgagccacagtgcccggccctagaacttccatttctaaaaaattcccaggtgctgtttattgtgcttgtccaggaaccacactttgaaaaccactgctagagcaggaaaggtaaagatcaaacaaacgtgaactcacaactgaagaaaatcagatatggaagaaaataagccaccacgagtgagagtcaggaaaatcaatcaccaacagatttagatcccaaggcacttgatacattggaactattaggtatagaatataaaataactatgaaatatttaaaaatatgaaatgtagaatcacaaaatgagataagaagaaactctaaattgaccaggcaaatttgaaaaagaacacgtacagatattttagaaaagaaaacatagttgttaaaatgaaaaactcaagggatgtgttaaatagcagatgagacatagctagagggagaattaatgagctggaaaatagatctgaaggaattcattctcatacccccactcattcactcttccaataaacatatagtacctattatatgctaagaggtgtgccaggccatgggaataaagagatgaataaagacatattcactgcccttgaggggaaatcagccatgtatatactaaaagatataataaagaatcctggtgccatattaggtttttcatcaaaagctatggtggcacaagagatggagtggtaaactctttctgggacattaggaaagacttcttttaggaggtgacctaatgccattagcataaaatccaaactcttcccaagcctaccaggccctgtgtgatctatcgctgcctatttcactctagcttcatcttatgcctctcttgtccacgcttactgagtgctagtcacatgaaacttctttaagtttcaggaaaactctatatttagatctgtccaatatgatagtcattagctgcatgtggctgttgaacatttgaaatataactagtgcaaattgagttatgctatgcatgtgaaatatataccagattttggtaacttagcacaaaaaagaatgtaaaacattccattaataaggcttttatatcatatggtgataatattttggatatattcagtaaaatgaaatatatcattaaaattaatgtcaactgtttctttttacttttttaatgtggtcactggaaacatttaaattatgcatagggcctttcttttatttctgttggacagcaccattgcaaactctgtccccatctcatggcctctgaatatgcagtctccttgacttgcagtgttctctctctccctctttctctggtgggccatctggttgtttagatattagtttaaaggtgacctaattcagggacatttctttggacaccctacccaaggaggtctctgctatttctctctagcctagtgctgtgtattttgtacttggtgcttacttacaaatggcacttactttatttccttgtgtattgccttgcctcatccactggagtctagtgaccagacagtaagcctcaggaaggctgggacctggtgggtcttagtccccctgtttccaagtatctggtgcagagtccaagctcactgtggacagagtgaatgtccccactagcccagggcttggagtggggcaaggttgttggtgatatggcttcctctcccttcctgccctggctaggccctggagcgactgattcacccccagctctgtgagctgtgcatagaggcgctggagcggcacgtcatccaggctgtcaacaccagccccgagcggggaggcgaggaggccctgcatgccttcctgctcgtgcactccaagctgctggcattctactctaggtgagctcaaggtctggcatgtggtggctaaaggctccctggccttctcactcccctatggcctctgcctgaaaagcaccacctgcccagccaagaatcacctcctccatgaagcctgaaaccttcccagatttgattctccaacctttttcagctcacccatttctctgtatcattccttcctggaacactgtcttagagtctcaatctagaacttccttttatgttgttcttggtccctggtgctttcccactgctaaatcattttcttttctttgttctatacaaccaagttttattttgaaatttgacgagttaattaattgtatttgtgccttgcccatctccagaagtacattgctccttgagggcaggggccaggctccacactcctttaacctgcctgccccgtctcctgctgggcatgtgctgatgggtggccatgctcctgtgtctgcagccacagtgccagctccctgcgcccggccgacctgcttgccctcatcctcctggttcaggacctctaccccagcgagagcacagcagaggacgacattcaggtctcagggcagctttctgggcagagggaggccattagggaggtagttcagaaaacctgcctgaagatggtgggcaggctccccctggggactccatgttttctaagtcacaattctgggtgtgtggttgggcgtgacttctttcccactgctttcagatgtaaggggaattctggagtgcacatggtccagtgggttaaaagtgcagatttttcaagtcagccatggttcgaaacccagcttcaacacctggctgtgtgagctgagcccgtacttgcacccccagagcctcagtgcccttatctgtgcaatgggaataacaaagcatctacttctcaggggtatttggagggacaaaaggggtggttcccacagaacctggcactgcctggggcatagtgaatgcttagtgagtgtcagccaccaccatcgctgttgacctcatcaccaggggtagtggtgggttggataccattgtgttggaatttctcgaatttccacagaacagaccgcctagaatcgaatccctgggaagtctgaggaccacacacccaggactgcacccggaacgggtggaggggtggaggggtggaggcttctctgtgaagcgctgggaggcagaaggggtggagggagccaggtcagataggagctaaccagcctctcccctgccctgcacagccttccccgcggagggcccggagcagccagaacatccccgtgcagcaggcctggagccctcactccacgggcccaactggggggagctctgcagagacggtgtgtgctgtgcacttcgtggagtcaggggcaggaggggatcggcctctgcaggcgaccaggcctttcccatccctcctgggagagcagggacagggttgagccagctgggagagcctctcaacctgagccaccttctccattccaggagacagacagcttctccctccctgaggagtacttcacaccagctccttcccctggcgatcagagctcaggtgaggaccggaggaaagcaggaggaaacaatagctagctgcgagcgacaggcagcccaggacatctgtcttaggctccagtggacccccgtgcctcctaaggcttgagtgcaggtacccgtgttcctagagcacaggacgctgtctgcggctccccatcttccctgccagctccagcctgaactcaaggattgttaagaccactccactgatccctaaagctgttgatgacaagttgattcatttaaaacttctgtacatgcattctcagactcatcttttttgtaattaaaattaaaaattaagttaaatttagtaataatcatctaatttctatacattctaaaatatattcagcatctgtagtttatactttgtttctccaaagtatgtgggtaaacaataaaaaaaaactataaatattcaaaatggttgaggtgtggtggctcacgcctgtaatcccagcactttgggaggccgaggcgggtagatcacctgaggtcaggagtttgagactagcctggccaacatggcgaaaccccatgtctactaaaaatacaaaaattagccaggtctggtggcaggcgcctgtaatcccagctactcgggaggctgaggcaggagaatcgcttgaacccgggaggtggaggttgcagtgagccaagatcatgccactgcactccagcctgggcgacagagcaagactctgtctcaaaaaaaaaaacaaaacaaaactacaaatattcaaaatgttaacaaaaaatggacaaccttgcttagagaagtagataaaccaaaatccagactgttgtggtcactatgaataaacattacatttatttctgaagttcttaggtaaaaaaaaaaaaaaaaaagggtcctgtggtccctccacatcatctgatggaagaaagaaggccagggtttcaggaggagaaacctactggggactaggatttgaaaggaatttattatgtggctgcttttaacccaaccctggcacattggaatcaccaggcagcttcagccagcccaattaagttacagtctgtgggcctgggacccaggtgtgaatacttctaggaaattttcccaggtgagttcagtgtgcctcgggtgcaaaccactgctgtgcacagatttaggttacagcatgctttgccccctggctgcatattgaactcacctggggatctttaacaattattgaagctgagcctgtacccggagatgctgactcagttggtctgagctatgccctgggcgtcaggattttgtaaaagtccccaaatgattttcgtgtgtagccaaggttgacaaccactgggttagatgcttttaactttaggtctggctagaagcctaggaccccctgagactgtgtgtgaactcactgatgcctgtgcattcctggggtgagggttcctagctatcttcagattccctgagctcttgatgagcctgagacctgttgagaagcagagttctgggtaatctccgaagttcctcttaccactcccttcctcattcatcaccatcttcctcccagtccctctctcttgatagtggttttttatgccttaaaactgtaaaaaataatgctgttccaccgtgcagagaactcacaacttacaaatggtttgggttgcactcatccatttgtaaatcaggtgtttaagatgtaggaacacacttcccccaaagaaacatgattataaatgagggttgtttgcaatgaaatataagaggtaacagtattattacagacacataatatttcagatatgtggtgggttcagtaggtttttgtgcgttatattaggaaggaaatccacctcaattcccagcacacagcaggtgctcagtaagagcttgccggttgaataaatgaatgggcaaacgtggactgtgtgtgctgactcctgaggggcgggttgaggcctgaaggaatacaggggacagaacaaggaggggattgggggcaagggaggggggaggaagatgcccctctaccccctgaccaccattaccaaacatgtcctcaggagcttgattctcagcagctggctctgggggcagcttctctgccaggcccaggccgccttagccctggtactgcagagttcaccttgtgcctgccaacttaggatgaaggggtgttgccccagccacattagcacccctgcgtggagctggcagccaagggctgaggttgtggggggcacctgggccccctaccccatgctgttgagccattgcttacatctcatggtacttacatcgttatgttattacctgtggcctgcaggtagcaccatctggctggaggggggcaccccccccatggatgcccttcaggtgagtttctcctgtgcctgcctgggcgccagctgatctgagatgccgcagtgagtattgggggctctgagggtttcgcctccagggtgactctacccgtgccagccctcctcctgcccaccccagggctggtcagtgcaggtgcctgtcctggtgccagagctcagcccagaggcagggtccaggaatgggctgtgaggggtggcgaacttgcccctcccctcccccaggtgctgtccctcagctccattgttcttgggagtgaaagtccaatagaattttttttttaagtgagcatgtatatttattgtagaaaaatcgggaaatacaaaagtaaactataaaaaagggaataaaaattactcttaatcccgtcctcaaaatgagattaacatcttggggtgtttccttctagtctttttttcctatgactttacacacacacacacacacacacacacacacacactacatatgtacacatgtgtatttttaaaatcagatttggatactaacgtgtttcattatacttttttatttaaacatttttccatttcctaagcactcccacagtgtggtttgtaatgattggtagtccatcacatgcatatgttatttatctagcaaatccccaggaaaatcgcgtcatgtgtccagtgtttgctgttaggtatgacactgaagaggaatttttgtggcatctctcatgatttccttaattctataattttttgcactaaaggctttcttgcttagatccctctgtaaggctggagccttgcccatttggtcactttatgcctcagtttccccaatttgagtggctgttgggatgttctgagggtgattgaaatgatacaatgttgaacattagatacctccatctgttgcaaatgtggggaggggacctctccccgtccactccccatccacgagtgtttccctgccttctcggtcctctgtgccaccacccagcccctctgcccctgcccactgccctgcttggcacccgggccagactctgggcagaaaggcccaggagcagctgagggagaggggcaacagcgaaactggagctgcgagggcaggttcagcagagtgcaggaatttaaaaactggagtttcttggagctaaaaatgattatttcttgtggttcacagatagggccgcaatgggtgggtccaacttagggatcccacctctcactgcagctcttcttcctctgtagatagcagaggacaccctccaaacactggttccccactgccctgtgccttccggccccagaaggatcttcctggatgccaacgtgaaggaaagctactgccccctagtgccccacaccatgtactgcctgcccctgtggcagggcatcaacctggtgctcctgaccagggtaggagagcccctcaccctgccctgatgatgcttagggttggcacgtcttccccaggggcagccccgttcacccgcctctcggcccttaccctcagagccccagcgcgcccctggccctggttctgtcccagctgatggatggcttctccatgctggagaagaagctgaaggaagggccggagcccggggcctccctgcgctcccagcccctcgtgggagacctgcgccagaggatggacaagtttgtcaagaatcgaggggcacaggagattcaggtgagacccaagttccagtcctccccacctggggaagaggcagggctggcagcagggtacatccggtccacagcagctgaggggccaatgggcctgggttcctgtccgggctccacctcccccgggcctacgatccttgttttccctattatgaaatgatattgaaaacttagctgctttttggttttcagaatctttttatgtgtgtttggcagaatacgaattataattccccttttttaggtgtggaaactaaggcttagacaagttttaacttggccaagattatgcagctcatgagcagtggagccagagcccggatgcagtgagcaagtgcagtcgggatccgcccgtcacgggcttcctctctgcagcggggctgtgtccccgggctcacagggcaacacagggatgtgcaggtcacggctccaccccacccccagtgagcttagggcccaggtggggagctgagaccaggagacaggtgagaatgtgcaggcagtagaaacagtccatcaccccgtgctctgacaaagcccagatcagggcctggacggcagtggggctggtggggcttgactctggatttaagcagtggaggcgcctggtgtttgaggagctgggacccattgtggctggagtgcctgtcagtctgaaggctgcaggattggctggaggaggcagtgccacatcccgcagtgcctcagggtgtcctaaggagcactttcactagaacaccaagttcttctgctttatagagatcccgtgaggccgccccctgcatggctaccccatgcccaccccataccctcccagcttctgcagcagcacctcctccgcacaccccagccgctgccctgtgtgtgccccccaccccgaggggctggcctggttgctgtgacggtgctactatgtgtgcctgtgcccgtcagacagcgagcccctggaaactgccctttaaataaacgctgctgagtgactagaacatggcacactgaagtctgcagggggctggtggggcctgccagggtagcctgcattggccagaagggcagatttgtctgggggccctgtgccctctcagagcctgatctgagaaggactttggcctggacctcactggaaatatggtcgggatgcaaacctgccccctgtcttccttccagagcacctggctggagtttaaggccaaggctttctccaaaagtgagcccggatcctcctgggagtgagtggtgggcctcaggacaaggggtgggtcgtgtgcccaggggactgttccctgggaggccacatctcctccaccactgcccttcatttatcagcaaaataatttcaagaaaggagatttcttcccacatacgtggagcaccgcgtggagaagctgggaagctccttcccattgcctgatcagctgtggctgcccccttaggtctttccatctgtctgtcctgggtgcaggagcagggtggtccacctgggagtgaggggctccccaggttggtctgtcctgggtacaagagtggggtggtccacaagggggaagggctccccaggtctgtctgtcctgggtgcaggaacaaggtggtccacacagggcgaggggctcccctaggtcccttctgctgtaatgccctcctctctcgtgctcaggctgctccaggcatgtgggaagctgaagcggcagctctgcgccatctaccggctgaactttctgaccacagcccccagcaggggaggcccacacctgccccagcacctgcaggaccaagtgcagaggctcatgcggtaagtgcagtgcggccccctgggtggccagggcagggtctggggcccgtacttccttcacgcagcccgagcttccctcggcagggagaagctgacggactggaaggacttcttgctggtgaagagcaggaggaacatcaccatggtgtcatatcctgacgccggggccccagccagcccaacaagcctcttggatctgctgcctctacacctgctccctggagggactatgggccccagggaagggggatatatgttccaccccatcagctgctcaccacctctctgaaggaaaataatgggacatagtggcccatgtgccttgtctataggaatacttcaagctgaaatttcaggaattcctcctgtcccaaagttaattcacaaaagccataaagaccctttatgtcagtgttgcccagctggcaaaatggtagtaggtattccacgaggggtggggaccggggggggggttcctgtggtctagtttggttgaaagggccgttgtccttcttagatcatgacagtgcacagtggcatgtaaaagctctagaaggcctacggcaaatgtttatccctgtttcagaagccattcctaagactatttgacccttttattatggaacactaattttatcgaatactgattttccatgaaaattcatgtaaagcagcttttcccatatcatctctgaaatgtccagcccccagtctcctgaggcaggtcctcagtgggcaggtgaaaggatgccagagggcctctttagccaccagctgctgcccttctatggatgtctcttcccctcccaaatgggagccttccaaactctcatgatgaagtgtaagggtttagcaagatcacagtgaggtgcataggctgggcagtcagctaggctcactcatgaaccaagtggctgtgctcacactccagcctcacgtgtgtctgacttaaattcatccctcatgaaaatgatgcataccatgttcctgtagggccagaactgcccgtgtcaaatgtgcaagtgttgaggatcttacagcttttcaaggcctggggagcttggaggtagtgggggatctgaggaagcaaggatacagggggcttagctgaaatggaagctgctggaaagaggcagtcctggccctcctgccaccatgactgggcacagctagaagcccaggacagaggcaggccgtccctagctcctggcttgtaagcaccttaactcagaccttcacctacctagaagacttcccaggcttggtgcacttcatctatgtggaccgcaccactgggcagatggtggcgccttccctcaactgcagtcaaaagacctcgtcggagttgggcaaggggccgctggctgcctttgtcaaaactaaggtaaccatttggacccagggcggggatgggtgggcctcagccaatattgggtagcccttcctggtgtgatccacatgcctggggctagcagagtgcgctgggcagcaggcccaaggaggcagtggccagtgccggcataaataaatgctcgacaagtatttgttgaatgagctagaatggagagaacggcaaggtccatcagttgggcatcagaatttaaaacaaggtgatttctgttaaggaagcattccctggaaattcttttattctccttatttaactgactgtttttcatgacaaagttgtatttttgatagggggaggacccctgccactctccaaaaaaactatacgtgtgtgtgtgtgtgtgtgtgtgtgtgtgtgtgtgtctgtgtgtgtgtgttcttttctttctttgttttggtgggggaggcaagtaaagtgtattctaatgtttaaaacaagatgggaagatgggtggtggaggcatgtgttggaagcccagccccgtctcccaccagttatgtggctttgggcagtacttagcccaagggtcagtttcctcatctgtagaaggaaataatagtgctatttacatcacagagttatgaagagtacatgagaggatacgtatcaaatatttagcatagcacgtagcacaaaatacagatacagttcattcagtacttactggtggcatcatcatcaccatcttcatccttgcccctcattctggagacagttggggttatcttggtacgtttctttctgttggttttctgtgcagtttgttgtagttgagatcactctgtatgtgcaactttgctaccatgttttcatttcacattatatcagatgctttccctcatgccattaactctttatagacatgatttttagcagctccataatagtccatcatgtgaatgtaacataatttattgaaccatttccctgatgtttagacatacagattatttctaggcttttgctgttataaataattctgcagtatacaccttgcatacatctgggtccccatctctgattatgtccccaatatggattcctagaaatggaattattaagtcagatgggaggaatgtttttaagattattgatggatgttgtcaaattactttcctgaaaagtacagtcaatccatggcagatttaatgagtaatcacacggcgatgcagtttggagcagatcgcctgtccctcccgttaagggtagaggagagggctcctcgagtctcttcccagccctgagaggtggcagagagcccactgtccctgctgccttccctggggcacttcaccggcagcactggtgacagtccctgcgtcaggcaggaggacattcccaggggagctaaggcacgtggtttctcaggccctgtgtttccatctgaccccttggtgaactctgatttggacttcccccctggctcagcacatcctacagggtcactcacctgtgccatcagttcccagcctgaagggcactaggtgagtgggcgaccccaggcagaggaggggattcaggagaccacaccttgttctcctgtgttcattaatgatgtccctggctattctctggcctgaatgatcatttcactaatttattttttttttaatattattattttttgagacagggtctcactttgtcacccaggctagagtgcagcggcacaagcacagctcactgcagcctcgacctcctgggctcaagcgatcctctcatctcagccccccaaatagctgggactacaggtgtgtgctaccacacccggctaattattttgtatattttgtagagacagggttttgctatgttgcccaggatggtctcgaactcctgagctcaagcaatccacctacctcagcctcccaaagtgctaggattacaggcgtaagccaccacactagcccagttcactaatttatggcatatgtgtatagtaaagttacacaaagcttttttacatatattttgcccccacgctaactggagggtagtccatccatccaataatgatttattgttgagcctcctgctctgagccaaggcagtgcccgggtactaggagaggcccctggcactcacggagcttctcggctgtgccctttccttccttcggaggtgagagctgcccaggcagaccaaggctgggagagtggtgatgcttgctgtcttttccccaggtctggtctctgatccagctggcgcgcagatacctgcagaagggctacaccacgctgctgttccaggagggggatttctactgctcctacttcctgtggttcgagaatgacatggtaggtgaggctgagtccctgggccaggacgggccacacacacttcccgctctgtaactcttggattcctttcttctgaattgttgtctgtctgtctcatcttctcttcttgttgctggtaagcccagcaggttgggagccagagttcagaggtcacattttcacatgggcgtttaactgctttgtgatccctctgcccagctgtctggcaaactcttgccattgtccacgtggcatccaggcacacatgtgagcagaaaggcacatgccccactgtgagaaatgcgactcagaccacacactttgtcgctagtgcttccatgtcgccagcgtcacatgccaagtgtggcacatggtcatccctgtggcataggcccctgaactcaagagcataggcccctgcttgaagcagtgagccaggctgcctgaggagacactggtggtgtggctcggggccctggcctccaggccctgcactgcttcttctgggcctcactgttactgcagagtagggtccagtggggggagcttactatcattgtgtctccatccatacaacggggtcagggatccctgccccagccactgcacagggctgtgaggggtgcagtggctgggactcctctcctcctgtctctccctcctctctgtcttttccctttcttcgctttcctcctgtttctcttttatttgcatctcgcttgtcaccataagtggttgttccagctctcaggagtggttgttccagctctcaggagtgttcctcctccctcgcagcccttggtctctgggtccctgcactcctgtgccttcccctgcccccaccctgcactctttgttcactgagggtgacagccatccctttccatagggcagggcggttactggggctctccaccactgttctctcagttaccccctcacagccctgtaaagtggctggggcagggattcctgaccccgttgtacggatggagacacaatgatccggagatcagacgccatggccagggccaccgaggctgtaagtgaggaagccggagcccaagctctgctcccccggcctgcaggctcccagctttcctccgtgccctcagaagtgcccaggacgtgtgtacaacagaagtgctagaaaattcctgtgacctttaccttcacttctagggagggacaggagtctgtgtgcttgggtggccccgtggggtgataaagtgaggcagagctgtgggctggagaggccaggtttgaatgccagccacacagcccagccggtgccgtgggggcagccctgcacactagggagtccactccccctgcagggcaggccacggtgcccaggcaagcatcagctaagtgccatgttcatgcctggcacacacggcacgtccagcagatcttaattcccttccccaccttatcccaccctgggaattcccaattctttcagagcagaggcttgggccttttgtgaatgctctgctcttcaagacctgtatgacagccctgcagggtgccctcctgagcgtgtgtttgtggcctgtacaggtccaggtattgacggtaatgagagctaccctgccggcccttgaagctttgtatactttttctctaatgttcataaggtgactgttgtcattctgacttcaaagatgaaaaaacaaggtccaggcattttcccaagcacccagcgcacatgacagagccaagccaggccgcaagcccggtgcgtctgactcaggcccttgcactacccccacacccactgcctccctgtcctccctcctcaggggtacaaactccagatgatcgaggtgcccgtcctctccgacgactcagtgcctatcggcatgctgggaggagactactacaggtgacgctgcgttgggagccactggggacagatgcccccatttgggtgataagtgctcgcctctgccgggagcagcttctgcttcagcagtgccctacctcagacccagaaatccacgctgggaacaccttcccggctggccctgtgtgcagcgagggaggacgggtgtggagggtacatctgtgttcctaccaccttcctgctggcatggtcttggcagcacggggaacgtctgtgcccggcccagaacatccccactgctacctcgtagccaggatgccactgttaggtcagtgaggaaccggagcggttgtcaaggcccacatgcaggggcctagtgagatgaccgagggcatgggcatttgcttgcgagggcccagagaggcctctggcgctggaggagtgccacagcctcactcctgaatcccatcctccccttcctccccaggaagctcctgcgctactacagcaagaaccgcccaaccgaggctgtcaggtgctacgagctgctggccctgcacctgtctgtcatccccactgacctgctggtgcagcaggccggccagctggcccggcgcctctgggaggcctcccgtatccccctgctctaggccaaggtggccgcagtctgcctttgcatcctgtcctccagccacccttgcttgccactgttccccatgacgagagcctcctgtctgcagtggccatcctgaggatagggcagagtgcccagggtggccccagggcttctaaaaccccacctagaccaccctccatgtcaggtactgagcaaggccccagatccttctctctggaggaagagggaagcccaggggtcctgtttgtaaaacaacggtggcaacagctcctcttccagagctgcctctgcctttatcctgggagatggggaggaagccccatctctgctgttccctgcgtggaggaagcccacccagcaagctctctcctaccccaggtaaaaggtgctcctttgcctgggtttgaattccagcgctgccacttcctctctgcacctcctggcaagtttcttctattccccacgtttaaagcgatggcacctccgtcccagggtggtgtgaggattacccagtgtggtaggtgctcaataaatgttggtcattgttatcactgaagcccaacatgctagtgcttctagacccttctgtcagtgctgataagcccttgctaagtcccagccccttcatgcttggctggcgtctgccctagggctggggttctcaagcccctggccctggcccagagatttggattcccttggcggccgtggagcccagcctttgatgtctttcaaagcttctgtggtgcgccctggattgagaaccaccacccgaggggtacagcccctctcttccaaccgagaagttcctgtcccagaatggacccagggacaagagaccctgagagccctgggactgggagtgtctgctcctctgaggccaggaggccggtgctgggccagagaggacggcgtggcgaaagtcagcgtccactgcagcacaggatcagatggccgtgtgctgtgcatgcaggagcctcgccttctgtgtctttagtcttgagccaaaatttgctcaaagactgatctcttccttgcagggaacagctttggggctgggggaactagaacccacatgttggtctaaaccctgagaaggtggcagtgaggaagtatcccctcaggtgactggatctgtgttcctccttaacatcatctgatggaatggcaatgaaaagcgtggattgtggaaaatacagaaaaacataaaggaaaaaactccaatcccctgagcccaccactgttcaggacccctgcttttgtcacctactatttccctttagtttttagcagcggctggatgtgatatgtctagtttaaccagtccccttgatctttctatataataaataacacaggagtgaacatcctgaatcaga

SEQ ID NO: 15617 - DNA, 30738 bp, Homo sapiens
aagcgcgcccgggctcctgcaggcggggcgctgtgcgcgccgcgatccggtacgtgggcctccgggctgtcccctctgggggcggcgatcctccctccggagccccccttcaaccctcccggaagtgaggtagggtccctaggggtcccggagcgggcccactcctagcctcacccactccgggcgtgtggccgtgggccggtcgcttcctcgctcggggccaaagttcctcagccgtgaagaggggtggatgtcacaagtcaagcctccttcccagggtggccgtgaggttcgggggtggggggaggtggggatttggggtgaaactggacagaaactggcgtgctaggcaaacgggagccccgcggcggcgaactgctgactcgctctctccagagactcaggggcagggccgggctccgaaggtgtgggaccccagaaggagctgctgaagacgggaccaagggccacagggaggtttgctggggtccagatggtgaaagtgggcgctgggggtcgccccaggttggccccccgccatctggagctcctttcgtcagtgagtcccctccgagttccctttctagggcaagatagcgaggtgaagcggaagtctcagtgtgacaccggcgaggttctcttcccagcagcctttgggaagcatccccctgtttcgggaatatggcattcgggccaatcatgtgggtgatggagcccgtctcagggttcggctgctaaaggccgaactcgtaacagcagtctctgtggcgggtagtcacttgcctcttactggctcacagtgcttgacttcctaattaagttttctgttgttcctgccctctattcaaatatgaatgattccggaaccagattgattaatcctgttatttgaagaagggaagctgggaaataggaataatgatccccacacctatgtaagaacgcagtttgctaaggttactttgcagcttgcctggtcactcccatgatctaaccctgtagggaggtagagtaggggatgttgctctgtttctccgcaggagtttgaggctcagagaggtttatgggacttggcaaagccaaaactagaacctggtcccagatgcctttcctgttagtttccttccattcatcgtatcatcccaggatccccactcccttcaccgggactgcatcctcaccacctgggatgtgctatgctgtctcccgtcagtcactcctagcaagctccctggggctgcttggggagctctgagtgacccgcagaagtgagagcacttcatgggaacaaaggaggaaggaacaaaagtgggcacctgctctgtgcaaagggctgtgctggccgggttcctattctccattatgggaggtgaggggcaggatcccagatatgttcttagcagactgcctcagggcctggagagaccagggaccacgcagcccttctccagcttgtcctttctcaacgggcagcagtcaagaccagggcatctgcctgccctcatattctctctgttttaagcatttgcaggaccagggatgctgtgctgctctcccatgagccagtcaccgagtcggtctgctgcagccctttctgaacctctggccgtctggatgctccactgtgcttgccaaggtagatgatcttgccccacctggggaggacagggaggcaggcagcatccaccctggggctttgggaggcagatggaatgaggtaggcagtggactgagtgctactgggctctgcacacctgctcatcccctccccagccctgcatcctgaggccacccccatcctgatgcctcatctctccttcacccctcgaatccaggcaggtcatcacagcctgctgcatctttaaagctcctcccagcccccaccaaggggtgagcactcattacctgacacccgcacctagatgaccgccttcatgaccttgacctgcccatctccagccagccggtcacttctccgctcacaaccacagcctccattccatagcccactgctccctaacccatacactctggtcagctttgtcacatgtacctgggagtcccagagcagcctcttcaggtccacccgcctctcccagcaacctccttttcacacctgttgcactctcagtgtctgccttggcattgagtaattctgtgggaataggctgcattccttcttcactgtgctgttatgtctcctggcatttgccataaataccttgggaccagttgcaccaagttagtttgggaggaattcagtaaggaccactaagctggacatggggatgacggaacacaagacctggagatgctgtgatcctcccaagaaaactggaaatccacttgtgtgagagttacagcagagcttcctaatcattgtcatggcttagcgcacataccacatgattatatctgcgtgacaccctgaggcacataagaggatttgaaaccactgcctgaggcctcttagctgcagcagccagcctggagcactgtcctcaccagcctggtcaggctgccccaagttttagaagatcgagggtttgccgcacgcagagggccatggcacacagtgtgggaagctgtattaaagatcttccagtgggtgaatagttaagacatttcttacataatcaagcacagagtgtgtggtgtgtgtgtgtgtggcgggggggtggggaaggagatttgggagggctgaagacactggtggctgtggccctagaagctgcagcctactaggtacaggggctttaggcagcctctgttctcaccatgaacagggagagcagcatttgaatgaaacttctgtggtgctgaagtaaattcaggggctttgaggctcatcttctggagctgttttttgtttgtttgtttgtttgtttgtttgttttttcagacagagtctcgctctgtcacccaggctggagtgcagtggtgtaatctcggctcactgcaacctctgcctcccgggttcaagcaattctcctgcctcagcagttatcccgagtagctgggataacaggcacttgccaccatgcctggctaatttttgtatttttagtagagacggggtttcaccatgttggccaggctggtctcgaactcctgacttcaggtgatccaccccccttggcctcccaaagtgctgggattacaggcgtgagccaccgcgcccagccctggaactgtttttatctgagggagagatatctctggactgcccagagatggaggtgcaccagtgccctccgatccacaccaggcactaactggctgccgtgagcatggcctccctgggcattcggctccatgtctaggccaagacctgggtcccttcctgtgccagtctggttccagtaggccccgtggtgggtctgttgctgtgctgagagggaccagataccacagaggaaagggccccagccttggcatcaaacaggtctgggtccagatcccagctttgccacttcaggctgtgcctgtgtcctgctctctaaaatgggggtacctgaagagttctactttgtccagttgtgagggtgcaacaaaaatggaagtcccttgtgatgcctggtgtgcagaaggggctcactgaatgtttgctgaggttggggtcctcttcgttactcagactgagctcatagatgttggggctggaggctgaccttgaccttgcctttccctggcagatgaagtgcgtcttggtggccactgagggcgcagaggtcctcttctactggacagatcaggagtttgaagagagtctccggctgaagttcgggcagtcagagaatgaggaagaagaggtgagtgcagggtaggcagtcccaggaggggtggataggaaggaaccatacaaaactcccagcaggcagagaggcaggaaaacctgtgttcaccctgtcctgggcagcatgagcagggtgctgggtggggtccagcatccttcacacctagacccttatcctcaaggttggcctcttgatgctctgagctcggtgaccccacccccacaccccaccagtcctctctggactaaatgagggcaagaagaagtcgaattttatcacgtaacagaagaacttggagccatcagtttctgtaacctaaaaagtttaacaaggctgggcgcggtggctcacgcctgtaatcacaacactttgggaagccaaggtgggccagttgcttgagctcagggatttgagaccagcctgggcagcatggcgaaaccctgtctctacaaaaaaaatacaaaaattagccaggtgtggtggtgcgtgcctatagtcccagctacttgggaggttgaggtgggaggatcacttgagtccaggtggtagaggctgcagtgagccgagactgtgcccatgcattccaacctgggcgacagagcaaaaaaaaaaaaaaaaagtttaacgtaagctgaacacgttaattttttaatagctgtattaaggtatgattaacataccataaattgcacatatttaaagtgcataatttgataagctttgatatgtatatacctatgattctatcacaatcaataaaaggaatatatctaccacctcaaacatttgtaatcccttctttcccatccccatcgcataggaactgctgatctgctttctgtcatgatagattagtttgtatcatatggccttatataaatggagtcatacagtatgtgcttggatttagtttggttttggtttgactgctttcactcagcataattattttgtgattcatctgtgttgtggcatgtatcaatcgttcattccttgtcattgagtagtaatctattgtatcaggatgccaccatttgttcattcatttacttgttgatggacatctgtgttattttcagtttttgactattacaaataaagcaactatgaacatgcacgtacaagtctatgtatacatggatgctttcatgtccaaggacagatacttaggatagactggctaggtcatgtaggtgtatgtgtaactttttaataaactgccaaacttttccaaagtggttgtgtaatttttgattccacctgtagtgtttgagagttcagttcctccatatcctcaccaacactatagtccgtctttttaattttagccattctaatagatgttcactagaatctcactgtgttttaaatttcatttccttaatgactaatgcttttgagcatcttttcatgtgcttatttgccatatcttttgcccagtttttatttgagttgattgtttcttcttcttattcttactgagttttgagagcttctaatatattttggatggaatcctttatcagatacatgttttacaaatattttctttcagtttgtggcttgtgtttgtattctcaatggtatctttcaaagagcagaagtattagaactcgagtttatccattttgcatttatggattatgcttttagtgttatatctaagaaatctttgcccaacttacaaagagttttctctacatattcttttgaaagttttatagttttaggttttatatcaggtctgatgatctactttgaatttttgtgtgtggtatgagctatggattgaagataattttttttttgcatgtggacatccagttcaacagtttaacattacaactcagaaatacttgtcattttcacttacataatttccactctacattttaaaggagtaatttattttgaaaatgttttccagattaattttgggttaaaaatatttttactggggatgcagtggaaggtgttcttacatttctgcagcatgggctgattgcctctctgtccctttctgctctaaggggtctcatcatccagccaatgagtgagctgactccacctcagggagtccatttaccatcaacatcactcgtgttctcatcacagtctttaggcaaacacaagatatcagagatcatagacattcaagtggttttatttaagctaactgttaggcttttttattttttaacagtcaatacatataatatttaaattaagaatttttaaatatttcagtttttaaactactgttacaactatgtcaacttaagaagcaaactatttggtggcctttctcttcctctttattgaaaacctggcaaaggaacgaactcctgaattttcagttcctaaaaatgagtagtgtaaaggaaaggtggtctttaaagttttttttttttgttaatgtgcaacacattcttttctcatcatataaataatgagttaattgtaggaaatttggaaatacaaagagatagtttttaaatgacctataattccatgacccagagctattagctttttaatatactttctttgggtctttattttttctatataattgggattataccacatttacagttttactgcctgtttttttttccacttgccattatatcaagatatttcttctatttttttaaatagtctcagaagcataattcttaatggaaacattgtactccagtacatgaatcagtgtatcatcctttatttaaccattttcctcatatggacataaatattgctcctaatttgctatatcactcttgctttaagaaacatttgtgcttaaattttatctcatgtcagataaattcctaggataaatttaggataaattcctaaaaataaaaatgttgagtcaaaagccattcaaagatattgtactactttataattccgccaagtaatatatgagtatgctcctttatatacaccaaatatttttatctcccctgtattagtccattttcttaccactataaagaaatgcccaagactgggtactctgtaaaggaaagaagtttaattgactcacagttcagaaggctgtggaggcctcaggaaacttacaatcatgtcaaaaggcaaaggggaagcaagacaccttcttcacaaggcagcaggaaggagaagtgctgagtgaaggggaaagagcctcttataaaaccattagatctcatgagaactcactgtcacaagaacagcatgggggaaactgctcccatgattcaattacctccacctggtttctccgttgacatatgaggattgtggggattatggggattacaattcaagatgagatttggatggggacacaaagcctaatcatatcattctgccccaggaccctcccaaatctcatgtcccttttacatttcaaaaccaatcatgccttcccaacagttccccaaagtcataattcattccagcattaaccaaaaagtccaagactgaagtctcacctgagacaaggcaagtcccttccacctatgaccctgtaaaataaaaaacaagttacttccaagacacaatgggggtataggcattgggtaaatgttcccattccaaatgggagaaattggaactatggggctacaggacccatgcaagtccaaaatccagtggggcagtcaaatcttaaagctttgaaatgatctcctttgactctatccacgtccaggtcacactgatacaagaggtgggctcccaaggccttgggcagccctacccctgtgcttctgcagggcacagtcctcttcccagctgttttcacaggctggtgttgagtgtctgcggcttttccaggtgcatggtgcaagctgtcggtggatctaccattctgggggctagaggatgatggccctattcttacagctccactaggcaatgccccagtggggactctgtgtggaggtgtctgaccccacattcccttaatcactctagcagaggttctccatgagggctctgcccctgtagcaaatttctgcctggacatcctgccatttccatacatcctctgaaatctaggtggaggttcccaaacctcagtttttgatttatgtgcacccgtgggcccaataccacatgtaggtcaccaaagcttggggcttgcactgtctgaaacaacagccagagctatatgttggcaccttttagccatggctaggacgcagggcaccatgtccccagagtgcacaaagcagcaaggccctgggcccaacccctgaaacagttttttcttcctaggcctccaggcctgtggcgagagggcctgctgtgaagacctctgacaggccctggagacatttttcccattgtcttggtgattaacgtttggctcttcattatttatgcaaatttctgcagccagggcttgaatttctcctcagaaaatgggcttttcttttctattgcatcatcaggctgcacattttccaaacttttatgttctgcttcccttttaaacataagtcccaattccaaaccatctattagtgaatgcataaaactgagtgctttttagagcacccaagtcactccctgaatgctttgctacctagaaatttcttccaccccaaatcatctctctcaagttcaaagttgcacagatctctagggcaggggcaaaatgctgccggtctctttgctaaagcataacaagagtcacctttgttccagttccaaataagttcctcatctccatctgagactacctcagcctggacttcattgtccatatcactatcagaattttgttcaaaagcattcaatgagtctctgggaagttccaaactttcccacatcttcctgttttcttctgagccctccatactgttccaacctctgcctgttacccagtttcaaagtcactttcacatttttgggtatctttatagtagcacctcactctctgtggtaccaatttactgtgtcagtccgttttcgtaccactataaagaactgcctgagactgggtaatttataaagaaaaaaggtttaattgactcacagttcagcatggctggggagaactcaggaaacttacagtcgtggtggaaggcaaaggggaaacaaggcaccttcttcgcaaggcagcaggaagaagtgtcaagaaaagtggggaagagccccttataaaaccatcagatctggtgaggactcactcattttcatgagaacaagttgagaacagcctgggggaaccacccccatgattcagttatctccaccaggtctcccttgacacgtggggattatggggattacaagtcaagatgagatttgatggggacacaaagcttaaccatgtcatcccctcaccaaaaaaaagttctattcctgcagaaaaagctatagtcatgccctgcttaatgatggtgatacattctgttaataacaaactcatcattaggtgatttccttgtcatgtgaacatcatagtgtgtgcttacacaaacctagatggtgtagccaactacacacctaggctgtacagtatggcctgttgctcctaggctgcaaacctacagcatgtgactgtactgaatactgcaggcagttgtaacacaatggaaatgtttgtgtatctgaatgaacatagagaaggtatagcaaaaataaagcagtataatcttatggggccactatcatgcgtggtctgttgctgaccaaaacattgctcttcagtatgtgactatactgcttttacgatgagtttctatcaacatctagattcataagtgacttctctattaataaaatttgttcaagaaaatcatggtatatgaataattcagcaaatatttgaattcttgcctgtttatggaattctcgcctatctgtggggtattcattaaccaaatattaattgggaacctaccatgtgccagtctctcggggtaaagcagtaaacgtagcaacatgatccttgctttcatggaacttagagtctaaagaaggacattgtacagtgaaccagatggcaaataagtaccatgagttcagatagtgacaaatagtctggagaagttaaatggggtatgggatggggagtgacagaggtggagggcggtagcctgaggtggccagaaaaaaaaaaatctgagctggaaccagaatgataagtaggagccactgtgaaagctggacagactaactgtgggagctgggtacagtccttggttcccgaatgttggcaggaaaacctactccatagtgctgtgtcccacttgtacttcaatgctgcaccttcccgctggccagttgcctgtctttcttttcaaggcaaggtcttactcagcttcttgtagacttccccagctccaagttaggactgtgccttccccatatttcattcacgtctcctgaaatcttcttgggaagtctgctgttttcttcctttctttttattccactacggagaatttgagttgtaactgttccactggctttatcccattttattcacacatttgcaacaaacttgtccagttcctttttgtttttgtttatttgttttgttccttcttttggagagctgagagaatggatggaggaagagcttatcaaagtcaatgcaggcttgttatggaaaataggaaaagtacagaaacatacttaaaaatagagggaaaaaaatcactcctaattcctctatccagaagtaactttaatagtgttggctttctcagtattttatcaatacttcgttttttctatgcattcacattcttgttttatttttagctacaacattgtatcagaggaattttccatgtcattgaaacactctaatattttaagtggctatagacccttccataattttgatgtgctgctatttatttaactatttccctgatactagatgttaacattttttttccagttgtttgctattataaattaggcagtagtgaacatctttgtgcatgtatctttgtcccaatctctgatcattttccttaggacaaattttccaaagtagacttattgcaaaaaacagcatagactttggtacatgctacaaacttccttccagctccccgttcagtgctccccacattccactgttgtaatgaggcccaattccttaatgtttccttctagattcagagcctaaacagcaccattacccagctggccctccccattcttcctaaccaccacccgaagtgttggggacagtctctttttgctcccctccctaccaggacagtgataccctcccaggagggtctaacactatggaacccttgatatcaaggcctgatcttgtcccttccttagttcttggtgtctggcccactctaagctgtgaaattttcccccatttttgcagctccctgccctggaggaccagctcagcaccctcctagccccggtcatcatctcctccatgacgatgctggagaagctctcggacacctacacctgcttctccacggaaaatggcaacttcctgtatgtccttcacctggtgagtctatagctctggggcccatgttcctcttccctcagcttgatggggagtccacaggcctctcttatttggaactttagactcctttagaaggcagaaacggcatcttatcaaacccgcctgggacccgagcctcccctggcttgtctgcagagaccagggcaggtgaagggagtgcccttggggctggctgacactggcctgcctgtgcctgcagtttggagaatgcctgttcattgccatcaatggtgaccacaccgagagcgagggggacctgcggcggaagctgtatgtgctcaagtacctgtttgaagtgcactttgggctggtgactgtggacggtcatcttatccgaaaggagtgagtcttcaaagctggtcccctctgtcctttgccgagcaccctcgctgggccaggcagcgtgtgcccagcccctgtgaagctgccatttttcacatactgcccccagctgggtccctaggtcagagaaacagctcaagtgaaccttggagaccatctggtctgaccctctgactttatatctggtgaaacagagcagagaatggaactcacttgcctggggtcatctagctggttggtggccacatccaaactggatatttgagctcaggactctcagtccagtgctctttccatcctcccaacatcatcacccgtcattacaaatctggtctgagctagtcctctctggcttctcaagcttcagactctctctccagaaaaacacaaacccatgcacattcatacagtctcgtgaaggttttctcaggagacagaccttaaaacctgtctctgggcccacagtaaagaacttggggaaagagaatcatggttcagagtatacactgaggtgggagggaccccagaaaaggcttgtagttgaaatgtagacctagaaaagagaagttcgtagtatcaccaccccctgattctctaagatggattgggaagctgcggagtgtgaagctctgggactttagttttgtggcgatatgagcaactacccatattgaggcatttctcaaatgcacaaacattgtttcatgagtcattttagcccagataggtcatggtgtcagtggcaaatgctgcaggtggcagatgcctgttacatgaatcacagtggccagtgcagacgttgccagcatccgagatggctgcgaccctgagtagggccctgatgatggaccagatctttctgtgttcagtggcctctgtgtgagaagcttaagcatcaccctggctctctctagctggctttgtatgacatgtgtttgtgtgacagaggctgaggagtgaggtgatttgctcagctgcctgccttccggctccgtgcctatcccaccccactccacagttagagctcggccggaaacctggccccctttcccagctgtgtgggcaggtcatatgggctcaccaagctctgatgctgagctgagactgtggtcctttggttgggtgtgggggagaccagctttcttgtgatctctcccgccctctctggctctgcccccaggctgcggcccccagacctggcgcagcgtgtccagctgtgggagcacttccagagcctgctgtggacctacagccgcctgcgggagcaggagcagtgcttcgccgtggaggtgactactgggcgcgggagtcctcaggacttgaagctgtcaggtcagagggggcgtccacctttaagaccatgttttaaccctaatgaatgaaggcacaagcagcccctgaaactcgtgtattcagagagagttgttctttctggccatatggagggttgggtaccctgatgggctttcccatggtaaaacagctcgatcctggataacacatacttttaatgcaatttttgggttcactgtaaattacaggaatctttgaagacagttccttcaaccctcccctccttttcccacaaaattatattgagctggaactggaggggaaagcagtggagaaaaacacagcgctaaaggcaagattccctgagtgcaaatgataccagcactacagccagtaaatagccttaggccagcagcagcataggagagctgagcctgcaactctaggttaagcccagccccaaaaagttaaagtggctactggtccttttataaagccctagtaaataaaaaactaaaaaattaaaaataaaaactaaagtggctgctggtcagtagcactccttgccttcctaaagaggtaaaccaaattctctttcaagcagtggttttcatactccagtgtgtgtcagaatcctctgtagggcttgttaaatacaggttactgggcctcactttcagcttttctcatttagcgagtctgggatgggggctctagaacttgcatttcttttttttttttttttttgagatggagtctcgctctgttgcccaggctggagtgcagtggagcaatcttggctcactgtgacctctgcttcccgggttcaagcaattctcctgcctcagcctcctgagtagctgggattacaggcacgtgccaccacgcctggctaatttttgtatttttagtagagacggggtttcactatgttggtcaggctggtctcgaactcctgacctcatgatctgcccactcggcctcccaaagtgctgggattacaggcatgagccacagtgcccggccctagaacttccatttctaaaaaattcccaggtgctgtttattgtgcttgtccaggaaccacactttgaaaaccactgctagagcaggaaaggtaaagatcaaacaaacgtgaactcacaactgaagaaaatcagatatggaagaaaataagccaccacgagtgagagtcaggaaaatcaatcaccaacagatttagatcccaaggcacttgatacattggaactattaggtatagaatataaaataactatgaaatatttaaaaatatgaaatgtagaatcacaaaatgagataagaagaaactctaaattgaccaggcaaatttgaaaaagaacacgtacagatattttagaaaagaaaacatagttgttaaaatgaaaaactcaagggatgtgttaaatagcagatgagacatagctagagggagaattaatgagctggaaaatagatctgaaggaattcattctcatacccccactcattcactcttccaataaacatatagtacctattatatgctaagaggtgtgccaggccatgggaataaagagatgaataaagacatattcactgcccttgaggggaaatcagccatgtatatactaaaagatataataaagaatcctggtgccatattaggtttttcatcaaaagctatggtggcacaagagatggagtggtaaactctttctgggacattaggaaagacttcttttaggaggtgacctaatgccattagcataaaatccaaactcttcccaagcctaccaggccctgtgtgatctatcgctgcctatttcactctagcttcatcttatgcctctcttgtccacgcttactgagtgctagtcacatgaaacttctttaagtttcaggaaaactctatatttagatctgtccaatatgatagtcattagctgcatgtggctgttgaacatttgaaatataactagtgcaaattgagttatgctatgcatgtgaaatatataccagattttggtaacttagcacaaaaaagaatgtaaaacattccattaataaggcttttatatcatatggtgataatattttggatatattcagtaaaatgaaatatatcattaaaattaatgtcaactgtttctttttacttttttaatgtggtcactggaaacatttaaattatgcatagggcctttcttttatttctgttggacagcaccattgcaaactctgtccccatctcatggcctctgaatatgcagtctccttgacttgcagtgttctctctctccctctttctctggtgggccatctggttgtttagatattagtttaaaggtgacctaattcagggacatttctttggacaccctacccaaggaggtctctgctatttctctctagcctagtgctgtgtattttgtacttggtgcttacttacaaatggcacttactttatttccttgtgtattgccttgcctcatccactggagtctagtgaccagacagtaagcctcaggaaggctgggacctggtgggtcttagtccccctgtttccaagtatctggtgcagagtccaagctcactgtggacagagtgaatgtccccactagcccagggcttggagtggggcaaggttgttggtgatatggcttcctctcccttcctgccctggctaggccctggagcgactgattcacccccagctctgtgagctgtgcatagaggcgctggagcggcacgtcatccaggctgtcaacaccagccccgagcggggaggcgaggaggccctgcatgccttcctgctcgtgcactccaagctgctggcattctactctaggtgagctcaaggtctggcatgtggtggctaaaggctccctggccttctcactcccctatggcctctgcctgaaaagcaccacctgcccagccaagaatcacctcctccatgaagcctgaaaccttcccagatttgattctccaacctttttcagctcacccatttctctgtatcattccttcctggaacactgtcttagagtctcaatctagaacttccttttatgttgttcttggtccctggtgctttcccactgctaaatcattttcttttctttgttctatacaaccaagttttattttgaaatttgacgagttaattaattgtatttgtgccttgcccatctccagaagtacattgctccttgagggcaggggccaggctccacactcctttaacctgcctgccccgtctcctgctgggcatgtgctgatgggtggccatgctcctgtgtctgcagccacagtgccagctccctgcgcccggccgacctgcttgccctcatcctcctggttcaggacctctaccccagcgagagcacagcagaggacgacattcaggtctcagggcagctttctgggcagagggaggccattagggaggtagttcagaaaacctgcctgaagatggtgggcaggctccccctggggactccatgttttctaagtcacaattctgggtgtgtggttgggcgtgacttctttcccactgctttcagatgtaaggggaattctggagtgcacatggtccagtgggttaaaagtgcagatttttcaagtcagccatggttcgaaacccagcttcaacacctggctgtgtgagctgagcccgtacttgcacccccagagcctcagtgcccttatctgtgcaatgggaataacaaagcatctacttctcaggggtatttggagggacaaaaggggtggttcccacagaacctggcactgcctggggcatagtgaatgcttagtgagtgtcagccaccaccatcgctgttgacctcatcaccaggggtagtggtgggttggataccattgtgttggaatttctcgaatttccacagaacagaccgcctagaatcgaatccctgggaagtctgaggaccacacacccaggactgcacccggaacgggtggaggggtggaggggtggaggcttctctgtgaagcgctgggaggcagaaggggtggagggagccaggtcagataggagctaaccagcctctcccctgccctgcacagccttccccgcggagggcccggagcagccagaacatccccgtgcagcaggcctggagccctcactccacgggcccaactggggggagctctgcagagacggtgtgtgctgtgcacttcgtggagtcaggggcaggaggggatcggcctctgcaggcgaccaggcctttcccatccctcctgggagagcagggacagggttgagccagctgggagagcctctcaacctgagccaccttctccattccaggagacagacagcttctccctccctgaggagtacttcacaccagctccttcccctggcgatcagagctcaggtgaggaccggaggaaagcaggaggaaacaatagctagctgcgagcgacaggcagcccaggacatctgtcttaggctccagtggacccccgtgcctcctaaggcttgagtgcaggtacccgtgttcctagagcacaggacgctgtctgcggctccccatcttccctgccagctccagcctgaactcaaggattgttaagaccactccactgatccctaaagctgttgatgacaagttgattcatttaaaacttctgtacatgcattctcagactcatcttttttgtaattaaaattaaaaattaagttaaatttagtaataatcatctaatttctatacattctaaaatatattcagcatctgtagtttatactttgtttctccaaagtatgtgggtaaacaataaaaaaaaactataaatattcaaaatggttgaggtgtggtggctcacgcctgtaatcccagcactttgggaggccgaggcgggtagatcacctgaggtcaggagtttgagactagcctggccaacatggcgaaaccccatgtctactaaaaatacaaaaattagccaggtctggtggcaggcgcctgtaatcccagctactcgggaggctgaggcaggagaatcgcttgaacccgggaggtggaggttgcagtgagccaagatcatgccactgcactccagcctgggcgacagagcaagactctgtctcaaaaaaaaaaacaaaacaaaactacaaatattcaaaatgttaacaaaaaatggacaaccttgcttagagaagtagataaaccaaaatccagactgttgtggtcactatgaataaacattacatttatttctgaagttcttaggtaaaaaaaaaaaaaaaaaagggtcctgtggtccctccacatcatctgatggaagaaagaaggccagggtttcaggaggagaaacctactggggactaggatttgaaaggaatttattatgtggctgcttttaacccaaccctggcacattggaatcaccaggcagcttcagccagcccaattaagttacagtctgtgggcctgggacccaggtgtgaatacttctaggaaattttcccaggtgagttcagtgtgcctcgggtgcaaaccactgctgtgcacagatttaggttacagcatgctttgccccctggctgcatattgaactcacctggggatctttaacaattattgaagctgagcctgtacccggagatgctgactcagttggtctgagctatgccctgggcgtcaggattttgtaaaagtccccaaatgattttcgtgtgtagccaaggttgacaaccactgggttagatgcttttaactttaggtctggctagaagcctaggaccccctgagactgtgtgtgaactcactgatgcctgtgcattcctggggtgagggttcctagctatcttcagattccctgagctcttgatgagcctgagacctgttgagaagcagagttctgggtaatctccgaagttcctcttaccactcccttcctcattcatcaccatcttcctcccagtccctctctcttgatagtggttttttatgccttaaaactgtaaaaaataatgctgttccaccgtgcagagaactcacaacttacaaatggtttgggttgcactcatccatttgtaaatcaggtgtttaagatgtaggaacacacttcccccaaagaaacatgattataaatgagggttgtttgcaatgaaatataagaggtaacagtattattacagacacataatatttcagatatgtggtgggttcagtaggtttttgtgcgttatattaggaaggaaatccacctcaattcccagcacacagcaggtgctcagtaagagcttgccggttgaataaatgaatgggcaaacgtggactgtgtgtgctgactcctgaggggcgggttgaggcctgaaggaatacaggggacagaacaaggaggggattgggggcaagggaggggggaggaagatgcccctctaccccctgaccaccattaccaaacatgtcctcaggagcttgattctcagcagctggctctgggggcagcttctctgccaggcccaggccgccttagccctggtactgcagagttcaccttgtgcctgccaacttaggatgaaggggtgttgccccagccacattagcacccctgcgtggagctggcagccaagggctgaggttgtggggggcacctgggccccctaccccatgctgttgagccattgcttacatctcatggtacttacatcgttatgttattacctgtggcctgcaggtagcaccatctggctggaggggggcaccccccccatggatgcccttcaggtgagtttctcctgtgcctgcctgggcgccagctgatctgagatgccgcagtgagtattgggggctctgagggtttcgcctccagggtgactctacccgtgccagccctcctcctgcccaccccagggctggtcagtgcaggtgcctgtcctggtgccagagctcagcccagaggcagggtccaggaatgggctgtgaggggtggcgaacttgcccctcccctcccccaggtgctgtccctcagctccattgttcttgggagtgaaagtccaatagaattttttttttaagtgagcatgtatatttattgtagaaaaatcgggaaatacaaaagtaaactataaaaaagggaataaaaattactcttaatcccgtcctcaaaatgagattaacatcttggggtgtttccttctagtctttttttcctatgactttacacacacacacacacacacacacacacacacactacatatgtacacatgtgtatttttaaaatcagatttggatactaacgtgtttcattatacttttttatttaaacatttttccatttcctaagcactcccacagtgtggtttgtaatgattggtagtccatcacatgcatatgttatttatctagcaaatccccaggaaaatcgcgtcatgtgtccagtgtttgctgttaggtatgacactgaagaggaatttttgtggcatctctcatgatttccttaattctataattttttgcactaaaggctttcttgcttagatccctctgtaaggctggagccttgcccatttggtcactttatgcctcagtttccccaatttgagtggctgttgggatgttctgagggtgattgaaatgatacaatgttgaacattagatacctccatctgttgcaaatgtggggaggggacctctccccgtccactccccatccacgagtgtttccctgccttctcggtcctctgtgccaccacccagcccctctgcccctgcccactgccctgcttggcacccgggccagactctgggcagaaaggcccaggagcagctgagggagaggggcaacagcgaaactggagctgcgagggcaggttcagcagagtgcaggaatttaaaaactggagtttcttggagctaaaaatgattatttcttgtggttcacagatagggccgcaatgggtgggtccaacttagggatcccacctctcactgcagctcttcttcctctgtagatagcagaggacaccctccaaacactggttccccactgccctgtgccttccggccccagaaggatcttcctggatgccaacgtgaaggaaagctactgccccctagtgccccacaccatgtactgcctgcccctgtggcagggcatcaacctggtgctcctgaccagggtaggagagcccctcaccctgccctgatgatgcttagggttggcacgtcttccccaggggcagccccgttcacccgcctctcggcccttaccctcagagccccagcgcgcccctggccctggttctgtcccagctgatggatggcttctccatgctggagaagaagctgaaggaagggccggagcccggggcctccctgcgctcccagcccctcgtgggagacctgcgccagaggatggacaagtttgtcaagaatcgaggggcacaggagattcaggtgagacccaagttccagtcctccccacctggggaagaggcagggctggcagcagggtacatccggtccacagcagctgaggggccaatgggcctgggttcctgtccgggctccacctcccccgggcctacgatccttgttttccctattatgaaatgatattgaaaacttagctgctttttggttttcagaatctttttatgtgtgtttggcagaatacgaattataattccccttttttaggtgtggaaactaaggcttagacaagttttaacttggccaagattatgcagctcatgagcagtggagccagagcccggatgcagtgagcaagtgcagtcgggatccgcccgtcacgggcttcctctctgcagcggggctgtgtccccgggctcacagggcaacacagggatgtgcaggtcacggctccaccccacccccagtgagcttagggcccaggtggggagctgagaccaggagacaggtgagaatgtgcaggcagtagaaacagtccatcaccccgtgctctgacaaagcccagatcagggcctggacggcagtggggctggtggggcttgactctggatttaagcagtggaggcgcctggtgtttgaggagctgggacccattgtggctggagtgcctgtcagtctgaaggctgcaggattggctggaggaggcagtgccacatcccgcagtgcctcagggtgtcctaaggagcactttcactagaacaccaagttcttctgctttatagagatcccgtgaggccgccccctgcatggctaccccatgcccaccccataccctcccagcttctgcagcagcacctcctccgcacaccccagccgctgccctgtgtgtgccccccaccccgaggggctggcctggttgctgtgacggtgctactatgtgtgcctgtgcccgtcagacagcgagcccctggaaactgccctttaaataaacgctgctgagtgactagaacatggcacactgaagtctgcagggggctggtggggcctgccagggtagcctgcattggccagaagggcagatttgtctgggggccctgtgccctctcagagcctgatctgagaaggactttggcctggacctcactggaaatatggtcgggatgcaaacctgccccctgtcttccttccagagcacctggctggagtttaaggccaaggctttctccaaaagtgagcccggatcctcctgggagtgagtggtgggcctcaggacaaggggtgggtcgtgtgcccaggggactgttccctgggaggccacatctcctccaccactgcccttcatttatcagcaaaataatttcaagaaaggagatttcttcccacatacgtggagcaccgcgtggagaagctgggaagctccttcccattgcctgatcagctgtggctgcccccttaggtctttccatctgtctgtcctgggtgcaggagcagggtggtccacctgggagtgaggggctccccaggttggtctgtcctgggtacaagagtggggtggtccacaagggggaagggctccccaggtctgtctgtcctgggtgcaggaacaaggtggtccacacagggcgaggggctcccctaggtcccttctgctgtaatgccctcctctctcgtgctcaggctgctccaggcatgtgggaagctgaagcggcagctctgcgccatctaccggctgaactttctgaccacagcccccagcaggggaggcccacacctgccccagcacctgcaggaccaagtgcagaggctcatgcggtaagtgcagtgcggccccctgggtggccagggcagggtctggggcccgtacttccttcacgcagcccgagcttccctcggcagggagaagctgacggactggaaggacttcttgctggtgaagagcaggaggaacatcaccatggtgtcatatcctgacgccggggccccagccagcccaacaagcctcttggatctgctgcctctacacctgctccctggagggactatgggccccagggaagggggatatatgttccaccccatcagctgctcaccacctctctgaaggaaaataatgggacatagtggcccatgtgccttgtctataggaatacttcaagctgaaatttcaggaattcctcctgtcccaaagttaattcacaaaagccataaagaccctttatgtcagtgttgcccagctggcaaaatggtagtaggtattccacgaggggtggggaccggggggggggttcctgtggtctagtttggttgaaagggccgttgtccttcttagatcatgacagtgcacagtggcatgtaaaagctctagaaggcctacggcaaatgtttatccctgtttcagaagccattcctaagactatttgacccttttattatggaacactaattttatcgaatactgattttccatgaaaattcatgtaaagcagcttttcccatatcatctctgaaatgtccagcccccagtctcctgaggcaggtcctcagtgggcaggtgaaaggatgccagagggcctctttagccaccagctgctgcccttctatggatgtctcttcccctcccaaatgggagccttccaaactctcatgatgaagtgtaagggtttagcaagatcacagtgaggtgcataggctgggcagtcagctaggctcactcatgaaccaagtggctgtgctcacactccagcctcacgtgtgtctgacttaaattcatccctcatgaaaatgatgcataccatgttcctgtagggccagaactgcccgtgtcaaatgtgcaagtgttgaggatcttacagcttttcaaggcctggggagcttggaggtagtgggggatctgaggaagcaaggatacagggggcttagctgaaatggaagctgctggaaagaggcagtcctggccctcctgccaccatgactgggcacagctagaagcccaggacagaggcaggccgtccctagctcctggcttgtaagcaccttaactcagaccttcacctacctagaagacttcccaggcttggtgcacttcatctatgtggaccgcaccactgggcagatggtggcgccttccctcaactgcagtcaaaagacctcgtcggagttgggcaaggggccgctggctgcctttgtcaaaactaaggtaaccatttggacccagggcggggatgggtgggcctcagccaatattgggtagcccttcctggtgtgatccacatgcctggggctagcagagtgcgctgggcagcaggcccaaggaggcagtggccagtgccggcataaataaatgctcgacaagtatttgttgaatgagctagaatggagagaacggcaaggtccatcagttgggcatcagaatttaaaacaaggtgatttctgttaaggaagcattccctggaaattcttttattctccttatttaactgactgtttttcatgacaaagttgtatttttgatagggggaggacccctgccactctccaaaaaaactatacgtgtgtgtgtgtgtgtgtgtgtgtgtgtgtgtgtgtctgtgtgtgtgtgttcttttctttctttgttttggtgggggaggcaagtaaagtgtattctaatgtttaaaacaagatgggaagatgggtggtggaggcatgtgttggaagcccagccccgtctcccaccagttatgtggctttgggcagtacttagcccaagggtcagtttcctcatctgtagaaggaaataatagtgctatttacatcacagagttatgaagagtacatgagaggatacgtatcaaatatttagcatagcacgtagcacaaaatacagatacagttcattcagtacttactggtggcatcatcatcaccatcttcatccttgcccctcattctggagacagttggggttatcttggtacgtttctttctgttggttttctgtgcagtttgttgtagttgagatcactctgtatgtgcaactttgctaccatgttttcatttcacattatatcagatgctttccctcatgccattaactctttatagacatgatttttagcagctccataatagtccatcatgtgaatgtaacataatttattgaaccatttccctgatgtttagacatacagattatttctaggcttttgctgttataaataattctgcagtatacaccttgcatacatctgggtccccatctctgattatgtccccaatatggattcctagaaatggaattattaagtcagatgggaggaatgtttttaagattattgatggatgttgtcaaattactttcctgaaaagtacagtcaatccatggcagatttaatgagtaatcacacggcgatgcagtttggagcagatcgcctgtccctcccgttaagggtagaggagagggctcctcgagtctcttcccagccctgagaggtggcagagagcccactgtccctgctgccttccctggggcacttcaccggcagcactggtgacagtccctgcgtcaggcaggaggacattcccaggggagctaaggcacgtggtttctcaggccctgtgtttccatctgaccccttggtgaactctgatttggacttcccccctggctcagcacatcctacagggtcactcacctgtgccatcagttcccagcctgaagggcactaggtgagtgggcgaccccaggcagaggaggggattcaggagaccacaccttgttctcctgtgttcattaatgatgtccctggctattctctggcctgaatgatcatttcactaatttattttttttttaatattattattttttgagacagggtctcactttgtcacccaggctagagtgcagcggcacaagcacagctcactgcagcctcgacctcctgggctcaagcgatcctctcatctcagccccccaaatagctgggactacaggtgtgtgctaccacacccggctaattattttgtatattttgtagagacagggttttgctatgttgcccaggatggtctcgaactcctgagctcaagcaatccacctacctcagcctcccaaagtgctaggattacaggcgtaagccaccacactagcccagttcactaatttatggcatatgtgtatagtaaagttacacaaagcttttttacatatattttgcccccacgctaactggagggtagtccatccatccaataatgatttattgttgagcctcctgctctgagccaaggcagtgcccgggtactaggagaggcccctggcactcacggagcttctcggctgtgccctttccttccttcggaggtgagagctgcccaggcagaccaaggctgggagagtggtgatgcttgctgtcttttccccaggtctggtctctgatccagctggcgcgcagatacctgcagaagggctacaccacgctgctgttccaggagggggatttctactgctcctacttcctgtggttcgagaatgacatggtaggtgaggctgagtccctgggccaggacgggccacacacacttcccgctctgtaactcttggattcctttcttctgaattgttgtctgtctgtctcatcttctcttcttgttgctggtaagcccagcaggttgggagccagagttcagaggtcacattttcacatgggcgtttaactgctttgtgatccctctgcccagctgtctggcaaactcttgccattgtccacgtggcatccaggcacacatgtgagcagaaaggcacatgccccactgtgagaaatgcgactcagaccacacactttgtcgctagtgcttccatgtcgccagcgtcacatgccaagtgtggcacatggtcatccctgtggcataggcccctgaactcaagagcataggcccctgcttgaagcagtgagccaggctgcctgaggagacactggtggtgtggctcggggccctggcctccaggccctgcactgcttcttctgggcctcactgttactgcagagtagggtccagtggggggagcttactatcattgtgtctccatccatacaacggggtcagggatccctgccccagccactgcacagggctgtgaggggtgcagtggctgggactcctctcctcctgtctctccctcctctctgtcttttccctttcttcgctttcctcctgtttctcttttatttgcatctcgcttgtcaccataagtggttgttccagctctcaggagtggttgttccagctctcaggagtgttcctcctccctcgcagcccttggtctctgggtccctgcactcctgtgccttcccctgcccccaccctgcactctttgttcactgagggtgacagccatccctttccatagggcagggcggttactggggctctccaccactgttctctcagttaccccctcacagccctgtaaagtggctggggcagggattcctgaccccgttgtacggatggagacacaatgatccggagatcagacgccatggccagggccaccgaggctgtaagtgaggaagccggagcccaagctctgctcccccggcctgcaggctcccagctttcctccgtgccctcagaagtgcccaggacgtgtgtacaacagaagtgctagaaaattcctgtgacctttaccttcacttctagggagggacaggagtctgtgtgcttgggtggccccgtggggtgataaagtgaggcagagctgtgggctggagaggccaggtttgaatgccagccacacagcccagccggtgccgtgggggcagccctgcacactagggagtccactccccctgcagggcaggccacggtgcccaggcaagcatcagctaagtgccatgttcatgcctggcacacacggcacgtccagcagatcttaattcccttccccaccttatcccaccctgggaattcccaattctttcagagcagaggcttgggccttttgtgaatgctctgctcttcaagacctgtatgacagccctgcagggtgccctcctgagcgtgtgtttgtggcctgtacaggtccaggtattgacggtaatgagagctaccctgccggcccttgaagctttgtatactttttctctaatgttcataaggtgactgttgtcattctgacttcaaagatgaaaaaacaaggtccaggcattttcccaagcacccagcgcacatgacagagccaagccaggccgcaagcccggtgcgtctgactcaggcccttgcactacccccacacccactgcctccctgtcctccctcctcaggggtacaaactccagatgatcgaggtgcccgtcctctccgacgactcagtgcctatcggcatgctgggaggagactactacaggtgacgctgcgttgggagccactggggacagatgcccccatttgggtgataagtgctcgcctctgccgggagcagcttctgcttcagcagtgccctacctcagacccagaaatccacgctgggaacaccttcccggctggccctgtgtgcagcgagggaggacgggtgtggagggtacatctgtgttcctaccaccttcctgctggcatggtcttggcagcacggggaacgtctgtgcccggcccagaacatccccactgctacctcgtagccaggatgccactgttaggtcagtgaggaaccggagcggttgtcaaggcccacatgcaggggcctagtgagatgaccgagggcatgggcatttgcttgcgagggcccagagaggcctctggcgctggaggagtgccacagcctcactcctgaatcccatcctccccttcctccccaggaagctcctgcgctactacagcaagaaccgcccaaccgaggctgtcaggtgctacgagctgctggccctgcacctgtctgtcatccccactgacctgctggtgcagcaggccggccagctggcccggcgcctctgggaggcctcccgtatccccctgctctaggccaaggtggccgcagtctgcctttgcatcctgtcctccagccacccttgcttgccactgttccccatgacgagagcctcctgtctgcagtggccatcctgaggatagggcagagtgcccagggtggccccagggcttctaaaaccccacctagaccaccctccatgtcaggtactgagcaaggccccagatccttctctctggaggaagagggaagcccaggggtcctgtttgtaaaacaacggtggcaacagctcctcttccagagctgcctctgcctttatcctgggagatggggaggaagccccatctctgctgttccctgcgtggaggaagcccacccagcaagctctctcctaccccaggtaaaaggtgctcctttgcctgggtttgaattccagcgctgccacttcctctctgcacctcctggcaagtttcttctattccccacgtttaaagcgatggcacctccgtcccagggtggtgtgaggattacccagtgtggtaggtgctcaataaatgttggtcattgttatcactgaagcccaacatgctagtgcttctagacccttctgtcagtgctgataagcccttgctaagtcccagccccttcatgcttggctggcgtctgccctagggctggggttctcaagcccctggccctggcccagagatttggattcccttggcggccgtggagcccagcctttgatgtctttcaaagcttctgtggtgcgccctggattgagaaccaccacccgaggggtacagcccctctcttccaaccgagaagttcctgtcccagaatggacccagggacaagagaccctgagagccctgggactgggagtgtctgctcctctgaggccaggaggccggtgctgggccagagaggacggcgtggcgaaagtcagcgtccactgcagcacaggatcagatggccgtgtgctgtgcatgcaggagcctcgccttctgtgtctttagtcttgagccaaaatttgctcaaagactgatctcttccttgcagggaacagctttggggctgggggaactagaacccacatgttggtctaaaccctgagaaggtggcagtgaggaagtatcccctcaggtgactggatctgtgttcctccttaacatcatctgatggaatggcaatgaaaagcgtggattgtggaaaatacagaaaaacataaaggaaaaaactccaatcccctgagcccaccactgttcaggacccctgcttttgtcacctactatttccctttagtttttagcagcggctggatgtgatatgtctagtttaaccagtccccttgatctttctatataataaataacacaggagtgaacatcctgaatcaga

SEQ ID NO: 15618 - DNA, 30749 bp, Homo sapiens
ggtcctacccggaagcgcgcccgggctcctgcaggcggggcgctgtgcgcgccgcgatccggtacgtgggcctccgggctgtcccctctgggggcggcgatcctccctccggagccccccttcaaccctcccggaagtgaggtagggtccctaggggtcccggagcgggcccactcctagcctcacccactccgggcgtgtggccgtgggccggtcgcttcctcgctcggggccaaagttcctcagccgtgaagaggggtggatgtcacaagtcaagcctccttcccagggtggccgtgaggttcgggggtggggggaggtggggatttggggtgaaactggacagaaactggcgtgctaggcaaacgggagccccgcggcggcgaactgctgactcgctctctccagagactcaggggcagggccgggctccgaaggtgtgggaccccagaaggagctgctgaagacgggaccaagggccacagggaggtttgctggggtccagatggtgaaagtgggcgctgggggtcgccccaggttggccccccgccatctggagctcctttcgtcagtgagtcccctccgagttccctttctagggcaagatagcgaggtgaagcggaagtctcagtgtgacaccggcgaggttctcttcccagcagcctttgggaagcatccccctgtttcgggaatatggcattcgggccaatcatgtgggtgatggagcccgtctcagggttcggctgctaaaggccgaactcgtaacagcagtctctgtggcgggtagtcacttgcctcttactggctcacagtgcttgacttcctaattaagttttctgttgttcctgccctctattcaaatatgaatgattccggaaccagattgattaatcctgttatttgaagaagggaagctgggaaataggaataatgatccccacacctatgtaagaacgcagtttgctaaggttactttgcagcttgcctggtcactcccatgatctaaccctgtagggaggtagagtaggggatgttgctctgtttctccgcaggagtttgaggctcagagaggtttatgggacttggcaaagccaaaactagaacctggtcccagatgcctttcctgttagtttccttccattcatcgtatcatcccaggatccccactcccttcaccgggactgcatcctcaccacctgggatgtgctatgctgtctcccgtcagtcactcctagcaagctccctggggctgcttggggagctctgagtgacccgcagaagtgagagcacttcatgggaacaaaggaggaaggaacaaaagtgggcacctgctctgtgcaaagggctgtgctggccgggttcctattctccattatgggaggtgaggggcaggatcccagatatgttcttagcagactgcctcagggcctggagagaccagggaccacgcagcccttctccagcttgtcctttctcaacgggcagcagtcaagaccagggcatctgcctgccctcatattctctctgttttaagcatttgcaggaccagggatgctgtgctgctctcccatgagccagtcaccgagtcggtctgctgcagccctttctgaacctctggccgtctggatgctccactgtgcttgccaaggtagatgatcttgccccacctggggaggacagggaggcaggcagcatccaccctggggctttgggaggcagatggaatgaggtaggcagtggactgagtgctactgggctctgcacacctgctcatcccctccccagccctgcatcctgaggccacccccatcctgatgcctcatctctccttcacccctcgaatccaggcaggtcatcacagcctgctgcatctttaaagctcctcccagcccccaccaaggggtgagcactcattacctgacacccgcacctagatgaccgccttcatgaccttgacctgcccatctccagccagccggtcacttctccgctcacaaccacagcctccattccatagcccactgctccctaacccatacactctggtcagctttgtcacatgtacctgggagtcccagagcagcctcttcaggtccacccgcctctcccagcaacctccttttcacacctgttgcactctcagtgtctgccttggcattgagtaattctgtgggaataggctgcattccttcttcactgtgctgttatgtctcctggcatttgccataaataccttgggaccagttgcaccaagttagtttgggaggaattcagtaaggaccactaagctggacatggggatgacggaacacaagacctggagatgctgtgatcctcccaagaaaactggaaatccacttgtgtgagagttacagcagagcttcctaatcattgtcatggcttagcgcacataccacatgattatatctgcgtgacaccctgaggcacataagaggatttgaaaccactgcctgaggcctcttagctgcagcagccagcctggagcactgtcctcaccagcctggtcaggctgccccaagttttagaagatcgagggtttgccgcacgcagagggccatggcacacagtgtgggaagctgtattaaagatcttccagtgggtgaatagttaagacatttcttacataatcaagcacagagtgtgtggtgtgtgtgtgtgtggcgggggggtggggaaggagatttgggagggctgaagacactggtggctgtggccctagaagctgcagcctactaggtacaggggctttaggcagcctctgttctcaccatgaacagggagagcagcatttgaatgaaacttctgtggtgctgaagtaaattcaggggctttgaggctcatcttctggagctgttttttgtttgtttgtttgtttgtttgtttgttttttcagacagagtctcgctctgtcacccaggctggagtgcagtggtgtaatctcggctcactgcaacctctgcctcccgggttcaagcaattctcctgcctcagcagttatcccgagtagctgggataacaggcacttgccaccatgcctggctaatttttgtatttttagtagagacggggtttcaccatgttggccaggctggtctcgaactcctgacttcaggtgatccaccccccttggcctcccaaagtgctgggattacaggcgtgagccaccgcgcccagccctggaactgtttttatctgagggagagatatctctggactgcccagagatggaggtgcaccagtgccctccgatccacaccaggcactaactggctgccgtgagcatggcctccctgggcattcggctccatgtctaggccaagacctgggtcccttcctgtgccagtctggttccagtaggccccgtggtgggtctgttgctgtgctgagagggaccagataccacagaggaaagggccccagccttggcatcaaacaggtctgggtccagatcccagctttgccacttcaggctgtgcctgtgtcctgctctctaaaatgggggtacctgaagagttctactttgtccagttgtgagggtgcaacaaaaatggaagtcccttgtgatgcctggtgtgcagaaggggctcactgaatgtttgctgaggttggggtcctcttcgttactcagactgagctcatagatgttggggctggaggctgaccttgaccttgcctttccctggcagatgaagtgcgtcttggtggccactgagggcgcagaggtcctcttctactggacagatcaggagtttgaagagagtctccggctgaagttcgggcagtcagagaatgaggaagaagaggtgagtgcagggtaggcagtcccaggaggggtggataggaaggaaccatacaaaactcccagcaggcagagaggcaggaaaacctgtgttcaccctgtcctgggcagcatgagcagggtgctgggtggggtccagcatccttcacacctagacccttatcctcaaggttggcctcttgatgctctgagctcggtgaccccacccccacaccccaccagtcctctctggactaaatgagggcaagaagaagtcgaattttatcacgtaacagaagaacttggagccatcagtttctgtaacctaaaaagtttaacaaggctgggcgcggtggctcacgcctgtaatcacaacactttgggaagccaaggtgggccagttgcttgagctcagggatttgagaccagcctgggcagcatggcgaaaccctgtctctacaaaaaaaatacaaaaattagccaggtgtggtggtgcgtgcctatagtcccagctacttgggaggttgaggtgggaggatcacttgagtccaggtggtagaggctgcagtgagccgagactgtgcccatgcattccaacctgggcgacagagcaaaaaaaaaaaaaaaaagtttaacgtaagctgaacacgttaattttttaatagctgtattaaggtatgattaacataccataaattgcacatatttaaagtgcataatttgataagctttgatatgtatatacctatgattctatcacaatcaataaaaggaatatatctaccacctcaaacatttgtaatcccttctttcccatccccatcgcataggaactgctgatctgctttctgtcatgatagattagtttgtatcatatggccttatataaatggagtcatacagtatgtgcttggatttagtttggttttggtttgactgctttcactcagcataattattttgtgattcatctgtgttgtggcatgtatcaatcgttcattccttgtcattgagtagtaatctattgtatcaggatgccaccatttgttcattcatttacttgttgatggacatctgtgttattttcagtttttgactattacaaataaagcaactatgaacatgcacgtacaagtctatgtatacatggatgctttcatgtccaaggacagatacttaggatagactggctaggtcatgtaggtgtatgtgtaactttttaataaactgccaaacttttccaaagtggttgtgtaatttttgattccacctgtagtgtttgagagttcagttcctccatatcctcaccaacactatagtccgtctttttaattttagccattctaatagatgttcactagaatctcactgtgttttaaatttcatttccttaatgactaatgcttttgagcatcttttcatgtgcttatttgccatatcttttgcccagtttttatttgagttgattgtttcttcttcttattcttactgagttttgagagcttctaatatattttggatggaatcctttatcagatacatgttttacaaatattttctttcagtttgtggcttgtgtttgtattctcaatggtatctttcaaagagcagaagtattagaactcgagtttatccattttgcatttatggattatgcttttagtgttatatctaagaaatctttgcccaacttacaaagagttttctctacatattcttttgaaagttttatagttttaggttttatatcaggtctgatgatctactttgaatttttgtgtgtggtatgagctatggattgaagataattttttttttgcatgtggacatccagttcaacagtttaacattacaactcagaaatacttgtcattttcacttacataatttccactctacattttaaaggagtaatttattttgaaaatgttttccagattaattttgggttaaaaatatttttactggggatgcagtggaaggtgttcttacatttctgcagcatgggctgattgcctctctgtccctttctgctctaaggggtctcatcatccagccaatgagtgagctgactccacctcagggagtccatttaccatcaacatcactcgtgttctcatcacagtctttaggcaaacacaagatatcagagatcatagacattcaagtggttttatttaagctaactgttaggcttttttattttttaacagtcaatacatataatatttaaattaagaatttttaaatatttcagtttttaaactactgttacaactatgtcaacttaagaagcaaactatttggtggcctttctcttcctctttattgaaaacctggcaaaggaacgaactcctgaattttcagttcctaaaaatgagtagtgtaaaggaaaggtggtctttaaagttttttttttttgttaatgtgcaacacattcttttctcatcatataaataatgagttaattgtaggaaatttggaaatacaaagagatagtttttaaatgacctataattccatgacccagagctattagctttttaatatactttctttgggtctttattttttctatataattgggattataccacatttacagttttactgcctgtttttttttccacttgccattatatcaagatatttcttctatttttttaaatagtctcagaagcataattcttaatggaaacattgtactccagtacatgaatcagtgtatcatcctttatttaaccattttcctcatatggacataaatattgctcctaatttgctatatcactcttgctttaagaaacatttgtgcttaaattttatctcatgtcagataaattcctaggataaatttaggataaattcctaaaaataaaaatgttgagtcaaaagccattcaaagatattgtactactttataattccgccaagtaatatatgagtatgctcctttatatacaccaaatatttttatctcccctgtattagtccattttcttaccactataaagaaatgcccaagactgggtactctgtaaaggaaagaagtttaattgactcacagttcagaaggctgtggaggcctcaggaaacttacaatcatgtcaaaaggcaaaggggaagcaagacaccttcttcacaaggcagcaggaaggagaagtgctgagtgaaggggaaagagcctcttataaaaccattagatctcatgagaactcactgtcacaagaacagcatgggggaaactgctcccatgattcaattacctccacctggtttctccgttgacatatgaggattgtggggattatggggattacaattcaagatgagatttggatggggacacaaagcctaatcatatcattctgccccaggaccctcccaaatctcatgtcccttttacatttcaaaaccaatcatgccttcccaacagttccccaaagtcataattcattccagcattaaccaaaaagtccaagactgaagtctcacctgagacaaggcaagtcccttccacctatgaccctgtaaaataaaaaacaagttacttccaagacacaatgggggtataggcattgggtaaatgttcccattccaaatgggagaaattggaactatggggctacaggacccatgcaagtccaaaatccagtggggcagtcaaatcttaaagctttgaaatgatctcctttgactctatccacgtccaggtcacactgatacaagaggtgggctcccaaggccttgggcagccctacccctgtgcttctgcagggcacagtcctcttcccagctgttttcacaggctggtgttgagtgtctgcggcttttccaggtgcatggtgcaagctgtcggtggatctaccattctgggggctagaggatgatggccctattcttacagctccactaggcaatgccccagtggggactctgtgtggaggtgtctgaccccacattcccttaatcactctagcagaggttctccatgagggctctgcccctgtagcaaatttctgcctggacatcctgccatttccatacatcctctgaaatctaggtggaggttcccaaacctcagtttttgatttatgtgcacccgtgggcccaataccacatgtaggtcaccaaagcttggggcttgcactgtctgaaacaacagccagagctatatgttggcaccttttagccatggctaggacgcagggcaccatgtccccagagtgcacaaagcagcaaggccctgggcccaacccctgaaacagttttttcttcctaggcctccaggcctgtggcgagagggcctgctgtgaagacctctgacaggccctggagacatttttcccattgtcttggtgattaacgtttggctcttcattatttatgcaaatttctgcagccagggcttgaatttctcctcagaaaatgggcttttcttttctattgcatcatcaggctgcacattttccaaacttttatgttctgcttcccttttaaacataagtcccaattccaaaccatctattagtgaatgcataaaactgagtgctttttagagcacccaagtcactccctgaatgctttgctacctagaaatttcttccaccccaaatcatctctctcaagttcaaagttgcacagatctctagggcaggggcaaaatgctgccggtctctttgctaaagcataacaagagtcacctttgttccagttccaaataagttcctcatctccatctgagactacctcagcctggacttcattgtccatatcactatcagaattttgttcaaaagcattcaatgagtctctgggaagttccaaactttcccacatcttcctgttttcttctgagccctccatactgttccaacctctgcctgttacccagtttcaaagtcactttcacatttttgggtatctttatagtagcacctcactctctgtggtaccaatttactgtgtcagtccgttttcgtaccactataaagaactgcctgagactgggtaatttataaagaaaaaaggtttaattgactcacagttcagcatggctggggagaactcaggaaacttacagtcgtggtggaaggcaaaggggaaacaaggcaccttcttcgcaaggcagcaggaagaagtgtcaagaaaagtggggaagagccccttataaaaccatcagatctggtgaggactcactcattttcatgagaacaagttgagaacagcctgggggaaccacccccatgattcagttatctccaccaggtctcccttgacacgtggggattatggggattacaagtcaagatgagatttgatggggacacaaagcttaaccatgtcatcccctcaccaaaaaaaagttctattcctgcagaaaaagctatagtcatgccctgcttaatgatggtgatacattctgttaataacaaactcatcattaggtgatttccttgtcatgtgaacatcatagtgtgtgcttacacaaacctagatggtgtagccaactacacacctaggctgtacagtatggcctgttgctcctaggctgcaaacctacagcatgtgactgtactgaatactgcaggcagttgtaacacaatggaaatgtttgtgtatctgaatgaacatagagaaggtatagcaaaaataaagcagtataatcttatggggccactatcatgcgtggtctgttgctgaccaaaacattgctcttcagtatgtgactatactgcttttacgatgagtttctatcaacatctagattcataagtgacttctctattaataaaatttgttcaagaaaatcatggtatatgaataattcagcaaatatttgaattcttgcctgtttatggaattctcgcctatctgtggggtattcattaaccaaatattaattgggaacctaccatgtgccagtctctcggggtaaagcagtaaacgtagcaacatgatccttgctttcatggaacttagagtctaaagaaggacattgtacagtgaaccagatggcaaataagtaccatgagttcagatagtgacaaatagtctggagaagttaaatggggtatgggatggggagtgacagaggtggagggcggtagcctgaggtggccagaaaaaaaaaaatctgagctggaaccagaatgataagtaggagccactgtgaaagctggacagactaactgtgggagctgggtacagtccttggttcccgaatgttggcaggaaaacctactccatagtgctgtgtcccacttgtacttcaatgctgcaccttcccgctggccagttgcctgtctttcttttcaaggcaaggtcttactcagcttcttgtagacttccccagctccaagttaggactgtgccttccccatatttcattcacgtctcctgaaatcttcttgggaagtctgctgttttcttcctttctttttattccactacggagaatttgagttgtaactgttccactggctttatcccattttattcacacatttgcaacaaacttgtccagttcctttttgtttttgtttatttgttttgttccttcttttggagagctgagagaatggatggaggaagagcttatcaaagtcaatgcaggcttgttatggaaaataggaaaagtacagaaacatacttaaaaatagagggaaaaaaatcactcctaattcctctatccagaagtaactttaatagtgttggctttctcagtattttatcaatacttcgttttttctatgcattcacattcttgttttatttttagctacaacattgtatcagaggaattttccatgtcattgaaacactctaatattttaagtggctatagacccttccataattttgatgtgctgctatttatttaactatttccctgatactagatgttaacattttttttccagttgtttgctattataaattaggcagtagtgaacatctttgtgcatgtatctttgtcccaatctctgatcattttccttaggacaaattttccaaagtagacttattgcaaaaaacagcatagactttggtacatgctacaaacttccttccagctccccgttcagtgctccccacattccactgttgtaatgaggcccaattccttaatgtttccttctagattcagagcctaaacagcaccattacccagctggccctccccattcttcctaaccaccacccgaagtgttggggacagtctctttttgctcccctccctaccaggacagtgataccctcccaggagggtctaacactatggaacccttgatatcaaggcctgatcttgtcccttccttagttcttggtgtctggcccactctaagctgtgaaattttcccccatttttgcagctccctgccctggaggaccagctcagcaccctcctagccccggtcatcatctcctccatgacgatgctggagaagctctcggacacctacacctgcttctccacggaaaatggcaacttcctgtatgtccttcacctggtgagtctatagctctggggcccatgttcctcttccctcagcttgatggggagtccacaggcctctcttatttggaactttagactcctttagaaggcagaaacggcatcttatcaaacccgcctgggacccgagcctcccctggcttgtctgcagagaccagggcaggtgaagggagtgcccttggggctggctgacactggcctgcctgtgcctgcagtttggagaatgcctgttcattgccatcaatggtgaccacaccgagagcgagggggacctgcggcggaagctgtatgtgctcaagtacctgtttgaagtgcactttgggctggtgactgtggacggtcatcttatccgaaaggagtgagtcttcaaagctggtcccctctgtcctttgccgagcaccctcgctgggccaggcagcgtgtgcccagcccctgtgaagctgccatttttcacatactgcccccagctgggtccctaggtcagagaaacagctcaagtgaaccttggagaccatctggtctgaccctctgactttatatctggtgaaacagagcagagaatggaactcacttgcctggggtcatctagctggttggtggccacatccaaactggatatttgagctcaggactctcagtccagtgctctttccatcctcccaacatcatcacccgtcattacaaatctggtctgagctagtcctctctggcttctcaagcttcagactctctctccagaaaaacacaaacccatgcacattcatacagtctcgtgaaggttttctcaggagacagaccttaaaacctgtctctgggcccacagtaaagaacttggggaaagagaatcatggttcagagtatacactgaggtgggagggaccccagaaaaggcttgtagttgaaatgtagacctagaaaagagaagttcgtagtatcaccaccccctgattctctaagatggattgggaagctgcggagtgtgaagctctgggactttagttttgtggcgatatgagcaactacccatattgaggcatttctcaaatgcacaaacattgtttcatgagtcattttagcccagataggtcatggtgtcagtggcaaatgctgcaggtggcagatgcctgttacatgaatcacagtggccagtgcagacgttgccagcatccgagatggctgcgaccctgagtagggccctgatgatggaccagatctttctgtgttcagtggcctctgtgtgagaagcttaagcatcaccctggctctctctagctggctttgtatgacatgtgtttgtgtgacagaggctgaggagtgaggtgatttgctcagctgcctgccttccggctccgtgcctatcccaccccactccacagttagagctcggccggaaacctggccccctttcccagctgtgtgggcaggtcatatgggctcaccaagctctgatgctgagctgagactgtggtcctttggttgggtgtgggggagaccagctttcttgtgatctctcccgccctctctggctctgcccccaggctgcggcccccagacctggcgcagcgtgtccagctgtgggagcacttccagagcctgctgtggacctacagccgcctgcgggagcaggagcagtgcttcgccgtggaggtgactactgggcgcgggagtcctcaggacttgaagctgtcaggtcagagggggcgtccacctttaagaccatgttttaaccctaatgaatgaaggcacaagcagcccctgaaactcgtgtattcagagagagttgttctttctggccatatggagggttgggtaccctgatgggctttcccatggtaaaacagctcgatcctggataacacatacttttaatgcaatttttgggttcactgtaaattacaggaatctttgaagacagttccttcaaccctcccctccttttcccacaaaattatattgagctggaactggaggggaaagcagtggagaaaaacacagcgctaaaggcaagattccctgagtgcaaatgataccagcactacagccagtaaatagccttaggccagcagcagcataggagagctgagcctgcaactctaggttaagcccagccccaaaaagttaaagtggctactggtccttttataaagccctagtaaataaaaaactaaaaaattaaaaataaaaactaaagtggctgctggtcagtagcactccttgccttcctaaagaggtaaaccaaattctctttcaagcagtggttttcatactccagtgtgtgtcagaatcctctgtagggcttgttaaatacaggttactgggcctcactttcagcttttctcatttagcgagtctgggatgggggctctagaacttgcatttcttttttttttttttttttgagatggagtctcgctctgttgcccaggctggagtgcagtggagcaatcttggctcactgtgacctctgcttcccgggttcaagcaattctcctgcctcagcctcctgagtagctgggattacaggcacgtgccaccacgcctggctaatttttgtatttttagtagagacggggtttcactatgttggtcaggctggtctcgaactcctgacctcatgatctgcccactcggcctcccaaagtgctgggattacaggcatgagccacagtgcccggccctagaacttccatttctaaaaaattcccaggtgctgtttattgtgcttgtccaggaaccacactttgaaaaccactgctagagcaggaaaggtaaagatcaaacaaacgtgaactcacaactgaagaaaatcagatatggaagaaaataagccaccacgagtgagagtcaggaaaatcaatcaccaacagatttagatcccaaggcacttgatacattggaactattaggtatagaatataaaataactatgaaatatttaaaaatatgaaatgtagaatcacaaaatgagataagaagaaactctaaattgaccaggcaaatttgaaaaagaacacgtacagatattttagaaaagaaaacatagttgttaaaatgaaaaactcaagggatgtgttaaatagcagatgagacatagctagagggagaattaatgagctggaaaatagatctgaaggaattcattctcatacccccactcattcactcttccaataaacatatagtacctattatatgctaagaggtgtgccaggccatgggaataaagagatgaataaagacatattcactgcccttgaggggaaatcagccatgtatatactaaaagatataataaagaatcctggtgccatattaggtttttcatcaaaagctatggtggcacaagagatggagtggtaaactctttctgggacattaggaaagacttcttttaggaggtgacctaatgccattagcataaaatccaaactcttcccaagcctaccaggccctgtgtgatctatcgctgcctatttcactctagcttcatcttatgcctctcttgtccacgcttactgagtgctagtcacatgaaacttctttaagtttcaggaaaactctatatttagatctgtccaatatgatagtcattagctgcatgtggctgttgaacatttgaaatataactagtgcaaattgagttatgctatgcatgtgaaatatataccagattttggtaacttagcacaaaaaagaatgtaaaacattccattaataaggcttttatatcatatggtgataatattttggatatattcagtaaaatgaaatatatcattaaaattaatgtcaactgtttctttttacttttttaatgtggtcactggaaacatttaaattatgcatagggcctttcttttatttctgttggacagcaccattgcaaactctgtccccatctcatggcctctgaatatgcagtctccttgacttgcagtgttctctctctccctctttctctggtgggccatctggttgtttagatattagtttaaaggtgacctaattcagggacatttctttggacaccctacccaaggaggtctctgctatttctctctagcctagtgctgtgtattttgtacttggtgcttacttacaaatggcacttactttatttccttgtgtattgccttgcctcatccactggagtctagtgaccagacagtaagcctcaggaaggctgggacctggtgggtcttagtccccctgtttccaagtatctggtgcagagtccaagctcactgtggacagagtgaatgtccccactagcccagggcttggagtggggcaaggttgttggtgatatggcttcctctcccttcctgccctggctaggccctggagcgactgattcacccccagctctgtgagctgtgcatagaggcgctggagcggcacgtcatccaggctgtcaacaccagccccgagcggggaggcgaggaggccctgcatgccttcctgctcgtgcactccaagctgctggcattctactctaggtgagctcaaggtctggcatgtggtggctaaaggctccctggccttctcactcccctatggcctctgcctgaaaagcaccacctgcccagccaagaatcacctcctccatgaagcctgaaaccttcccagatttgattctccaacctttttcagctcacccatttctctgtatcattccttcctggaacactgtcttagagtctcaatctagaacttccttttatgttgttcttggtccctggtgctttcccactgctaaatcattttcttttctttgttctatacaaccaagttttattttgaaatttgacgagttaattaattgtatttgtgccttgcccatctccagaagtacattgctccttgagggcaggggccaggctccacactcctttaacctgcctgccccgtctcctgctgggcatgtgctgatgggtggccatgctcctgtgtctgcagccacagtgccagctccctgcgcccggccgacctgcttgccctcatcctcctggttcaggacctctaccccagcgagagcacagcagaggacgacattcaggtctcagggcagctttctgggcagagggaggccattagggaggtagttcagaaaacctgcctgaagatggtgggcaggctccccctggggactccatgttttctaagtcacaattctgggtgtgtggttgggcgtgacttctttcccactgctttcagatgtaaggggaattctggagtgcacatggtccagtgggttaaaagtgcagatttttcaagtcagccatggttcgaaacccagcttcaacacctggctgtgtgagctgagcccgtacttgcacccccagagcctcagtgcccttatctgtgcaatgggaataacaaagcatctacttctcaggggtatttggagggacaaaaggggtggttcccacagaacctggcactgcctggggcatagtgaatgcttagtgagtgtcagccaccaccatcgctgttgacctcatcaccaggggtagtggtgggttggataccattgtgttggaatttctcgaatttccacagaacagaccgcctagaatcgaatccctgggaagtctgaggaccacacacccaggactgcacccggaacgggtggaggggtggaggggtggaggcttctctgtgaagcgctgggaggcagaaggggtggagggagccaggtcagataggagctaaccagcctctcccctgccctgcacagccttccccgcggagggcccggagcagccagaacatccccgtgcagcaggcctggagccctcactccacgggcccaactggggggagctctgcagagacggtgtgtgctgtgcacttcgtggagtcaggggcaggaggggatcggcctctgcaggcgaccaggcctttcccatccctcctgggagagcagggacagggttgagccagctgggagagcctctcaacctgagccaccttctccattccaggagacagacagcttctccctccctgaggagtacttcacaccagctccttcccctggcgatcagagctcaggtgaggaccggaggaaagcaggaggaaacaatagctagctgcgagcgacaggcagcccaggacatctgtcttaggctccagtggacccccgtgcctcctaaggcttgagtgcaggtacccgtgttcctagagcacaggacgctgtctgcggctccccatcttccctgccagctccagcctgaactcaaggattgttaagaccactccactgatccctaaagctgttgatgacaagttgattcatttaaaacttctgtacatgcattctcagactcatcttttttgtaattaaaattaaaaattaagttaaatttagtaataatcatctaatttctatacattctaaaatatattcagcatctgtagtttatactttgtttctccaaagtatgtgggtaaacaataaaaaaaaactataaatattcaaaatggttgaggtgtggtggctcacgcctgtaatcccagcactttgggaggccgaggcgggtagatcacctgaggtcaggagtttgagactagcctggccaacatggcgaaaccccatgtctactaaaaatacaaaaattagccaggtctggtggcaggcgcctgtaatcccagctactcgggaggctgaggcaggagaatcgcttgaacccgggaggtggaggttgcagtgagccaagatcatgccactgcactccagcctgggcgacagagcaagactctgtctcaaaaaaaaaaacaaaacaaaactacaaatattcaaaatgttaacaaaaaatggacaaccttgcttagagaagtagataaaccaaaatccagactgttgtggtcactatgaataaacattacatttatttctgaagttcttaggtaaaaaaaaaaaaaaaaaagggtcctgtggtccctccacatcatctgatggaagaaagaaggccagggtttcaggaggagaaacctactggggactaggatttgaaaggaatttattatgtggctgcttttaacccaaccctggcacattggaatcaccaggcagcttcagccagcccaattaagttacagtctgtgggcctgggacccaggtgtgaatacttctaggaaattttcccaggtgagttcagtgtgcctcgggtgcaaaccactgctgtgcacagatttaggttacagcatgctttgccccctggctgcatattgaactcacctggggatctttaacaattattgaagctgagcctgtacccggagatgctgactcagttggtctgagctatgccctgggcgtcaggattttgtaaaagtccccaaatgattttcgtgtgtagccaaggttgacaaccactgggttagatgcttttaactttaggtctggctagaagcctaggaccccctgagactgtgtgtgaactcactgatgcctgtgcattcctggggtgagggttcctagctatcttcagattccctgagctcttgatgagcctgagacctgttgagaagcagagttctgggtaatctccgaagttcctcttaccactcccttcctcattcatcaccatcttcctcccagtccctctctcttgatagtggttttttatgccttaaaactgtaaaaaataatgctgttccaccgtgcagagaactcacaacttacaaatggtttgggttgcactcatccatttgtaaatcaggtgtttaagatgtaggaacacacttcccccaaagaaacatgattataaatgagggttgtttgcaatgaaatataagaggtaacagtattattacagacacataatatttcagatatgtggtgggttcagtaggtttttgtgcgttatattaggaaggaaatccacctcaattcccagcacacagcaggtgctcagtaagagcttgccggttgaataaatgaatgggcaaacgtggactgtgtgtgctgactcctgaggggcgggttgaggcctgaaggaatacaggggacagaacaaggaggggattgggggcaagggaggggggaggaagatgcccctctaccccctgaccaccattaccaaacatgtcctcaggagcttgattctcagcagctggctctgggggcagcttctctgccaggcccaggccgccttagccctggtactgcagagttcaccttgtgcctgccaacttaggatgaaggggtgttgccccagccacattagcacccctgcgtggagctggcagccaagggctgaggttgtggggggcacctgggccccctaccccatgctgttgagccattgcttacatctcatggtacttacatcgttatgttattacctgtggcctgcaggtagcaccatctggctggaggggggcaccccccccatggatgcccttcaggtgagtttctcctgtgcctgcctgggcgccagctgatctgagatgccgcagtgagtattgggggctctgagggtttcgcctccagggtgactctacccgtgccagccctcctcctgcccaccccagggctggtcagtgcaggtgcctgtcctggtgccagagctcagcccagaggcagggtccaggaatgggctgtgaggggtggcgaacttgcccctcccctcccccaggtgctgtccctcagctccattgttcttgggagtgaaagtccaatagaattttttttttaagtgagcatgtatatttattgtagaaaaatcgggaaatacaaaagtaaactataaaaaagggaataaaaattactcttaatcccgtcctcaaaatgagattaacatcttggggtgtttccttctagtctttttttcctatgactttacacacacacacacacacacacacacacacacactacatatgtacacatgtgtatttttaaaatcagatttggatactaacgtgtttcattatacttttttatttaaacatttttccatttcctaagcactcccacagtgtggtttgtaatgattggtagtccatcacatgcatatgttatttatctagcaaatccccaggaaaatcgcgtcatgtgtccagtgtttgctgttaggtatgacactgaagaggaatttttgtggcatctctcatgatttccttaattctataattttttgcactaaaggctttcttgcttagatccctctgtaaggctggagccttgcccatttggtcactttatgcctcagtttccccaatttgagtggctgttgggatgttctgagggtgattgaaatgatacaatgttgaacattagatacctccatctgttgcaaatgtggggaggggacctctccccgtccactccccatccacgagtgtttccctgccttctcggtcctctgtgccaccacccagcccctctgcccctgcccactgccctgcttggcacccgggccagactctgggcagaaaggcccaggagcagctgagggagaggggcaacagcgaaactggagctgcgagggcaggttcagcagagtgcaggaatttaaaaactggagtttcttggagctaaaaatgattatttcttgtggttcacagatagggccgcaatgggtgggtccaacttagggatcccacctctcactgcagctcttcttcctctgtagatagcagaggacaccctccaaacactggttccccactgccctgtgccttccggccccagaaggatcttcctggatgccaacgtgaaggaaagctactgccccctagtgccccacaccatgtactgcctgcccctgtggcagggcatcaacctggtgctcctgaccagggtaggagagcccctcaccctgccctgatgatgcttagggttggcacgtcttccccaggggcagccccgttcacccgcctctcggcccttaccctcagagccccagcgcgcccctggccctggttctgtcccagctgatggatggcttctccatgctggagaagaagctgaaggaagggccggagcccggggcctccctgcgctcccagcccctcgtgggagacctgcgccagaggatggacaagtttgtcaagaatcgaggggcacaggagattcaggtgagacccaagttccagtcctccccacctggggaagaggcagggctggcagcagggtacatccggtccacagcagctgaggggccaatgggcctgggttcctgtccgggctccacctcccccgggcctacgatccttgttttccctattatgaaatgatattgaaaacttagctgctttttggttttcagaatctttttatgtgtgtttggcagaatacgaattataattccccttttttaggtgtggaaactaaggcttagacaagttttaacttggccaagattatgcagctcatgagcagtggagccagagcccggatgcagtgagcaagtgcagtcgggatccgcccgtcacgggcttcctctctgcagcggggctgtgtccccgggctcacagggcaacacagggatgtgcaggtcacggctccaccccacccccagtgagcttagggcccaggtggggagctgagaccaggagacaggtgagaatgtgcaggcagtagaaacagtccatcaccccgtgctctgacaaagcccagatcagggcctggacggcagtggggctggtggggcttgactctggatttaagcagtggaggcgcctggtgtttgaggagctgggacccattgtggctggagtgcctgtcagtctgaaggctgcaggattggctggaggaggcagtgccacatcccgcagtgcctcagggtgtcctaaggagcactttcactagaacaccaagttcttctgctttatagagatcccgtgaggccgccccctgcatggctaccccatgcccaccccataccctcccagcttctgcagcagcacctcctccgcacaccccagccgctgccctgtgtgtgccccccaccccgaggggctggcctggttgctgtgacggtgctactatgtgtgcctgtgcccgtcagacagcgagcccctggaaactgccctttaaataaacgctgctgagtgactagaacatggcacactgaagtctgcagggggctggtggggcctgccagggtagcctgcattggccagaagggcagatttgtctgggggccctgtgccctctcagagcctgatctgagaaggactttggcctggacctcactggaaatatggtcgggatgcaaacctgccccctgtcttccttccagagcacctggctggagtttaaggccaaggctttctccaaaagtgagcccggatcctcctgggagtgagtggtgggcctcaggacaaggggtgggtcgtgtgcccaggggactgttccctgggaggccacatctcctccaccactgcccttcatttatcagcaaaataatttcaagaaaggagatttcttcccacatacgtggagcaccgcgtggagaagctgggaagctccttcccattgcctgatcagctgtggctgcccccttaggtctttccatctgtctgtcctgggtgcaggagcagggtggtccacctgggagtgaggggctccccaggttggtctgtcctgggtacaagagtggggtggtccacaagggggaagggctccccaggtctgtctgtcctgggtgcaggaacaaggtggtccacacagggcgaggggctcccctaggtcccttctgctgtaatgccctcctctctcgtgctcaggctgctccaggcatgtgggaagctgaagcggcagctctgcgccatctaccggctgaactttctgaccacagcccccagcaggggaggcccacacctgccccagcacctgcaggaccaagtgcagaggctcatgcggtaagtgcagtgcggccccctgggtggccagggcagggtctggggcccgtacttccttcacgcagcccgagcttccctcggcagggagaagctgacggactggaaggacttcttgctggtgaagagcaggaggaacatcaccatggtgtcatatcctgacgccggggccccagccagcccaacaagcctcttggatctgctgcctctacacctgctccctggagggactatgggccccagggaagggggatatatgttccaccccatcagctgctcaccacctctctgaaggaaaataatgggacatagtggcccatgtgccttgtctataggaatacttcaagctgaaatttcaggaattcctcctgtcccaaagttaattcacaaaagccataaagaccctttatgtcagtgttgcccagctggcaaaatggtagtaggtattccacgaggggtggggaccggggggggggttcctgtggtctagtttggttgaaagggccgttgtccttcttagatcatgacagtgcacagtggcatgtaaaagctctagaaggcctacggcaaatgtttatccctgtttcagaagccattcctaagactatttgacccttttattatggaacactaattttatcgaatactgattttccatgaaaattcatgtaaagcagcttttcccatatcatctctgaaatgtccagcccccagtctcctgaggcaggtcctcagtgggcaggtgaaaggatgccagagggcctctttagccaccagctgctgcccttctatggatgtctcttcccctcccaaatgggagccttccaaactctcatgatgaagtgtaagggtttagcaagatcacagtgaggtgcataggctgggcagtcagctaggctcactcatgaaccaagtggctgtgctcacactccagcctcacgtgtgtctgacttaaattcatccctcatgaaaatgatgcataccatgttcctgtagggccagaactgcccgtgtcaaatgtgcaagtgttgaggatcttacagcttttcaaggcctggggagcttggaggtagtgggggatctgaggaagcaaggatacagggggcttagctgaaatggaagctgctggaaagaggcagtcctggccctcctgccaccatgactgggcacagctagaagcccaggacagaggcaggccgtccctagctcctggcttgtaagcaccttaactcagaccttcacctacctagaagacttcccaggcttggtgcacttcatctatgtggaccgcaccactgggcagatggtggcgccttccctcaactgcagtcaaaagacctcgtcggagttgggcaaggggccgctggctgcctttgtcaaaactaaggtaaccatttggacccagggcggggatgggtgggcctcagccaatattgggtagcccttcctggtgtgatccacatgcctggggctagcagagtgcgctgggcagcaggcccaaggaggcagtggccagtgccggcataaataaatgctcgacaagtatttgttgaatgagctagaatggagagaacggcaaggtccatcagttgggcatcagaatttaaaacaaggtgatttctgttaaggaagcattccctggaaattcttttattctccttatttaactgactgtttttcatgacaaagttgtatttttgatagggggaggacccctgccactctccaaaaaaactatacgtgtgtgtgtgtgtgtgtgtgtgtgtgtgtgtgtgtctgtgtgtgtgtgttcttttctttctttgttttggtgggggaggcaagtaaagtgtattctaatgtttaaaacaagatgggaagatgggtggtggaggcatgtgttggaagcccagccccgtctcccaccagttatgtggctttgggcagtacttagcccaagggtcagtttcctcatctgtagaaggaaataatagtgctatttacatcacagagttatgaagagtacatgagaggatacgtatcaaatatttagcatagcacgtagcacaaaatacagatacagttcattcagtacttactggtggcatcatcatcaccatcttcatccttgcccctcattctggagacagttggggttatcttggtacgtttctttctgttggttttctgtgcagtttgttgtagttgagatcactctgtatgtgcaactttgctaccatgttttcatttcacattatatcagatgctttccctcatgccattaactctttatagacatgatttttagcagctccataatagtccatcatgtgaatgtaacataatttattgaaccatttccctgatgtttagacatacagattatttctaggcttttgctgttataaataattctgcagtatacaccttgcatacatctgggtccccatctctgattatgtccccaatatggattcctagaaatggaattattaagtcagatgggaggaatgtttttaagattattgatggatgttgtcaaattactttcctgaaaagtacagtcaatccatggcagatttaatgagtaatcacacggcgatgcagtttggagcagatcgcctgtccctcccgttaagggtagaggagagggctcctcgagtctcttcccagccctgagaggtggcagagagcccactgtccctgctgccttccctggggcacttcaccggcagcactggtgacagtccctgcgtcaggcaggaggacattcccaggggagctaaggcacgtggtttctcaggccctgtgtttccatctgaccccttggtgaactctgatttggacttcccccctggctcagcacatcctacagggtcactcacctgtgccatcagttcccagcctgaagggcactaggtgagtgggcgaccccaggcagaggaggggattcaggagaccacaccttgttctcctgtgttcattaatgatgtccctggctattctctggcctgaatgatcatttcactaatttattttttttttaatattattattttttgagacagggtctcactttgtcacccaggctagagtgcagcggcacaagcacagctcactgcagcctcgacctcctgggctcaagcgatcctctcatctcagccccccaaatagctgggactacaggtgtgtgctaccacacccggctaattattttgtatattttgtagagacagggttttgctatgttgcccaggatggtctcgaactcctgagctcaagcaatccacctacctcagcctcccaaagtgctaggattacaggcgtaagccaccacactagcccagttcactaatttatggcatatgtgtatagtaaagttacacaaagcttttttacatatattttgcccccacgctaactggagggtagtccatccatccaataatgatttattgttgagcctcctgctctgagccaaggcagtgcccgggtactaggagaggcccctggcactcacggagcttctcggctgtgccctttccttccttcggaggtgagagctgcccaggcagaccaaggctgggagagtggtgatgcttgctgtcttttccccaggtctggtctctgatccagctggcgcgcagatacctgcagaagggctacaccacgctgctgttccaggagggggatttctactgctcctacttcctgtggttcgagaatgacatggtaggtgaggctgagtccctgggccaggacgggccacacacacttcccgctctgtaactcttggattcctttcttctgaattgttgtctgtctgtctcatcttctcttcttgttgctggtaagcccagcaggttgggagccagagttcagaggtcacattttcacatgggcgtttaactgctttgtgatccctctgcccagctgtctggcaaactcttgccattgtccacgtggcatccaggcacacatgtgagcagaaaggcacatgccccactgtgagaaatgcgactcagaccacacactttgtcgctagtgcttccatgtcgccagcgtcacatgccaagtgtggcacatggtcatccctgtggcataggcccctgaactcaagagcataggcccctgcttgaagcagtgagccaggctgcctgaggagacactggtggtgtggctcggggccctggcctccaggccctgcactgcttcttctgggcctcactgttactgcagagtagggtccagtggggggagcttactatcattgtgtctccatccatacaacggggtcagggatccctgccccagccactgcacagggctgtgaggggtgcagtggctgggactcctctcctcctgtctctccctcctctctgtcttttccctttcttcgctttcctcctgtttctcttttatttgcatctcgcttgtcaccataagtggttgttccagctctcaggagtggttgttccagctctcaggagtgttcctcctccctcgcagcccttggtctctgggtccctgcactcctgtgccttcccctgcccccaccctgcactctttgttcactgagggtgacagccatccctttccatagggcagggcggttactggggctctccaccactgttctctcagttaccccctcacagccctgtaaagtggctggggcagggattcctgaccccgttgtacggatggagacacaatgatccggagatcagacgccatggccagggccaccgaggctgtaagtgaggaagccggagcccaagctctgctcccccggcctgcaggctcccagctttcctccgtgccctcagaagtgcccaggacgtgtgtacaacagaagtgctagaaaattcctgtgacctttaccttcacttctagggagggacaggagtctgtgtgcttgggtggccccgtggggtgataaagtgaggcagagctgtgggctggagaggccaggtttgaatgccagccacacagcccagccggtgccgtgggggcagccctgcacactagggagtccactccccctgcagggcaggccacggtgcccaggcaagcatcagctaagtgccatgttcatgcctggcacacacggcacgtccagcagatcttaattcccttccccaccttatcccaccctgggaattcccaattctttcagagcagaggcttgggccttttgtgaatgctctgctcttcaagacctgtatgacagccctgcagggtgccctcctgagcgtgtgtttgtggcctgtacaggtccaggtattgacggtaatgagagctaccctgccggcccttgaagctttgtatactttttctctaatgttcataaggtgactgttgtcattctgacttcaaagatgaaaaaacaaggtccaggcattttcccaagcacccagcgcacatgacagagccaagccaggccgcaagcccggtgcgtctgactcaggcccttgcactacccccacacccactgcctccctgtcctccctcctcaggggtacaaactccagatgatcgaggtgcccgtcctctccgacgactcagtgcctatcggcatgctgggaggagactactacaggtgacgctgcgttgggagccactggggacagatgcccccatttgggtgataagtgctcgcctctgccgggagcagcttctgcttcagcagtgccctacctcagacccagaaatccacgctgggaacaccttcccggctggccctgtgtgcagcgagggaggacgggtgtggagggtacatctgtgttcctaccaccttcctgctggcatggtcttggcagcacggggaacgtctgtgcccggcccagaacatccccactgctacctcgtagccaggatgccactgttaggtcagtgaggaaccggagcggttgtcaaggcccacatgcaggggcctagtgagatgaccgagggcatgggcatttgcttgcgagggcccagagaggcctctggcgctggaggagtgccacagcctcactcctgaatcccatcctccccttcctccccaggaagctcctgcgctactacagcaagaaccgcccaaccgaggctgtcaggtgctacgagctgctggccctgcacctgtctgtcatccccactgacctgctggtgcagcaggccggccagctggcccggcgcctctgggaggcctcccgtatccccctgctctaggccaaggtggccgcagtctgcctttgcatcctgtcctccagccacccttgcttgccactgttccccatgacgagagcctcctgtctgcagtggccatcctgaggatagggcagagtgcccagggtggccccagggcttctaaaaccccacctagaccaccctccatgtcaggtactgagcaaggccccagatccttctctctggaggaagagggaagcccaggggtcctgtttgtaaaacaacggtggcaacagctcctcttccagagctgcctctgcctttatcctgggagatggggaggaagccccatctctgctgttccctgcgtggaggaagcccacccagcaagctctctcctaccccaggtaaaaggtgctcctttgcctgggtttgaattccagcgctgccacttcctctctgcacctcctggcaagtttcttctattccccacgtttaaagcgatggcacctccgtcccagggtggtgtgaggattacccagtgtggtaggtgctcaataaatgttggtcattgttatcactgaagcccaacatgctagtgcttctagacccttctgtcagtgctgataagcccttgctaagtcccagccccttcatgcttggctggcgtctgccctagggctggggttctcaagcccctggccctggcccagagatttggattcccttggcggccgtggagcccagcctttgatgtctttcaaagcttctgtggtgcgccctggattgagaaccaccacccgaggggtacagcccctctcttccaaccgagaagttcctgtcccagaatggacccagggacaagagaccctgagagccctgggactgggagtgtctgctcctctgaggccaggaggccggtgctgggccagagaggacggcgtggcgaaagtcagcgtccactgcagcacaggatcagatggccgtgtgctgtgcatgcaggagcctcgccttctgtgtctttagtcttgagccaaaatttgctcaaagactgatctcttccttgcagggaacagctttggggctgggggaactagaacccacatgttggtctaaaccctgagaaggtggcagtgaggaagtatcccctcaggtgactggatctgtgttcctccttaacatcatctgatggaatggcaatgaaaagcgtggattgtggaaaatacagaaaaacataaaggaaaaaactccaatcccctgagcccaccactgttcaggacccctgcttttgtcacctactatttccctttagtttttagcagcggctggatgtgatatgtctagtttaaccagtccccttgatctttctatataataaataacacaggagtgaacatcctgaatcag

SEQ ID NO: 15619 - DNA, 31713 bp, Homo sapiens
gtgacctaaggcctctctgccgcgcgcgcaggtacggggcagaagtcgcaggtacccagctgctgcccacatttctggtccagagtcccgaaccccgagcactgggatgcctggctactccggtgggtgggcggcgctcggagcgcggggataccgaggggcgggcccccagcttagagcgtgacccgaccccgcctaatccttaggcgttcgcccaccatttcccagtcccgtagagctggggccagacaccgcacagccctagtgctgttaccagtcgctgcctgcgccccgggggctgcgcccagcagcttcctggcccttttccagccattagcgtccgttttccagccctgctgccccactgaggccccttcccacagcagtatcaccagccccagccccgcgttgttactattacttcccaggctaccagatccttttctgctcatgttccgacgtctcttcctactccagggccattattggtctcttctggacctttcagagataagagaggacctcggtagtgtagggcccagtcctctgggaacaagggatggggagttttaggctgctgtccttggttccagtaacagagataccccctccacaggcacccaaatatgctccatagaatacaatgagtgtggtcctgtggaggcccaatccaaaatatctagagctgagaagagatagagattttacaggccgtcaaatattcaatgggggtcgtctctagagacttttaacaaactgtattgtgtacccacagattgcagaatggtgagcaaacatttgagaccatgttgctaaagcattaagcttggagaaagtgacagtaagaattagacaatagttttgaagtgaccaagaggttgtcacatggaagaattagaccttgttttgtgttttcctgcagagcgttatccagactagcgagtgggaggcagatgtaaaatctggaacgcagattttagtttgttggaaggagaaatgtaacatagtgaaccacgcatctctggagggtgtaaagcagagacagccaaggtaatttttggaaaagagtgcaggagagtagagtaaacgatgccagggttccttccgactctgaaattccgtgatacactgagctgtctttctcttgtggaagtttgaaagccatttgataaagttctcttcattttttagaaatttgccctgctctggaattctgcatgttcaggttacttttggactgtcaagatgacagttccttaatttgggttccattattaccacagcaactggtttatttgtatagctgtccacacctagagcattttcaccctgtcatttgattttatcttccgtgaagcttgtggtgtgtttcccttaactgttcgagaaactaaagcccttactctgaagtctctgcaagcctccctctttgattttgaagcatgattgtcaccctcacagaaagctcttttgaaatataccattcgtttaatcctgctgggtcacatgctctctcacgagttgctgaaatatctattccttgtgtttatttcagagccaaggcactgatgtttgaactggaaacttcaaaacgtttaataagagtcttcaggatgggtttgaactagacaagctagaaatttctttagaacaccagctctagcatgcatctcccacttttggctttcctggagaggagcttgaagaggtggttctgcagacagccacagtgatacttaggaaaccagaggaatggatttgacttttctgctaggattctctgttatagtttctccctgagttgtaagaggcatggaaatatacatgaaactgaagaacctgcaaggaagggaagtggaactttccatgctgagtgaaaactaaccaagtggcagttgtgactgaaaacactgaaacctaccacgtccagattcactggattgggggatagaggaacggtcacagctagggagaaagaagtgataccggaaaagaaaacctaaatgaagagaatgaggatgactgcacagtagatggccacctctacctccacagaggcaaagtcagcctcgtggtgagtaacaaggcctgccatggcatagcttttgctgggctgttggttagagttttggggttaattgaaaatccccagccagattgtgttaattttattaacataacaataaaaatgccattttcctcagagcagctgaatcaagcacgtgagccatcgctctccaaagctaacatgttttaaccttgcaagcctctcccaatgtttgaatgagtctggcattgctgggagattgtagaaaagatagccacagcctgatcatgcagcgagctttgatgataatgtgaatattgtagtcttcaatttgcagagatgaggtatggttgcatttgagaattacagcatgaggagaggtctggccagactgggtatcaaggggtattactcaatgtctgtctgaaacccagttcccttctcaaccctaaatgcgttaatcctttcccataattaggtttagcaaacatcagtcatagaggagatgaaggtgaaaagcaggtttagctagaattagcaggatttagtgactgattatttatgtggaagtcaaaaagatggagcagttcaaaatgacacccaagttttctttcgtgtgcccgcacaagcagggatgctttcatcaagagaacgtggggacaggggaggatggggtgcacatggagtttctgagttggctttgaaacttttttgaggctttttgatctgagcttaccctgcagccagttgtacatccagccttaggtattgggaaagaggacagtgccaagagaccaagttggtgctttatttatttgtttgtttgtttttgagacagggtcttgctctatcctccaggccagagtgcagtggcatgatctcaggtcactgtagcctcaatcccccaggctcaagtgatcctcctacctcagcatcccaagtaactggaaccagaggcacaccccaccatgcctggctaattttgtctgttttttgtggagatggggtttcacggtgttgcccaggctaatctcgaactcctaagctcaagcagtcctcctacctaggcctctcaaagtgctgggattataggtgtgagccactgtgcccagccaagttggtgctttttcatcaggaaggcagggtgggagccatggagggaggcttcagagagggcatagatccagggaagagagcagatgacacattggtcccattgcttgtttatgctatagcctcataaatgtgttctcagagacttagaagtaaaacaggtccagccaggctcagtagctcacacctgtaattccagcactttgggaggccagggcaggattatttgagtccaggaatttgagaccagcctgggcaatatagtgagactcgtttctataaaaaatttaaaaaaaaatagccgagcatgatggcacactcctgtagtcccatctacttgggaggctgaggcgggaggatggcttgagcctgggagattgagtttgcactgaaccgcaatcgcaccactgcactccagcctacagggctacaaagtgagaccctgtaaaaacaaaacaaaattgaggcctggcctttgaggtgtttgttttatggtcttaaagaggtaatcagataataacattacgtaatatagttatactgcagtgtagtctgtaagagtctttgaggaagaacagagggtcatggaaattcagaacaaagagatatctctgggccgagggaatcaggagacggttaatgaggaagtgtgcttgaatgatacttggtgaggtttggcatggtagagaggagttcagagtttctctgtaaattctcataggcccctgttttttccctgttacgaacttttggactcactatcctgcattgaaactgcgtgtttgctcagcaaccgcggagcacactgtgggccctcagtaaatgtttaagtgaatgcatgaattcctggtagaagggctgtttctggaaatctttgtgctcagcacttatgaggagtgcatctaatacatccctaacttattttgttatcagagccttaaaagacagcgtatcagaccatgtggttgtatagttaaggttcagtgtttcaaataagagcagtcattgtgggcgcctcgtttttttttctagctactcgtgtcttctccggcagatggtctaacggctggatagaggcatatttttagtttgaatttcctgcgcttacagaatggttttatctaatttgtagctactggggttctttattctctggggccacctgaaggctttcaaacacagtaataagccctcctcgggctgggaaacaggaagctgtgttttaaatgccgtgatcactggattaaaggaaacatggctccactctgttctcttgccaggtggaattatttttttctttatgatggttccaaggtaaaggaagaaggcgatccaacaagagctggcatttgttacttttatccttcccaggtaagccacacagcattttattgttcagtgaggatcccagtgcctccaagtggtgacttttcaaaagtatggggtttacattaggacagtttggctaatccagacaatgacatttctactgtcttattcttagttgtactatttcttgttgttctggtcttaaaatttccaggcagctcggcactttcatcgtctttagctttctatttccatcatgatttttgtctgcctccctctacccccaattttttgatcagcttggtttttaaaagttattattctgctgggcacggtagtttatgcctgcagtcccagctctttggcaggctgaggtggatggatcacctgaggtcaggagtttgagaccagcctggccagcatgatgaaaccctgtctctactaaaaatcccaaaattagctgggcgtggtggcacgctcctgtaatcccagctacttgggaggctgaggcacgagaatcgcttgaatccaggaggcagagttgcagtgagcagagactgcgccattgcacaccagcctgggcaataagagtgaaactccatctcaaaaaaaataaataaataagtttgtattcaaacatatacaaaaacagagaggcaagtatcatgaaccctcatatgccatcagtagcttcaacaattatcaatactttgccgatttttttttttttttttttgtgatggaggctcactctgtcacccagggtggagtgcagtggcatgatctctgctcactgcatgctccacctcccgggttcatgccattctcctgcctcaacctcccgagtagttgggactacagtcgcccgctaccacgcccggctaatttttgtatttttagtagggacggggttttaccatgttagccaggatggtctcgatctcctgacctcgtgatccacccacctcagcctcccaaagtgcagggattacaggcgtgagccaccacgcccggcaatactttgccaattttatgtgacctatctgaacctcttcttctctctcttttttttttcctggagcaaattctagatgttgcgtcatctcaccagtatcaagcaacatctctaactgaaaagggcattattttgaacattaccacacctaacgaaagttacagtaattagtaacagtaattccttaatattacctgatacccagactgtattcaaattttgccttattgtcttggatattacttattctgctcttccttccttccatgcacccatacttccatccttccatttctttttctttttcctaataaggatccaaacagcatccacatattctatttggttattttgtattttaagtccttttaataacagtcctcacccagccactcatctttttccccctcctctatgccattgaattattgaagaaaccaggtcatatgtgtagtagagtgttagaatgtcccacactctagatttggctgatttgttcctcatggtggtgtcatttaatgtctcctatccactgtatttcctttacattagtagtaagatctagagtcttggtgaggttcaagctcagttttctaggtaagaattcttcatgggtggtgtatacatttcctgtgtatcccatactgtctggctgtcctgtgcgttagttaaggctaaggttgattaggagattctgtacattccctcctgtgactgtgctctgacatggatagttggggttaatctgcatccctctggccactccgtatgggggatttgagtaggagtgaaaggctcatgcttctgctaagcatatgcctataatcctagcaacagaaatgcggttctgtgcagtcatcgcatgtgttcctgctgggtgttctcttagggttcagtcatctcaggtaggggttggcaaactttgtaaagggccagaaagtaaatattttaggctttgcaaggcacataaggtttcaatcacatgttcttctttgttgtaacctttaaaaagtataagaaccattcttagcttacaggccataggaaaacgggtaacagactggatttggcttgcaggctttagtatgctgtaagaaatgacttaagagttcaagaatttcagcttcctatctggaatgtgctcctttcccacagaccctgctagaccaacaggagttgctttgtggacagattgctggagttgtccgctgtgtttctgacatttctgactctcctcctactcttgttcgtctgagaaaactgaagtttgccataaaagttgatggagattacctttgggtaagttgaatggcagaatcagtgctgaagtgttgcaatgataagtttaggaagttatgttgtttctgagtcttgaatttagaattatctgcccccaccaacctcatccatgtactgtgtttagtaatcaccctcgcttcctgtggtactctctgcaggttttcatcatcaagtgctttccaaaacatttctaacatattctgcattgcacacagctggtttctcctttcctttcaaagacttaggccaacttgtggaaattctgtttactctgtgttgtaaattgagtttttatcatcatcttttcttctccatgctctctacacttactgggtaagtgacccagaaaaaaatgatagatatatgttaggttttagagaacccattaaaaaaaaaaaaagaatattgcttgagtccaggagttcgatatcagcctgggcaacatagtaagacccccgtctctataaaaaatttaaaaattaaccgggtgtggtggctcatgtctgtggtcttagctactggggaggctgaggggaggattgcttgagcttaggagtttcaggctgcagtgagccatgattgccactgcacgctagcctaggcaacagagtgacaccctgtcttaaaaaaaaaaaaagaataaaaatcattcctttacattctaatagtagcatataatctaaagtgctgtttcccatggctacatttattttaaggcttcctgaggtaaagggatgcttaagtgtgggatgctatattcaactttgtaggtattatttccaacattttattacgaaaattttttaaagtactgaacagttgaattttacagtgaatactcatatacctcctcaattctacagttagcattttattatagttgttttattacctatctattcattcctttatcctcccattaattcaaattatttttattttattttattgagacagggtctcaatctgttgctcaggctggagtgctgaggtgtgaccttggtttactgcaacctccgcctcccaggctcaaacgatcctcccatctcagcctcctgagttgctaggaccacaggcatgcaccaccatgcccggctaattttttaaactttttctagaggcagggtttcaccatgttgctcaggctggtcttgaactcctcagctcaaggaatcctcccgccttggcctcccaaagtgctgggattacaggcgcgagacactgtaacccagccccaaattattttgttacagttttcaaagtaagttgcacacattagtgtactctccacacagatactctctctatcatgcatatcatcaactaaaatttaatgtttggggctgagcgctgtggctcaggcctgtaatcccagcactttgggaggccaagacagtcggatcacctgaggtcaggaattcaagaccagcctgaccaacatggagaaaccctgtctgtactaaaaatacaaaattagccaggtgtggtggcacatgcctgtaatcccagctactcgggaggctgaggcaggagactctcttgaacctgggaggcagaggttacagtgagctgagatcgcgccattgcactccagcctgggcaacaaaagcgaaactccatctcaaaaaaaaaaaaaaaaaaaaaagaaatttaatgcttgtttgtggttacatgctttacaggcgtctgtcttgccacttaacacttgtgaaattcgttcatgttgttgcatctatcagcgttcgttccattttattatcaaacagtattccgttgtctgaatatatcacaatctgttcttcttttgatggacatctgaactgtgtccagttggggatattaaggataaggcttctgggaacattcctatacaagtattttggtgaacacgtgttttcatctctcctgggtaaatatccagtcctggaattgctgggtcatagagtaggtgtatgttggattttataggaaactgttagaacttttccttcagtggttgtaccattttacattcctaccaagaatgtatgagaattccagttactccacctgctcatcagcattgagattgacagtctgttcatcttagccattctgctggatgtgcagtggtgtgttattgtggttttagtcttcacttccctgatgactaatgatagtgaggccttttcatgtgcttaatgaccacttgaatatcttcctttgtgaagtgtccattcaaagccctgcccattttttaaattgggttttatttttttaattgaattgtagttctttttatatcctagataccagttctttgtcagatacatctttttaaaataatttctcccagtttgtggcatgcctgttaattttcttgttgtcttttgatgagcagaagtttttcattttaatgaagtctaacttataaattttatctttttatggttattgctttctgtgtcttgcctgaaaaaaaccactgcctactccattggaggagatagtctcccttttttattttttgtaagaatttgatagttttagcttttaaatttagatctgtaatccactttgggttaatatttgtgaatggtgtgaatagaggtcaaggatctttttttttttttccacctggataaccagttcttccagcatcattgttgaaaacattttcctttccctattggatttccctttggttcctttgccaaagatcagatgaccatttaagcgtgggtctatttctggactcttttcggcttttccacagatctgtttgaagattctgtgtgagtaccacactgtcttgatttctatagctttatagtaagtcttgaaaccagatagtataagttctccaaccttattctttctcaagatagctttggatatttcaggttctttgtgttttcattgtacaatcagtttgtggtttctgaagaaaagctggtgggattatgattgcaattgcattcagtctgttcatcaattggaagaattgaacacttcttacatgccagactgttgtaagctcttggattacatctgggaacaaagcaaagatccttgtgctactgtagcttacattcagagggaatttttgtttatttgttttctgtcagggtttattagtttaaatatctgatgattcccttaggacagattcctagaggtagaattactacatcaagtaataggaactttttcaggctctttaaacatatgaccagataactttctaactcagcaagtacttttttttttttgagacggtgtctcgctctgttgccaggctggagtgcagtagcgcaatctcggctcgctgcaacctctgcctcccaggttcaagcgattcccctgcctcagcctcctgagtagctgggactacaggcacacaccaccacgcccagtatttttagtagagacggggtttcaccatgttggtcaggatggtctcgatctcttgacctcgtgatccactcaaagtgctgggattacaggcatgagccaccgtgcccggccaagtatttatcttctgtggaactaaccactacgctcagcattttggagatctaggactgggaagattgcggtcagttcttgctcttaaagcactctatccagctggagaaacatgatggccattcatgaaggagtttgagtcctgtccattgtttgtaatggaatccagattaaacatctactgtccaaataacagtcctaacaatgcaagggtcagaaaaaaggtcagcattattggctcgaggtaatagaacagacctcatggagatactgaaattggtggtgggcactgaaggttgtaagttctggggaaatgaacaataaggaaaaggacatttgagattggaaaacatgaattgaggtacagaacttacttgtccatggagattaacttggccagaatgaagggtgtggactcagggacaatagaagatcaatttcgatgggccagtgaagtcaggtaattgagagccctggatgccaggattctgggcttggactcaaagagaaggaagatgcttgtcttcctggtttctctctttacaggtgctgggctgtgctgtggagctccctgatgtcagctgcaagcggtttctggatcagctagttggattctttaatttttacaatggacctgtttccctagcttatgaggtacaagtatggggttgaggagtcttacattgggcctctttataaaaaccggtattgccagaatgcagcacttactctggggtcttgtatacttcatataaacacattgtgtctggggacaaggtcaggagctcttggaggcccctcatatgcctttgggcctagtggcataggtcacatttattccaaatgtttatccccatctcctccctgggatgtttagaaagcgcaggccctgcttgccacccccacgcggcaggcgccgtggatctgtgatgggataggtttaaaacaggtcctcccttccggtcagtttcctgtgtgaggaacaatttttgaggtagttgggactctggccaaagaatctgtccctcaaaatctcagatattgacctgaggctctttctgttttagaactgttctcaggaagaactgagcacggagtgggacaccttcatcgagcaaattctgaaaaacaccagtgatctgcataagattttcaattccctctggaacttggaccaaactaaagtaacattttcatcctccttattcattttatatgtaagactagggcttctggatacttttttaatattcctgaagtgaactatatctggaaaagtgagtagaatgtcacttctcaggcagggccatgacacggcaggtcacctctcagcctcatttcccttatccaaagaatggtgtcagcatacctgccttcttgaactgttttgatgatcaagtgaagcagtacctcaaatgacaccaagtaaatgctcagtaaagggaattagtattttgttcatgcctcagaagtgttgaactcagtaatctgaaggccgcctctcttgatattcatatcatatgatctagttattctcagcatcaaaaatgcccagcatgaacatttcaaaaacaaggttgctgtctttgagagagaatggttgggaactgtttttgtatctctgagccgctccgtttgcggttggcactcagtgaaacctaggctgcttgtgtggctggcctgaccacctgtgctgccccattaagagccagctacctgagccctgactcacagccctctcctgtgtctcactgcgatagtaaataatgtccctgtagcaggggtgtagcactgtggctcagccttcacagagcatgactccaccagacatggggaagggttttccctgctccagtctggaaaacttcctgtagctggccccagagctttatagaatggctggctgggatggcacagtcttgaggctatgaagaataaacttcttaatgtgtcagcagctccggaggctccattaacactagttctaacagctggtggatacttgctggttctagctggcaggtggaagtctgaggaggctgctggttattgctggctcttcctgaccaggtccagatgcttttcttgtatttttagggacttctaggcccctgactccatacaaggaatgtggaactgaggcatatttccccgagtgaaagagcatgatgttttcattttatgtgatggaatagagtcatggaacctggtcagacatcaagccacctgtatcaccatggggattgtgcttcagaaggaaagtggaggatagggtaggtgggtttcacctggtaccatgacatgtatttataggatacaccctcctcttctgctgccgtgaggtcttagcattgtcagggtagacagtcggtctcccaggccatctactttgacccctttgaatagccatatgccatatttgctgcaccttctagcttctggacaggcctccttgttctaagaatttggcatttagtggtgtcagcagttctgagtatagagaggtagaatagtcccaagccatggcacagctttcactgtgtgacacattctccttttccaggctttgagctacaccctgtccagctgttctgtacaaccctttccccttttctcccttcctgattgtgagcatgctgatgggtgggcatgatgcctcttgccctgcacaggtggagcccctgttgttgctgaaggcagcccgcattctgcagacctgccagcgctcgcctcacattctcgctggctgcatcctctataaaggactgtgagtaactccagacccctttcttccagccccattcccttgctgcacaactgaccatcagccacctccagatcacagtggggagcccagtctctggccagttccaagtgggctggttcggcaaatatcaggtagtttagatttgactcagtttagaaagacaggtgtgtacctgtctttgagcaaagctgagaaattggaaatagttgtgttcagaaaagagttaagaatgtccctataattctcagtatggggcatgctggaatagttgtcagtctgcaaaatgctaatgcagagtcccgagcgttgccagcagccagcactgtagtcaagaggcatggaaggggcctgctgtgaccctcctcctgctgcccagagaccctggtgtgcttgcctcagctcagctctgcaaagcagccttacaggcccttatccagctgccttcaagcctcttggctgggccagtgtcttggttggcctctgagaattcacttcacttcttcatgtagttggagggcttcttggtgaatctgagtgcccaagagccactctaggtcatctaaggcctctctcctcatggagggtttgctgtcacagcccagggcaggcagggccattgcgctgtgcccggagcttcctgaggagcaggcaactactgtgtaaatggagaagcactgaggctctcgcaggggcccttgggccagacaggctcggccccagatcctcccttctttcgccagccatgcggccttgggcaagttgcttagcctcaattttctcttctgggaaatagacatcccttgtgaagaatgaaatgagatgacagatgcggaagaaccgagcatagaccctggtgggctttgcactcttcttccttgccccggttcttatcatgatggttctgaatcagctgtgggatttccaagttcgtcagtgacatacccaccaaagacagtattttttttccccttttctcattttgcatttcttaaatgtatatatatatatttttttttcttttttttttttttgtagggacgaggtcttgctatgttgcccaggctggtctcaaacacctggcttcaagcgatcctcagcttcccaaactgcttggattatagacataagccactgcacccagcctgtatttacattatacggctaatacatgaatacattttcactgtaaacaaatcaatcaatagaggaacacacagagcacaatttaaaagccccccttctttcttcaccatttttgtttgtttgtttttgagacacagtcttgctttgttgcccaggctgtagtgtagtggcataaacacagcttactacagcctcgacctcttggactcaagtgatcctcccacgtagctggaacaacaagcacttgctaccacacctggccaagcttttgattttttttttttttttttttgtagagatgggatctcactatgttgctcatggaggtctcaaactcctaagctcaagttattctcccacctcagcctcccaaagtgctgtgattgcaggagtaagccactgtgcccagcctctccctcactcttaacctgtcctcaccattggcagtttggtgggcatcttgctctttctgtgtgtttgtccccactggtacatgtatgcatatattgcttttgtttatttttgctatctccttaaataggatcacatggtttctcaacgcatacagtgaagatttccttaccggttcatatgggtctacctcattcttatgaggactgcatactttttgggattctggctgtgttgtgctttactgtcttgttgatgaacattttggtggtttactcattttttaattgtttttaccattctccctgtaatgaatattcttacgcatacatcttggtacaagctgagtcaaagggtttggatattttaaatgttggtaggaactgccagagtgccctctgtaagggttttaccagttgaaactcccaccagccaagtccccaagatcctcgtcaacacgggctgttaggcatctttaaaatttggagtgttttggtgtatttcgtctcatggtgttcttgttctgtgtgtgacctcctaggattgtcagcacccaactcccgccctccctcaccgccaaggtcctgcttcaccgaacagcacctcaggagcaggtattgtaaagtccacccacctggctggacagcatcccccagagcactggtcactgagcctgaggctggagggatcaggagcagaggccgtggagcagttgtttcacttggtcttgtcaggaccccaagtcctccaatgtcattctcctcagtagtgaagccattggtgaggctgaaagaaaatgttttcttccacgagctaggcctggatagttgttttttcttcaaaccaaggaaatcttggttgaattcgacttcccataagaatttgatgtctctttatgtcaaagagatgttagacttttcagagacagactgtaaaggatgtgtctttagaaagatttagggggttgggcacggtggttcacacctgtaatcccagcactttgggtggctgaggtgggcagatcacttgaggtgaggagttcaagaccagcctggccaacatgatgaaacccatctctatttaaaatacaaaaattagctgggtgtggtggtgcacacctgtaaatcccagctacttgggaggctgaggcaggagaatcgcttgaacctggcaggcagaggttgaggtgagctgagatcgcgccactgcactccagcctgggtagcaagagtgagactctgtctcaaaaaataaaaataaaaataaaaaaataaggaaaacaaactcttctaaaatacttccattttatatttatttaattgtttttatattgaaaaaaaagccatgcatgctcattgagaataaaattgcccatctttgaactgtacagggatagccactgccagcatctggcatatctccttccagtcctttttttgttttgtgtatgaagctgtggtttccagcgtatcatgaggctgtctttttacatgtattagtgaacaggcatgtaaaatgctggtagggctctattcagcctcctcagccactgtggctatgggtgtcaattcaagtagcctttctgggaaacactttgataatgagaacgttaaggatgccctttatttttttcctaataatttgacttctaggaatatatcttaaggaaataatgtaactgctgaaaaaaatttatactcaaaacttgatcacaacaagctttatgaaagtgaaaaatcagacaaaacttgaatgcttaaagtaggaggtggcaaattatggcctgtgggccacctgcctacaaatgaagttttatttggctgcttttgagctataatagcagaaccaagtaggtgggacagagaccatatgccctgcaaagccaaaaatatttactgtcttgtcttttgcacagaaagtttactaattactggtctaaggtaggtaaatgattaatttactcatatcacttaaaccttcataaaattttaatcagccgtttaaaatggccaaagatgttttagtggcaggaaatgcgtgttactgttttaagcagaaatatgaaattttatatagtgtggcctcaaaagtataaaaactgcataggcttaaggaaaaaatacccaatattaatagtactagcttggggatgagggattgtatgtgattttttttttcaacgctttgtctagagtaaattgaggttaggcttagtaatctaaaacatagttttttaaaaatcaccaaaaaaggaagaacaccatatcattctaagattgaaagtcattttggctagaagagcagttcttgtttggtttggttttgttttggtgggttcttttggaaccctcagattgaaacgagagatgttttcatttttgagaaaatcatcaggttttaggccctgattgtgaaccagaacaaacgagagattgggtatagcattttgtttaagtcaaatcctttatcgtgagagtcacagtattttgacatttttattataatggaatttatgtgaattctacatcagggctgtggcagatgtgactgtattctagaatatgagttccccaaaggtgtaaaagagaacaggaatcctcaattttattcccagaagggagagagactgagaaaatcagaacgtagagtgtgatgtgagtttgggtggagctgctgccttgcagcctgtgtgggcccaggttcttgcttcatcccagccatagtgggagccagcagcttgggggagcttctgttccatctgcttggctcttagcatgtggttgggacaagctttctgggcctggctaagttttatgaacagatggcacagcaaattcctgatggttaggtcaagaggagaatgtggtgcccagcgccaacttctgtgtgtgtttgttttcagagactccctacgggagaggatgccccgcaggaacatggtaagtagtgaggcgcatggttgcctcttgagaacggcggtcttttatgctacctacccctgtacaagttatgcgaaggaaaccaagccatctgcatgtttatttcctctgctcataataggaaaatggatgttatggagcttcaagaatcgagttacccaccagaaccctaatggtaaagctatgattttaggcatgctgtcaaatccctgctttcagaccctccttaacttcatattgtgagactgctcggtcaagtgccaggagattgtgattgggagagggtaaggcaaacagcgactgccagaaagaccttttgcaggatgtggaggcgtcctcaggagagttatttcgatttattctgaagcctgagttggagcagatccctttcttagcttatatcttcttcttgtaaaagtgcttttcaacctttctctcccgaacatcttccttctccaaagctgggagtcatgttgcctgcagggactctttccttactgggcccaggagttcgaggtgcagtttggcaacctgtgtcctggctgaggaatgcactcacagcacccctttccgagcccacgtgtgggttggatgcatcacgccagtgcagctattgccccgctgccctctctggctcaggggaaagtcctgttcatattgctttgcaattccaggagcggcattgcccccgaatgtccagattatccctgtttttgtgaccaaagaggaagccattagtctccacgagttcccggtggaacagatgacaaggtaatggagtgcacagagagttaaccttgcaccacacctgagggaccccatcgcgtgattggttaaaaaacaaacctctgatacatcccatcgttccttaattccatcttccccatgccctgtcttgtaaaggagcatctgaatcttgagtttgttaagaaacagagtggcatagagagatgacattggctttcatatcccagctctcttacttataccagctatgggaccttgggcaagtccattccctgcctgagcctcagttttttcatctgaaaagtagacaaaatagtatccctttcatgagttcattgtgacacttgaaaatagtataggtacagcacctagtatagggcctgatgcgtaggagaccttccagatgtgggtcagtcttattcagtgggctctgccattttcagtaggtgagtctggtgtcactacgtaaagccccaagggccagatgttggtgtatttttactcttgtgatttaactctggtggcctcttaggctctgtggcctcaggcacccccttgtccttgatgcctgtgctttagtcttcactgtggaagggcacttgccctgcagtctgtcaacgtgccccttccttacatctctcttgtttgccaggtctctagcatctccagcaggactccaggatggttcagcccagcaccatccaaagggtgggagcacatctgccctgaaagaaaacgccactggccatgtggaatccatggcctggaccaccccagatcccacatcccctgacgaagcttgtccagatggcaggaaggagaacggatgcttgtctggccatgatctggagagcatcaggcccgcaggactgcacaactctgccaggggtgaggttcttggcctcagctcctccctggggaaggaactagtctttctccaagaagaactcgacttgtctgaaatccacattccagaggctcaggaagtggaaatggcctcaggtcattttgccttcctacatgtgcctgttccagatggcagggctccttactgcaaggcatctctcagcgcctccagcagcctggaacccacgcctcctgaggacacagccatcagcagcttgcgccctccctctgctcctgagatgctgacccagcatggagcccaagagcagctcgaagaccatcctggccatagcagccaagcccccattcccagagcagaccctctccccagaaggacccgcaggcccttgttattgcctcgcttagatccaggacagagaggaaacaagcttcccacgggggaacaaggcctggatgaggatgttgatggggtctgtgaaagccacgcagcccctggtctggaatgcagttcaggctcagcaaactgtcagggtgctggcccctctgcagatggaatcagctccaggctgacaccagcagagtcctgcatggggctcgtgaggatgaatctctacactcactgcgtcaaagggctggtgctgtccctgctggctgaggagccgctgctgggagacagcgcagccatagaggaagtggtgagtgtcctcagaccttctcctgcccctctgcggcctctgccgatctcctgtgcttccctcacagcactgtgccaacacccagggaagagataaaggctcagccctcagttgtgtgaccctgggcaagacgttcttgtttagacgatggaggtattacctgcctctgtgggtttttgtggggggtaagagtgagtcaagcgcatagcactggtggtgcattggcatccaacaagtgttggttctcttcttccgctgtttctagttttgcagagcgcaggccttggagaaagggaaggcctgagatggaatcctggcccttgtcctctagctgtgtgaacttgcccacagacctttgtccccttgagccttggctaactcctcagtcacgtagggatggtggtagaccttcctgttccagatgcagtgagataatgcaggcagagactgcacacgtacgtgcatgtgttgtgccgcccctgctcatggcctcatttcctagcctggacagctctaggttctgtgtcagctggaaactcctccgcagtgtgtcacagcctgggttgggagttccctagaaacccagtgtttccctccatagccccagcatcgtacctgatctgaagctccttcctagaaggctgggatgtctgaaatcctgcctggctctggagggctcttaaactattgcagccccttccccgcttagaggcttagagtggtaaactgaccttccctggggcccacgctggagattcgttgctatagtaacagccttgctttagtaggcagggaaagtggtagcagtaagaacagcaggttgaaattgctgcagggcaaatggtgtcttggggctttccttgtttttattcttaaatgtgtattattctaagctgatcttactatcatgcagggcttgtgaccctccataaatgagctagtcaccttgaaatacagaagaagagataagactgcacagcagcttccttgcacagagctcctagcaagagaatgctctctggagctgtcaggcttctctgtgccctttccacagacgctggatcactgagttatggctcatttgcttcctgtatccccattcaccatagctaggagtgactatccatctccttcttatagcagtgcggggagttgtggctgcagtgttaaatgcctcatctccctgccaatgccttggttttcatggtctgttctgcacagtgtcgagccttggaagtgtcattttgaagggcccagtgtttgaatgcaataaagtggatataatacctctctttttaccttcccccacaaaaaggaaaaaatagcccaggctgctctttgagatgtattctgcaccaactatatgtgaaatacttcgcatctctcgttttagccaagccttagaacagttctgggaaggaggcattgtaactcccattttaccagtaagaaaacagcctcattgagatgaaaagacttcctgcaagtggcaggtccagaattcttgcttgtttctggttccccaccccagcctctctgtccccccactgccctgcccttgcagtgatagctgggaagctgaagaaagggggtcagtgtcctgccttctgtggctcgtgctctatggccatatcccctggtttgtcaaggtctatccatgctgttacgacatcagcctccatgggcttctgtggaaagcagggtttgatgctggctaggccccgggaaatagactgcagttttatggaagagaaaaagctaatcttttcttcttttttttttttttttttgagatggagttccgctcttgttgcccaggctggagtacaatggtgtgatctgagctcactgcaacctccgcctccccggttcaagcggttctcctacctcaacctcctgagtagctgggattacaggcatgtgccaccaggcccggctaattttgtatttttagtagagacggggtttctccatgttggtcaggctggtctcgaactcctgacctcaggtaatctgcccgcctcggcctcccaaagtgctgggattacaggcatgattgcacccatccctgaaaagctaatcttttctagtatggagtgactaactttgatcagcccactggtttgagagtgggtttgttaatcagacccaaaggatttctgttttataatcaggaagaggtgtttgattgcctttttgtcccagactagccttgaaaatactttatctgatttccctgcagcccctctgctactgtctagaaaaaccaaatacccccagttacggtgagcacaccccttttgcaagggctccttaatgatgttacatactgccaagctgcccttgtgtcatttggctgtcttgtctttgggtggatcagcttccacagggagtaggggtagggtgaggggcagcaggggttgggattggtgaaaggagccctgggtggagcagccaggagggttgggattggggctggaattccctcagagggagtggaataggctcacaccagggggcagcatagagccgctgatagtccattactcagaccccaagataatctccttgaccttcaaacacagtgatcagattaattatttatcactacaataggacatggagcttctgtgtacagtacatgaggcttgaagttagtgtgagagtgttgccataaaacattttatgaaaaaacaccttcccccaactgggaaaccggtatctctaagtgaatgtgtgttccatgcattgctcctgctgcacgctgtgtcacacactgacatttgtgccacttgctttcgtgtgcactagaagtcagaggacccgggaattagcctcagctctgtgttgcctagggctgttgtgaggatcacattatgtagcagtatatatcggtggctggcaaacattttatgtaaaggaccagaaagcaaatattttcagctttgcacagcttttcagctctgctgttgcagtacaaaaacagccatagacagtatataaatggtatgactgtattccagtaattatttatggacatggaattggaacttcatataatttgcacatgttacaatattattcttttgacttttttccccaaccaagtaaaaaaatataaaaaccattcttaggtctcagactgtacaaagataggcaacaggctggatttagtttataggctagagtttgctgacccctggtatgtatgaaagcacttggttatcagtaaaaattatccacatgtcatctgacatagcatcttgtgattaactgtgtttttatggttaagtgatcctatcttgagtgcaagttaggcagaagattttggaagcaaagctccgtgcctgtggggaaacagtttttggcatggctcactctctgttcttattgtttcttcctctggacaccagctcagcatggaagggatgactgttagcacgttcttgaggtccaaaaactttcagtgaggctgtggtttgacttcatcaggtgaatgcttatgtgtgcccgtgtgcgtgtcggcacatgcacacacacacatctgttcaaataagaggctcagtgttaaacgcagtgttggtcaggctctctcagtgatctgaacatgagatattatgattgtctttcctgagcacatatctttttacatagctctgcaaccttggtttaaaccaaatagctcataaattggcagtgcttggcattggatgtgttcatttattcattcatttagtggattcatttattgagcacctactaggagtcagacactctactaagcattgaggatacaaaactgagcgcatagaaaataactttgtatgtcacacctattgacttgaaatatcatttctgagactttcatacaggaaaactgatttaacaccaatatactcccaaaataacatgtaagcttcatgacatttacttcagaagcattctgtttgcatctctgtactttttatatgcacttatttttcttacatagctgttgaaaaatagtccacaaattatctgtgatctctaaagagacaccatttcttttatatgattattttcatttccttgactttataaaaagactctgcctcaggatagcactttagagtttacaaaggacttttggatgtgtcatttcatttaagtcactcaatagtcccgtactgttcccattttgcagttgactagaaaaatgaggcacagaaaacttggtaacttgctcctggtcatttgactaaaaagaggctgaacttgggatgttttttacctgggaactgcaaatgtttggggacagtgaccttctttcttgtggctgaagcaggcccaggaaaccccatttcagaccaagcctattatgacaggcctggcctactgagtcaagccctcagtggagcttgaggaacactgcacagccattaaagaattatatgatagaatatttaaagacgagaaaagcagttcatgctgtgttgttaggttaaaaaactatcagtcattatttatgatttgatctcatttttattttacagaaaaagagttacacaaaacagtttagtccagtcttttcaattgtacttaaactttatctccttggaggtttgtaaaaatacaggtacttgaacccatctccttgacagtcgtcctcaactgtattcctcttctgaaccatcaagtgcagaaagctgtttgactgacactcagtccttccaagaaagccaggaccgtgctaggtgtagcagagagaagttaccgtgttacatccagtgagggacttctgtacccagggccagtgagaaacaatgcgggatggtcccaggctgtttgtattgtgaaatcatgcagcctgggtaggaaagccatggttaaaataagatacaccacagtggtgacagtggctattactggatggtgaaatgatgggttgttttcttgttatttttttgctcatctcttttctaaatctcctacaatataatcattatttttaaaaacattagaacataagggtgaaagaaaaatgttggtgagagtccattttgctggatcaagtaggcagtaagatactccatgaatgatttttttttttttttttcgagacagagtctcactctatcacccaggctggagtgtggtggtgcggtctcggctcactgcagccttaaactcctggcttaagtgatcctcctgcctcggtctcacaaagcactgggattacaggtgtgagccaccgtgcctggctggaggattttttttttaactaagtctgtggttaactagccctcagaaggcttgctgaggtcagccctacaagcccatgaccctctccccctttgcagtaccacagcagcctggcttcactgaatgggctggaagtccacctgaaagagacgctgcccagggatgaggcagcctccacgagcagcacctacaacttcacacattacgaccgcattcagagcttgctgatgggtaagaaccagccaaggggcctggggcgacggggatgccagattctagatgggtggagatgagaacttgagccccagcatcatgatgacacggctgtgcacagagttgtctgacctgcgttcagggctctcttctcaccgggagcccagtcccactgagtgtggcgttcactgggcagacgcttctctgctcatgtgtctgtttttggcgtttcccagtgttttgagagaagttcatgttcacatatctgtgatagggtttgtctcagaatgttgagatccacacgcagaaaccgggtgctgcatcgcacagcggcggcagccgaagcccaatgccccgggcctttgtctctgccccgggcagccaactcatggccttgagccgtgctcagtccccgtgttcagtactgggcttcatggggtgggagggcagaaggtaactgtctgctcttcacaactctgtgtcctcttctggaagcaaacctgccgcaggtggccaccccgcaggatcgccgcttcctccaggccgtcagcctgatgcatagcgaatttgcccagctgcccgcgctttatgaaatgactgtcaggtgagcctccctgagtcgctccccaacctactctccacggtcctgctcatgggaaccacctgtggggcccaggcagcgccttattcctaagtagatgaaaaacattctagttactctccttaaggccttcctttgtcggttcctattgccgccatcatccactgttgtgcagtcacgtgccatggactttctggttcccttcctactttagacgcttggggtccagcagtgaaggaacctgaggtcctcaccatcatggagctacatccattactagggacggtggctccgtctccttgctagaaacagtgttgaaatattgttgtctttctaattacaaagtaatatggctgggcacagtggctcacacctgtaatctcagcactttgcgaggcagggggatcacttgaggtcagggttcaagaccagcctggccaacctggtgaaaccctgtctctactaaaaatacaaaaaattagctgggcagggtggtgggtgcctgtagtcccagctactcaggaggctgaggcaggagaatcacttgaacccgggtggcagaggttatagtgagctgagatcacaccattgcactccagcctgggcaacagagtgagactgcgtctcagaaaaaaaaaaaaaaaaaaaaaagtaatacgtgctgatcatacagtcatgcagaatgcttggaaatgtatcaagtaaaacattttcctctctcatctccatcacacaccaggaaataaccacattttacagtttggtatatattgctccaggttttattggtttttggtttttattttttgcacatataaattgtatttttaattattttaagtcttctagaaaataggattctactaatgtacaattttacagttgtcttttttcacattatgtcatagcttgaacacctccatgccagaagaaatattatgattattgtaatttacagtatttaaccaaccgaatttgtttttttctttctatatgcttctcttatgaaaccagaaagggagtttgggctttaaagatcactttataaaagcccgaggagactgggacctgagaatttggttgacaactggtaacagaaaataaagcaagttagcaggtcaagggcagtgctggcaatgtgtatattagtccacgtagtccttggaaccatctggtcaagggcattattttttatttatttattttgagatggagtctcactctcgccaggctggagtgcaggggctcagtctcggctcattgcaacctctgtctcctggtttcaagcaattcttctgcctcagcctcctgagtagctgggactacaggcacctgccaccatgcccagctaatttttgtatttttagtagagatagggtttcaccatgttggccaggatagtctcaatgttttgacctagtgatctgcccaccttggccttccaaagtgctgggattacaggcgtgagccaccacgcccggcttcaagggcattttttaaatcctcattttacagatgagaaaattgaagcacaaataggataagcagcttgcccagggttatattcttcttaagtggcagggccaggatttgaagcattttctccaactgttaagcacatgtatgacctttccacacacatttcagtgtcggggcagtgtggtccagtgtgaggggcatgggtggtggactgacagggagcctgggtgggtgattaggatggttctgattccctgtcacccgccacacttgagcgccaggtgttctgctgcctctcagcgtctccagccaatattccaatagatctttctgtcagaaatgtgtcttctctggctttaattcacagctgccccaggctggcaacccagaggcaacttgcatctacagtcactggtttgggaactggctgtgttgggggtgtgtgtgtctgttttgtgggaggtggaaacaagtaaaatgtcagcatctgctccaccaaccaccttgtggccctgcagtatgtcaccttccttagagctgagaggggtttagtgttgagacacatagctcaaggcatttgttgagagattatttcaataacagtaatagaaacaacagctaccatttctttttttttttaattttattattattataagttttagggtacatgtgctgtgcacaacgtgaggtgtgttacatatgtatacatttgccatgttggtgtgctgcacccattaactcgtcatttagcattaggtatatctcctaatgctatccctcccccctccccccaccctacaacaggccccagtgtgtgatgttccccttcctgtgtccatgtattctcattgttcaattcccacctatgagtgagaacatgtggtgtttggttttttgtccttgcaatagtttgctgagaatgatggtttccagtttcatccatgtccctacaaaggacatgaactcatcattttttatggctgcatagtattccatggtgtatatgtgccacattttcttaatccagtctatcgttgttggacatttaggttggttccaaatctttgctattgtgaatagtgccgctataaacatacgtgtgcatgtgtctttatagcagcatgatttataatcctttgggtatatacccagtaatgggttggctgggtcaaatggtatttctagttctagatccctgaggaatcgccacactgacttccacaatggttgaactagtttacagtcccaccaacagtgtaaaagtgttcctatttctccacatcctctccagcacctgttgtttcctgactttttaatgatcgccattctaactgatgtgagatggtatctcattgtggttttgatttgcattgctctgatggccagtgatgatgagcattttttcatgtgttttttggctgcataaatgtcttcttttgagaagtgtctgttcatatccttcgcccactttttgatggggttgtttgtttttttcttgtaaatttgtttgagttcattgtagattctggatattagccctttgtcagatgagtaggttgcgaaaattttctcccgttctgtaggttgcctgttcactctgatggtagtttcttttgctgtgcagaagctctttagtttaattagatcccatttgtcaattttggcttttgttgccattgcttttggtgttttagatgtgaagtccttggccatgcctatgtcctgaatggtattgcctaggttttcttctagggtttttatggttttaggtctaacatgtaagtctttaatccatcttgaattaatttttgtgtaaggtgtaaggaagggatccagtttcagctttctacatatgaacagctaccatttcttaaccactcacaatgtgttaagcactcacttaatctcattctttaaaacaaaacaaaacaaaaacaccaatgaggacacatactgttgcaacaaacactgtacagatgaaaaagctgggactcagaaatgttgaatagcagcccaggacacacactaggaagtaatagggctgggattagcacctgagtgtgtgtgactccagatccatgctcataaccatctggcctcggagccctcccacagggctgtgagaagagattgtcttgctgggccagtgggtgcaggagacactgaagcttggaatagggtgggatttttctcccttacagggaaggagagaattgagtgaggggagccttagcagtccctgactccaccctttctcactagatttgggggaaactgaggcccataatagttggagaggcaggatccagaaaccaggggggtttgtttaccttggcctggagttggctcctcccaggtggctccgcctctgtgtagtgccctcatccctccctctctgtgtccacaggcttcctgtcacttcgtgtcacatcccactcctgtccttcactccctctcagtctatccagccacccccagtgtggagagcagactagactcctttctcggacactgccattgcctcgtcatagaggcagggcagccccagctactcactctgagcctcagggtccttgtctgtgaaatgggaccataccaccactgcagagcttatgtgaggggcaaagcagagactgtatgcagagcacattgcatagctgccagtatgtcaaaaaagccagcactccacagttcctttatgcaatacttataactccaggatctgtggctgctgccactgtggatggtcccgccacggactcttccagcatctagtgagctgaaaggaaggaaagatggtattggcactgaagcctgaaactcagctgaagaaatagaattccgtgccatgacagctgcacatgccacattgggtgtcctgggtcctctgtgacaagaaccttactgaggtctctgtgtggtctgagattagcaccagcagcattggaccgttgccttctttcttcctccaacagaaatgcctccacggctgtgtacgcctgttgcaaccccatccaggagacatatttccagcagctggcacctgcagcacggagctccggcttcccaaaccctcaggatggcgccttcagcctctccggcaaagcaaagcagaagctgctgaagcacggggtgaacttgctctgaactgcacccaggaggtgactgggaaggagaaaaccagcaaaggaagctctgccttttataattgaaaaggcccctctattttatttttcttgaaaacattcccttttttaggaaccaaatgatatttgagtttttgttattccttttgcagattgggatgtgttttgggggcaggggttagttcttcaggtcggcagacccagagcacttgataaagaactgtatttaatcggtagtgttggggccgggacgggcttggctccctctctgccatactgagcctgaggtatttcatatctcctgctgttccatcccagcttgaattggtgccacaagcttccaagttggcattttttctagaacctgatcgtccactagcccagagtgtgtgtgttcaacccccacaccaggtggtggtaggcggtgtgactgcacagcgaggtgccggatctgtgagcaggccgactccactcccacgccgcaggtaggtttctccagtgcgctcttgctgggaggtccggatcgttcctgcagggaagcggcagcacacggagaccacttggttgaattctgttggaactctactcaaatctaggggcgtcttctttggacccacaatgggggcaagccttaataatatggaagggagtttgggctttagagatccctttataaaagctctgggggctgagccctgagaattcagtgacaacaggaccaacctgcgctgcctttgactacaagtgggccgtgcagctggttcctctcgagcgagtgtccctaaataggagtttacaagatgtctgggggtaaaagcactgtgcttttcagtggtggctgcgtgaaagggagcgacactcagctgtgtgttcctgggcttgtgtggtacttagaacctcagttctattacgttatagtcagacatttttttgacagtatgagacagactgcaggatgaaaatatttgtcaaaatcttaactgaatgtttactggaagtacttgagattccatttgagagttgtattgttaataatttcatgtcagtgaactgatatctgatgtttatgatatggtgtctttttcttgaaacaagcttccaagggctagaaataaaatagccaaaaaatgctggagttctgagtaattaaa

SEQ ID NO: 15620 - DNA, 32333 bp, Homo sapiens
ggtaggcggggcggcgcgtgacctaaggcctctctgccgcgcgcgcaggtacggggcagaagtcgcaggtacccagctgctgcccacatttctggtccagagtcccgaaccccgagcactgggatgcctggctactccggtgggtgggcggcgctcggagcgcggggataccgaggggcgggcccccagcttagagcgtgacccgaccccgcctaatccttaggcgttcgcccaccatttcccagtcccgtagagctggggccagacaccgcacagccctagtgctgttaccagtcgctgcctgcgccccgggggctgcgcccagcagcttcctggcccttttccagccattagcgtccgttttccagccctgctgccccactgaggccccttcccacagcagtatcaccagccccagccccgcgttgttactattacttcccaggctaccagatccttttctgctcatgttccgacgtctcttcctactccagggccattattggtctcttctggacctttcagagataagagaggacctcggtagtgtagggcccagtcctctgggaacaagggatggggagttttaggctgctgtccttggttccagtaacagagataccccctccacaggcacccaaatatgctccatagaatacaatgagtgtggtcctgtggaggcccaatccaaaatatctagagctgagaagagatagagattttacaggccgtcaaatattcaatgggggtcgtctctagagacttttaacaaactgtattgtgtacccacagattgcagaatggtgagcaaacatttgagaccatgttgctaaagcattaagcttggagaaagtgacagtaagaattagacaatagttttgaagtgaccaagaggttgtcacatggaagaattagaccttgttttgtgttttcctgcagagcgttatccagactagcgagtgggaggcagatgtaaaatctggaacgcagattttagtttgttggaaggagaaatgtaacatagtgaaccacgcatctctggagggtgtaaagcagagacagccaaggtaatttttggaaaagagtgcaggagagtagagtaaacgatgccagggttccttccgactctgaaattccgtgatacactgagctgtctttctcttgtggaagtttgaaagccatttgataaagttctcttcattttttagaaatttgccctgctctggaattctgcatgttcaggttacttttggactgtcaagatgacagttccttaatttgggttccattattaccacagcaactggtttatttgtatagctgtccacacctagagcattttcaccctgtcatttgattttatcttccgtgaagcttgtggtgtgtttcccttaactgttcgagaaactaaagcccttactctgaagtctctgcaagcctccctctttgattttgaagcatgattgtcaccctcacagaaagctcttttgaaatataccattcgtttaatcctgctgggtcacatgctctctcacgagttgctgaaatatctattccttgtgtttatttcagagccaaggcactgatgtttgaactggaaacttcaaaacgtttaataagagtcttcaggatgggtttgaactagacaagctagaaatttctttagaacaccagctctagcatgcatctcccacttttggctttcctggagaggagcttgaagaggtggttctgcagacagccacagtgatacttaggaaaccagaggaatggatttgacttttctgctaggattctctgttatagtttctccctgagttgtaagaggcatggaaatatacatgaaactgaagaacctgcaaggaagggaagtggaactttccatgctgagtgaaaactaaccaagtggcagttgtgactgaaaacactgaaacctaccacgtccagattcactggattgggggatagaggaacggtcacagctagggagaaagaagtgataccggaaaagaaaacctaaatgaagagaatgaggatgactgcacagtagatggccacctctacctccacagaggcaaagtcagcctcgtggtgagtaacaaggcctgccatggcatagcttttgctgggctgttggttagagttttggggttaattgaaaatccccagccagattgtgttaattttattaacataacaataaaaatgccattttcctcagagcagctgaatcaagcacgtgagccatcgctctccaaagctaacatgttttaaccttgcaagcctctcccaatgtttgaatgagtctggcattgctgggagattgtagaaaagatagccacagcctgatcatgcagcgagctttgatgataatgtgaatattgtagtcttcaatttgcagagatgaggtatggttgcatttgagaattacagcatgaggagaggtctggccagactgggtatcaaggggtattactcaatgtctgtctgaaacccagttcccttctcaaccctaaatgcgttaatcctttcccataattaggtttagcaaacatcagtcatagaggagatgaaggtgaaaagcaggtttagctagaattagcaggatttagtgactgattatttatgtggaagtcaaaaagatggagcagttcaaaatgacacccaagttttctttcgtgtgcccgcacaagcagggatgctttcatcaagagaacgtggggacaggggaggatggggtgcacatggagtttctgagttggctttgaaacttttttgaggctttttgatctgagcttaccctgcagccagttgtacatccagccttaggtattgggaaagaggacagtgccaagagaccaagttggtgctttatttatttgtttgtttgtttttgagacagggtcttgctctatcctccaggccagagtgcagtggcatgatctcaggtcactgtagcctcaatcccccaggctcaagtgatcctcctacctcagcatcccaagtaactggaaccagaggcacaccccaccatgcctggctaattttgtctgttttttgtggagatggggtttcacggtgttgcccaggctaatctcgaactcctaagctcaagcagtcctcctacctaggcctctcaaagtgctgggattataggtgtgagccactgtgcccagccaagttggtgctttttcatcaggaaggcagggtgggagccatggagggaggcttcagagagggcatagatccagggaagagagcagatgacacattggtcccattgcttgtttatgctatagcctcataaatgtgttctcagagacttagaagtaaaacaggtccagccaggctcagtagctcacacctgtaattccagcactttgggaggccagggcaggattatttgagtccaggaatttgagaccagcctgggcaatatagtgagactcgtttctataaaaaatttaaaaaaaaatagccgagcatgatggcacactcctgtagtcccatctacttgggaggctgaggcgggaggatggcttgagcctgggagattgagtttgcactgaaccgcaatcgcaccactgcactccagcctacagggctacaaagtgagaccctgtaaaaacaaaacaaaattgaggcctggcctttgaggtgtttgttttatggtcttaaagaggtaatcagataataacattacgtaatatagttatactgcagtgtagtctgtaagagtctttgaggaagaacagagggtcatggaaattcagaacaaagagatatctctgggccgagggaatcaggagacggttaatgaggaagtgtgcttgaatgatacttggtgaggtttggcatggtagagaggagttcagagtttctctgtaaattctcataggcccctgttttttccctgttacgaacttttggactcactatcctgcattgaaactgcgtgtttgctcagcaaccgcggagcacactgtgggccctcagtaaatgtttaagtgaatgcatgaattcctggtagaagggctgtttctggaaatctttgtgctcagcacttatgaggagtgcatctaatacatccctaacttattttgttatcagagccttaaaagacagcgtatcagaccatgtggttgtatagttaaggttcagtgtttcaaataagagcagtcattgtgggcgcctcgtttttttttctagctactcgtgtcttctccggcagatggtctaacggctggatagaggcatatttttagtttgaatttcctgcgcttacagaatggttttatctaatttgtagctactggggttctttattctctggggccacctgaaggctttcaaacacagtaataagccctcctcgggctgggaaacaggaagctgtgttttaaatgccgtgatcactggattaaaggaaacatggctccactctgttctcttgccaggtggaattatttttttctttatgatggttccaaggtaaaggaagaaggcgatccaacaagagctggcatttgttacttttatccttcccaggtaagccacacagcattttattgttcagtgaggatcccagtgcctccaagtggtgacttttcaaaagtatggggtttacattaggacagtttggctaatccagacaatgacatttctactgtcttattcttagttgtactatttcttgttgttctggtcttaaaatttccaggcagctcggcactttcatcgtctttagctttctatttccatcatgatttttgtctgcctccctctacccccaattttttgatcagcttggtttttaaaagttattattctgctgggcacggtagtttatgcctgcagtcccagctctttggcaggctgaggtggatggatcacctgaggtcaggagtttgagaccagcctggccagcatgatgaaaccctgtctctactaaaaatcccaaaattagctgggcgtggtggcacgctcctgtaatcccagctacttgggaggctgaggcacgagaatcgcttgaatccaggaggcagagttgcagtgagcagagactgcgccattgcacaccagcctgggcaataagagtgaaactccatctcaaaaaaaataaataaataagtttgtattcaaacatatacaaaaacagagaggcaagtatcatgaaccctcatatgccatcagtagcttcaacaattatcaatactttgccgatttttttttttttttttttgtgatggaggctcactctgtcacccagggtggagtgcagtggcatgatctctgctcactgcatgctccacctcccgggttcatgccattctcctgcctcaacctcccgagtagttgggactacagtcgcccgctaccacgcccggctaatttttgtatttttagtagggacggggttttaccatgttagccaggatggtctcgatctcctgacctcgtgatccacccacctcagcctcccaaagtgcagggattacaggcgtgagccaccacgcccggcaatactttgccaattttatgtgacctatctgaacctcttcttctctctcttttttttttcctggagcaaattctagatgttgcgtcatctcaccagtatcaagcaacatctctaactgaaaagggcattattttgaacattaccacacctaacgaaagttacagtaattagtaacagtaattccttaatattacctgatacccagactgtattcaaattttgccttattgtcttggatattacttattctgctcttccttccttccatgcacccatacttccatccttccatttctttttctttttcctaataaggatccaaacagcatccacatattctatttggttattttgtattttaagtccttttaataacagtcctcacccagccactcatctttttccccctcctctatgccattgaattattgaagaaaccaggtcatatgtgtagtagagtgttagaatgtcccacactctagatttggctgatttgttcctcatggtggtgtcatttaatgtctcctatccactgtatttcctttacattagtagtaagatctagagtcttggtgaggttcaagctcagttttctaggtaagaattcttcatgggtggtgtatacatttcctgtgtatcccatactgtctggctgtcctgtgcgttagttaaggctaaggttgattaggagattctgtacattccctcctgtgactgtgctctgacatggatagttggggttaatctgcatccctctggccactccgtatgggggatttgagtaggagtgaaaggctcatgcttctgctaagcatatgcctataatcctagcaacagaaatgcggttctgtgcagtcatcgcatgtgttcctgctgggtgttctcttagggttcagtcatctcaggtaggggttggcaaactttgtaaagggccagaaagtaaatattttaggctttgcaaggcacataaggtttcaatcacatgttcttctttgttgtaacctttaaaaagtataagaaccattcttagcttacaggccataggaaaacgggtaacagactggatttggcttgcaggctttagtatgctgtaagaaatgacttaagagttcaagaatttcagcttcctatctggaatgtgctcctttcccacagaccctgctagaccaacaggagttgctttgtggacagattgctggagttgtccgctgtgtttctgacatttctgactctcctcctactcttgttcgtctgagaaaactgaagtttgccataaaagttgatggagattacctttgggtaagttgaatggcagaatcagtgctgaagtgttgcaatgataagtttaggaagttatgttgtttctgagtcttgaatttagaattatctgcccccaccaacctcatccatgtactgtgtttagtaatcaccctcgcttcctgtggtactctctgcaggttttcatcatcaagtgctttccaaaacatttctaacatattctgcattgcacacagctggtttctcctttcctttcaaagacttaggccaacttgtggaaattctgtttactctgtgttgtaaattgagtttttatcatcatcttttcttctccatgctctctacacttactgggtaagtgacccagaaaaaaatgatagatatatgttaggttttagagaacccattaaaaaaaaaaaaagaatattgcttgagtccaggagttcgatatcagcctgggcaacatagtaagacccccgtctctataaaaaatttaaaaattaaccgggtgtggtggctcatgtctgtggtcttagctactggggaggctgaggggaggattgcttgagcttaggagtttcaggctgcagtgagccatgattgccactgcacgctagcctaggcaacagagtgacaccctgtcttaaaaaaaaaaaaagaataaaaatcattcctttacattctaatagtagcatataatctaaagtgctgtttcccatggctacatttattttaaggcttcctgaggtaaagggatgcttaagtgtgggatgctatattcaactttgtaggtattatttccaacattttattacgaaaattttttaaagtactgaacagttgaattttacagtgaatactcatatacctcctcaattctacagttagcattttattatagttgttttattacctatctattcattcctttatcctcccattaattcaaattatttttattttattttattgagacagggtctcaatctgttgctcaggctggagtgctgaggtgtgaccttggtttactgcaacctccgcctcccaggctcaaacgatcctcccatctcagcctcctgagttgctaggaccacaggcatgcaccaccatgcccggctaattttttaaactttttctagaggcagggtttcaccatgttgctcaggctggtcttgaactcctcagctcaaggaatcctcccgccttggcctcccaaagtgctgggattacaggcgcgagacactgtaacccagccccaaattattttgttacagttttcaaagtaagttgcacacattagtgtactctccacacagatactctctctatcatgcatatcatcaactaaaatttaatgtttggggctgagcgctgtggctcaggcctgtaatcccagcactttgggaggccaagacagtcggatcacctgaggtcaggaattcaagaccagcctgaccaacatggagaaaccctgtctgtactaaaaatacaaaattagccaggtgtggtggcacatgcctgtaatcccagctactcgggaggctgaggcaggagactctcttgaacctgggaggcagaggttacagtgagctgagatcgcgccattgcactccagcctgggcaacaaaagcgaaactccatctcaaaaaaaaaaaaaaaaaaaaaagaaatttaatgcttgtttgtggttacatgctttacaggcgtctgtcttgccacttaacacttgtgaaattcgttcatgttgttgcatctatcagcgttcgttccattttattatcaaacagtattccgttgtctgaatatatcacaatctgttcttcttttgatggacatctgaactgtgtccagttggggatattaaggataaggcttctgggaacattcctatacaagtattttggtgaacacgtgttttcatctctcctgggtaaatatccagtcctggaattgctgggtcatagagtaggtgtatgttggattttataggaaactgttagaacttttccttcagtggttgtaccattttacattcctaccaagaatgtatgagaattccagttactccacctgctcatcagcattgagattgacagtctgttcatcttagccattctgctggatgtgcagtggtgtgttattgtggttttagtcttcacttccctgatgactaatgatagtgaggccttttcatgtgcttaatgaccacttgaatatcttcctttgtgaagtgtccattcaaagccctgcccattttttaaattgggttttatttttttaattgaattgtagttctttttatatcctagataccagttctttgtcagatacatctttttaaaataatttctcccagtttgtggcatgcctgttaattttcttgttgtcttttgatgagcagaagtttttcattttaatgaagtctaacttataaattttatctttttatggttattgctttctgtgtcttgcctgaaaaaaaccactgcctactccattggaggagatagtctcccttttttattttttgtaagaatttgatagttttagcttttaaatttagatctgtaatccactttgggttaatatttgtgaatggtgtgaatagaggtcaaggatctttttttttttttccacctggataaccagttcttccagcatcattgttgaaaacattttcctttccctattggatttccctttggttcctttgccaaagatcagatgaccatttaagcgtgggtctatttctggactcttttcggcttttccacagatctgtttgaagattctgtgtgagtaccacactgtcttgatttctatagctttatagtaagtcttgaaaccagatagtataagttctccaaccttattctttctcaagatagctttggatatttcaggttctttgtgttttcattgtacaatcagtttgtggtttctgaagaaaagctggtgggattatgattgcaattgcattcagtctgttcatcaattggaagaattgaacacttcttacatgccagactgttgtaagctcttggattacatctgggaacaaagcaaagatccttgtgctactgtagcttacattcagagggaatttttgtttatttgttttctgtcagggtttattagtttaaatatctgatgattcccttaggacagattcctagaggtagaattactacatcaagtaataggaactttttcaggctctttaaacatatgaccagataactttctaactcagcaagtacttttttttttttgagacggtgtctcgctctgttgccaggctggagtgcagtagcgcaatctcggctcgctgcaacctctgcctcccaggttcaagcgattcccctgcctcagcctcctgagtagctgggactacaggcacacaccaccacgcccagtatttttagtagagacggggtttcaccatgttggtcaggatggtctcgatctcttgacctcgtgatccactcaaagtgctgggattacaggcatgagccaccgtgcccggccaagtatttatcttctgtggaactaaccactacgctcagcattttggagatctaggactgggaagattgcggtcagttcttgctcttaaagcactctatccagctggagaaacatgatggccattcatgaaggagtttgagtcctgtccattgtttgtaatggaatccagattaaacatctactgtccaaataacagtcctaacaatgcaagggtcagaaaaaaggtcagcattattggctcgaggtaatagaacagacctcatggagatactgaaattggtggtgggcactgaaggttgtaagttctggggaaatgaacaataaggaaaaggacatttgagattggaaaacatgaattgaggtacagaacttacttgtccatggagattaacttggccagaatgaagggtgtggactcagggacaatagaagatcaatttcgatgggccagtgaagtcaggtaattgagagccctggatgccaggattctgggcttggactcaaagagaaggaagatgcttgtcttcctggtttctctctttacaggtgctgggctgtgctgtggagctccctgatgtcagctgcaagcggtttctggatcagctagttggattctttaatttttacaatggacctgtttccctagcttatgaggtacaagtatggggttgaggagtcttacattgggcctctttataaaaaccggtattgccagaatgcagcacttactctggggtcttgtatacttcatataaacacattgtgtctggggacaaggtcaggagctcttggaggcccctcatatgcctttgggcctagtggcataggtcacatttattccaaatgtttatccccatctcctccctgggatgtttagaaagcgcaggccctgcttgccacccccacgcggcaggcgccgtggatctgtgatgggataggtttaaaacaggtcctcccttccggtcagtttcctgtgtgaggaacaatttttgaggtagttgggactctggccaaagaatctgtccctcaaaatctcagatattgacctgaggctctttctgttttagaactgttctcaggaagaactgagcacggagtgggacaccttcatcgagcaaattctgaaaaacaccagtgatctgcataagattttcaattccctctggaacttggaccaaactaaagtaacattttcatcctccttattcattttatatgtaagactagggcttctggatacttttttaatattcctgaagtgaactatatctggaaaagtgagtagaatgtcacttctcaggcagggccatgacacggcaggtcacctctcagcctcatttcccttatccaaagaatggtgtcagcatacctgccttcttgaactgttttgatgatcaagtgaagcagtacctcaaatgacaccaagtaaatgctcagtaaagggaattagtattttgttcatgcctcagaagtgttgaactcagtaatctgaaggccgcctctcttgatattcatatcatatgatctagttattctcagcatcaaaaatgcccagcatgaacatttcaaaaacaaggttgctgtctttgagagagaatggttgggaactgtttttgtatctctgagccgctccgtttgcggttggcactcagtgaaacctaggctgcttgtgtggctggcctgaccacctgtgctgccccattaagagccagctacctgagccctgactcacagccctctcctgtgtctcactgcgatagtaaataatgtccctgtagcaggggtgtagcactgtggctcagccttcacagagcatgactccaccagacatggggaagggttttccctgctccagtctggaaaacttcctgtagctggccccagagctttatagaatggctggctgggatggcacagtcttgaggctatgaagaataaacttcttaatgtgtcagcagctccggaggctccattaacactagttctaacagctggtggatacttgctggttctagctggcaggtggaagtctgaggaggctgctggttattgctggctcttcctgaccaggtccagatgcttttcttgtatttttagggacttctaggcccctgactccatacaaggaatgtggaactgaggcatatttccccgagtgaaagagcatgatgttttcattttatgtgatggaatagagtcatggaacctggtcagacatcaagccacctgtatcaccatggggattgtgcttcagaaggaaagtggaggatagggtaggtgggtttcacctggtaccatgacatgtatttataggatacaccctcctcttctgctgccgtgaggtcttagcattgtcagggtagacagtcggtctcccaggccatctactttgacccctttgaatagccatatgccatatttgctgcaccttctagcttctggacaggcctccttgttctaagaatttggcatttagtggtgtcagcagttctgagtatagagaggtagaatagtcccaagccatggcacagctttcactgtgtgacacattctccttttccaggctttgagctacaccctgtccagctgttctgtacaaccctttccccttttctcccttcctgattgtgagcatgctgatgggtgggcatgatgcctcttgccctgcacaggtggagcccctgttgttgctgaaggcagcccgcattctgcagacctgccagcgctcgcctcacattctcgctggctgcatcctctataaaggactgtgagtaactccagacccctttcttccagccccattcccttgctgcacaactgaccatcagccacctccagatcacagtggggagcccagtctctggccagttccaagtgggctggttcggcaaatatcaggtagtttagatttgactcagtttagaaagacaggtgtgtacctgtctttgagcaaagctgagaaattggaaatagttgtgttcagaaaagagttaagaatgtccctataattctcagtatggggcatgctggaatagttgtcagtctgcaaaatgctaatgcagagtcccgagcgttgccagcagccagcactgtagtcaagaggcatggaaggggcctgctgtgaccctcctcctgctgcccagagaccctggtgtgcttgcctcagctcagctctgcaaagcagccttacaggcccttatccagctgccttcaagcctcttggctgggccagtgtcttggttggcctctgagaattcacttcacttcttcatgtagttggagggcttcttggtgaatctgagtgcccaagagccactctaggtcatctaaggcctctctcctcatggagggtttgctgtcacagcccagggcaggcagggccattgcgctgtgcccggagcttcctgaggagcaggcaactactgtgtaaatggagaagcactgaggctctcgcaggggcccttgggccagacaggctcggccccagatcctcccttctttcgccagccatgcggccttgggcaagttgcttagcctcaattttctcttctgggaaatagacatcccttgtgaagaatgaaatgagatgacagatgcggaagaaccgagcatagaccctggtgggctttgcactcttcttccttgccccggttcttatcatgatggttctgaatcagctgtgggatttccaagttcgtcagtgacatacccaccaaagacagtattttttttccccttttctcattttgcatttcttaaatgtatatatatatatttttttttcttttttttttttttgtagggacgaggtcttgctatgttgcccaggctggtctcaaacacctggcttcaagcgatcctcagcttcccaaactgcttggattatagacataagccactgcacccagcctgtatttacattatacggctaatacatgaatacattttcactgtaaacaaatcaatcaatagaggaacacacagagcacaatttaaaagccccccttctttcttcaccatttttgtttgtttgtttttgagacacagtcttgctttgttgcccaggctgtagtgtagtggcataaacacagcttactacagcctcgacctcttggactcaagtgatcctcccacgtagctggaacaacaagcacttgctaccacacctggccaagcttttgattttttttttttttttttttgtagagatgggatctcactatgttgctcatggaggtctcaaactcctaagctcaagttattctcccacctcagcctcccaaagtgctgtgattgcaggagtaagccactgtgcccagcctctccctcactcttaacctgtcctcaccattggcagtttggtgggcatcttgctctttctgtgtgtttgtccccactggtacatgtatgcatatattgcttttgtttatttttgctatctccttaaataggatcacatggtttctcaacgcatacagtgaagatttccttaccggttcatatgggtctacctcattcttatgaggactgcatactttttgggattctggctgtgttgtgctttactgtcttgttgatgaacattttggtggtttactcattttttaattgtttttaccattctccctgtaatgaatattcttacgcatacatcttggtacaagctgagtcaaagggtttggatattttaaatgttggtaggaactgccagagtgccctctgtaagggttttaccagttgaaactcccaccagccaagtccccaagatcctcgtcaacacgggctgttaggcatctttaaaatttggagtgttttggtgtatttcgtctcatggtgttcttgttctgtgtgtgacctcctaggattgtcagcacccaactcccgccctccctcaccgccaaggtcctgcttcaccgaacagcacctcaggagcaggtattgtaaagtccacccacctggctggacagcatcccccagagcactggtcactgagcctgaggctggagggatcaggagcagaggccgtggagcagttgtttcacttggtcttgtcaggaccccaagtcctccaatgtcattctcctcagtagtgaagccattggtgaggctgaaagaaaatgttttcttccacgagctaggcctggatagttgttttttcttcaaaccaaggaaatcttggttgaattcgacttcccataagaatttgatgtctctttatgtcaaagagatgttagacttttcagagacagactgtaaaggatgtgtctttagaaagatttagggggttgggcacggtggttcacacctgtaatcccagcactttgggtggctgaggtgggcagatcacttgaggtgaggagttcaagaccagcctggccaacatgatgaaacccatctctatttaaaatacaaaaattagctgggtgtggtggtgcacacctgtaaatcccagctacttgggaggctgaggcaggagaatcgcttgaacctggcaggcagaggttgaggtgagctgagatcgcgccactgcactccagcctgggtagcaagagtgagactctgtctcaaaaaataaaaataaaaataaaaaaataaggaaaacaaactcttctaaaatacttccattttatatttatttaattgtttttatattgaaaaaaaagccatgcatgctcattgagaataaaattgcccatctttgaactgtacagggatagccactgccagcatctggcatatctccttccagtcctttttttgttttgtgtatgaagctgtggtttccagcgtatcatgaggctgtctttttacatgtattagtgaacaggcatgtaaaatgctggtagggctctattcagcctcctcagccactgtggctatgggtgtcaattcaagtagcctttctgggaaacactttgataatgagaacgttaaggatgccctttatttttttcctaataatttgacttctaggaatatatcttaaggaaataatgtaactgctgaaaaaaatttatactcaaaacttgatcacaacaagctttatgaaagtgaaaaatcagacaaaacttgaatgcttaaagtaggaggtggcaaattatggcctgtgggccacctgcctacaaatgaagttttatttggctgcttttgagctataatagcagaaccaagtaggtgggacagagaccatatgccctgcaaagccaaaaatatttactgtcttgtcttttgcacagaaagtttactaattactggtctaaggtaggtaaatgattaatttactcatatcacttaaaccttcataaaattttaatcagccgtttaaaatggccaaagatgttttagtggcaggaaatgcgtgttactgttttaagcagaaatatgaaattttatatagtgtggcctcaaaagtataaaaactgcataggcttaaggaaaaaatacccaatattaatagtactagcttggggatgagggattgtatgtgattttttttttcaacgctttgtctagagtaaattgaggttaggcttagtaatctaaaacatagttttttaaaaatcaccaaaaaaggaagaacaccatatcattctaagattgaaagtcattttggctagaagagcagttcttgtttggtttggttttgttttggtgggttcttttggaaccctcagattgaaacgagagatgttttcatttttgagaaaatcatcaggttttaggccctgattgtgaaccagaacaaacgagagattgggtatagcattttgtttaagtcaaatcctttatcgtgagagtcacagtattttgacatttttattataatggaatttatgtgaattctacatcagggctgtggcagatgtgactgtattctagaatatgagttccccaaaggtgtaaaagagaacaggaatcctcaattttattcccagaagggagagagactgagaaaatcagaacgtagagtgtgatgtgagtttgggtggagctgctgccttgcagcctgtgtgggcccaggttcttgcttcatcccagccatagtgggagccagcagcttgggggagcttctgttccatctgcttggctcttagcatgtggttgggacaagctttctgggcctggctaagttttatgaacagatggcacagcaaattcctgatggttaggtcaagaggagaatgtggtgcccagcgccaacttctgtgtgtgtttgttttcagagactccctacgggagaggatgccccgcaggaacatggtaagtagtgaggcgcatggttgcctcttgagaacggcggtcttttatgctacctacccctgtacaagttatgcgaaggaaaccaagccatctgcatgtttatttcctctgctcataataggaaaatggatgttatggagcttcaagaatcgagttacccaccagaaccctaatggtaaagctatgattttaggcatgctgtcaaatccctgctttcagaccctccttaacttcatattgtgagactgctcggtcaagtgccaggagattgtgattgggagagggtaaggcaaacagcgactgccagaaagaccttttgcaggatgtggaggcgtcctcaggagagttatttcgatttattctgaagcctgagttggagcagatccctttcttagcttatatcttcttcttgtaaaagtgcttttcaacctttctctcccgaacatcttccttctccaaagctgggagtcatgttgcctgcagggactctttccttactgggcccaggagttcgaggtgcagtttggcaacctgtgtcctggctgaggaatgcactcacagcacccctttccgagcccacgtgtgggttggatgcatcacgccagtgcagctattgccccgctgccctctctggctcaggggaaagtcctgttcatattgctttgcaattccaggagcggcattgcccccgaatgtccagattatccctgtttttgtgaccaaagaggaagccattagtctccacgagttcccggtggaacagatgacaaggtaatggagtgcacagagagttaaccttgcaccacacctgagggaccccatcgcgtgattggttaaaaaacaaacctctgatacatcccatcgttccttaattccatcttccccatgccctgtcttgtaaaggagcatctgaatcttgagtttgttaagaaacagagtggcatagagagatgacattggctttcatatcccagctctcttacttataccagctatgggaccttgggcaagtccattccctgcctgagcctcagttttttcatctgaaaagtagacaaaatagtatccctttcatgagttcattgtgacacttgaaaatagtataggtacagcacctagtatagggcctgatgcgtaggagaccttccagatgtgggtcagtcttattcagtgggctctgccattttcagtaggtgagtctggtgtcactacgtaaagccccaagggccagatgttggtgtatttttactcttgtgatttaactctggtggcctcttaggctctgtggcctcaggcacccccttgtccttgatgcctgtgctttagtcttcactgtggaagggcacttgccctgcagtctgtcaacgtgccccttccttacatctctcttgtttgccaggtctctagcatctccagcaggactccaggatggttcagcccagcaccatccaaagggtgggagcacatctgccctgaaagaaaacgccactggccatgtggaatccatggcctggaccaccccagatcccacatcccctgacgaagcttgtccagatggcaggaaggagaacggatgcttgtctggccatgatctggagagcatcaggcccgcaggactgcacaactctgccaggggtgaggttcttggcctcagctcctccctggggaaggaactagtctttctccaagaagaactcgacttgtctgaaatccacattccagaggctcaggaagtggaaatggcctcaggtcattttgccttcctacatgtgcctgttccagatggcagggctccttactgcaaggcatctctcagcgcctccagcagcctggaacccacgcctcctgaggacacagccatcagcagcttgcgccctccctctgctcctgagatgctgacccagcatggagcccaagagcagctcgaagaccatcctggccatagcagccaagcccccattcccagagcagaccctctccccagaaggacccgcaggcccttgttattgcctcgcttagatccaggacagagaggaaacaagcttcccacgggggaacaaggcctggatgaggatgttgatggggtctgtgaaagccacgcagcccctggtctggaatgcagttcaggctcagcaaactgtcagggtgctggcccctctgcagatggaatcagctccaggctgacaccagcagagtcctgcatggggctcgtgaggatgaatctctacactcactgcgtcaaagggctggtgctgtccctgctggctgaggagccgctgctgggagacagcgcagccatagaggaagtggtgagtgtcctcagaccttctcctgcccctctgcggcctctgccgatctcctgtgcttccctcacagcactgtgccaacacccagggaagagataaaggctcagccctcagttgtgtgaccctgggcaagacgttcttgtttagacgatggaggtattacctgcctctgtgggtttttgtggggggtaagagtgagtcaagcgcatagcactggtggtgcattggcatccaacaagtgttggttctcttcttccgctgtttctagttttgcagagcgcaggccttggagaaagggaaggcctgagatggaatcctggcccttgtcctctagctgtgtgaacttgcccacagacctttgtccccttgagccttggctaactcctcagtcacgtagggatggtggtagaccttcctgttccagatgcagtgagataatgcaggcagagactgcacacgtacgtgcatgtgttgtgccgcccctgctcatggcctcatttcctagcctggacagctctaggttctgtgtcagctggaaactcctccgcagtgtgtcacagcctgggttgggagttccctagaaacccagtgtttccctccatagccccagcatcgtacctgatctgaagctccttcctagaaggctgggatgtctgaaatcctgcctggctctggagggctcttaaactattgcagccccttccccgcttagaggcttagagtggtaaactgaccttccctggggcccacgctggagattcgttgctatagtaacagccttgctttagtaggcagggaaagtggtagcagtaagaacagcaggttgaaattgctgcagggcaaatggtgtcttggggctttccttgtttttattcttaaatgtgtattattctaagctgatcttactatcatgcagggcttgtgaccctccataaatgagctagtcaccttgaaatacagaagaagagataagactgcacagcagcttccttgcacagagctcctagcaagagaatgctctctggagctgtcaggcttctctgtgccctttccacagacgctggatcactgagttatggctcatttgcttcctgtatccccattcaccatagctaggagtgactatccatctccttcttatagcagtgcggggagttgtggctgcagtgttaaatgcctcatctccctgccaatgccttggttttcatggtctgttctgcacagtgtcgagccttggaagtgtcattttgaagggcccagtgtttgaatgcaataaagtggatataatacctctctttttaccttcccccacaaaaaggaaaaaatagcccaggctgctctttgagatgtattctgcaccaactatatgtgaaatacttcgcatctctcgttttagccaagccttagaacagttctgggaaggaggcattgtaactcccattttaccagtaagaaaacagcctcattgagatgaaaagacttcctgcaagtggcaggtccagaattcttgcttgtttctggttccccaccccagcctctctgtccccccactgccctgcccttgcagtgatagctgggaagctgaagaaagggggtcagtgtcctgccttctgtggctcgtgctctatggccatatcccctggtttgtcaaggtctatccatgctgttacgacatcagcctccatgggcttctgtggaaagcagggtttgatgctggctaggccccgggaaatagactgcagttttatggaagagaaaaagctaatcttttcttcttttttttttttttttttgagatggagttccgctcttgttgcccaggctggagtacaatggtgtgatctgagctcactgcaacctccgcctccccggttcaagcggttctcctacctcaacctcctgagtagctgggattacaggcatgtgccaccaggcccggctaattttgtatttttagtagagacggggtttctccatgttggtcaggctggtctcgaactcctgacctcaggtaatctgcccgcctcggcctcccaaagtgctgggattacaggcatgattgcacccatccctgaaaagctaatcttttctagtatggagtgactaactttgatcagcccactggtttgagagtgggtttgttaatcagacccaaaggatttctgttttataatcaggaagaggtgtttgattgcctttttgtcccagactagccttgaaaatactttatctgatttccctgcagcccctctgctactgtctagaaaaaccaaatacccccagttacggtgagcacaccccttttgcaagggctccttaatgatgttacatactgccaagctgcccttgtgtcatttggctgtcttgtctttgggtggatcagcttccacagggagtaggggtagggtgaggggcagcaggggttgggattggtgaaaggagccctgggtggagcagccaggagggttgggattggggctggaattccctcagagggagtggaataggctcacaccagggggcagcatagagccgctgatagtccattactcagaccccaagataatctccttgaccttcaaacacagtgatcagattaattatttatcactacaataggacatggagcttctgtgtacagtacatgaggcttgaagttagtgtgagagtgttgccataaaacattttatgaaaaaacaccttcccccaactgggaaaccggtatctctaagtgaatgtgtgttccatgcattgctcctgctgcacgctgtgtcacacactgacatttgtgccacttgctttcgtgtgcactagaagtcagaggacccgggaattagcctcagctctgtgttgcctagggctgttgtgaggatcacattatgtagcagtatatatcggtggctggcaaacattttatgtaaaggaccagaaagcaaatattttcagctttgcacagcttttcagctctgctgttgcagtacaaaaacagccatagacagtatataaatggtatgactgtattccagtaattatttatggacatggaattggaacttcatataatttgcacatgttacaatattattcttttgacttttttccccaaccaagtaaaaaaatataaaaaccattcttaggtctcagactgtacaaagataggcaacaggctggatttagtttataggctagagtttgctgacccctggtatgtatgaaagcacttggttatcagtaaaaattatccacatgtcatctgacatagcatcttgtgattaactgtgtttttatggttaagtgatcctatcttgagtgcaagttaggcagaagattttggaagcaaagctccgtgcctgtggggaaacagtttttggcatggctcactctctgttcttattgtttcttcctctggacaccagctcagcatggaagggatgactgttagcacgttcttgaggtccaaaaactttcagtgaggctgtggtttgacttcatcaggtgaatgcttatgtgtgcccgtgtgcgtgtcggcacatgcacacacacacatctgttcaaataagaggctcagtgttaaacgcagtgttggtcaggctctctcagtgatctgaacatgagatattatgattgtctttcctgagcacatatctttttacatagctctgcaaccttggtttaaaccaaatagctcataaattggcagtgcttggcattggatgtgttcatttattcattcatttagtggattcatttattgagcacctactaggagtcagacactctactaagcattgaggatacaaaactgagcgcatagaaaataactttgtatgtcacacctattgacttgaaatatcatttctgagactttcatacaggaaaactgatttaacaccaatatactcccaaaataacatgtaagcttcatgacatttacttcagaagcattctgtttgcatctctgtactttttatatgcacttatttttcttacatagctgttgaaaaatagtccacaaattatctgtgatctctaaagagacaccatttcttttatatgattattttcatttccttgactttataaaaagactctgcctcaggatagcactttagagtttacaaaggacttttggatgtgtcatttcatttaagtcactcaatagtcccgtactgttcccattttgcagttgactagaaaaatgaggcacagaaaacttggtaacttgctcctggtcatttgactaaaaagaggctgaacttgggatgttttttacctgggaactgcaaatgtttggggacagtgaccttctttcttgtggctgaagcaggcccaggaaaccccatttcagaccaagcctattatgacaggcctggcctactgagtcaagccctcagtggagcttgaggaacactgcacagccattaaagaattatatgatagaatatttaaagacgagaaaagcagttcatgctgtgttgttaggttaaaaaactatcagtcattatttatgatttgatctcatttttattttacagaaaaagagttacacaaaacagtttagtccagtcttttcaattgtacttaaactttatctccttggaggtttgtaaaaatacaggtacttgaacccatctccttgacagtcgtcctcaactgtattcctcttctgaaccatcaagtgcagaaagctgtttgactgacactcagtccttccaagaaagccaggaccgtgctaggtgtagcagagagaagttaccgtgttacatccagtgagggacttctgtacccagggccagtgagaaacaatgcgggatggtcccaggctgtttgtattgtgaaatcatgcagcctgggtaggaaagccatggttaaaataagatacaccacagtggtgacagtggctattactggatggtgaaatgatgggttgttttcttgttatttttttgctcatctcttttctaaatctcctacaatataatcattatttttaaaaacattagaacataagggtgaaagaaaaatgttggtgagagtccattttgctggatcaagtaggcagtaagatactccatgaatgatttttttttttttttttcgagacagagtctcactctatcacccaggctggagtgtggtggtgcggtctcggctcactgcagccttaaactcctggcttaagtgatcctcctgcctcggtctcacaaagcactgggattacaggtgtgagccaccgtgcctggctggaggattttttttttaactaagtctgtggttaactagccctcagaaggcttgctgaggtcagccctacaagcccatgaccctctccccctttgcagtaccacagcagcctggcttcactgaatgggctggaagtccacctgaaagagacgctgcccagggatgaggcagcctccacgagcagcacctacaacttcacacattacgaccgcattcagagcttgctgatgggtaagaaccagccaaggggcctggggcgacggggatgccagattctagatgggtggagatgagaacttgagccccagcatcatgatgacacggctgtgcacagagttgtctgacctgcgttcagggctctcttctcaccgggagcccagtcccactgagtgtggcgttcactgggcagacgcttctctgctcatgtgtctgtttttggcgtttcccagtgttttgagagaagttcatgttcacatatctgtgatagggtttgtctcagaatgttgagatccacacgcagaaaccgggtgctgcatcgcacagcggcggcagccgaagcccaatgccccgggcctttgtctctgccccgggcagccaactcatggccttgagccgtgctcagtccccgtgttcagtactgggcttcatggggtgggagggcagaaggtaactgtctgctcttcacaactctgtgtcctcttctggaagcaaacctgccgcaggtggccaccccgcaggatcgccgcttcctccaggccgtcagcctgatgcatagcgaatttgcccagctgcccgcgctttatgaaatgactgtcaggtgagcctccctgagtcgctccccaacctactctccacggtcctgctcatgggaaccacctgtggggcccaggcagcgccttattcctaagtagatgaaaaacattctagttactctccttaaggccttcctttgtcggttcctattgccgccatcatccactgttgtgcagtcacgtgccatggactttctggttcccttcctactttagacgcttggggtccagcagtgaaggaacctgaggtcctcaccatcatggagctacatccattactagggacggtggctccgtctccttgctagaaacagtgttgaaatattgttgtctttctaattacaaagtaatatggctgggcacagtggctcacacctgtaatctcagcactttgcgaggcagggggatcacttgaggtcagggttcaagaccagcctggccaacctggtgaaaccctgtctctactaaaaatacaaaaaattagctgggcagggtggtgggtgcctgtagtcccagctactcaggaggctgaggcaggagaatcacttgaacccgggtggcagaggttatagtgagctgagatcacaccattgcactccagcctgggcaacagagtgagactgcgtctcagaaaaaaaaaaaaaaaaaaaaaagtaatacgtgctgatcatacagtcatgcagaatgcttggaaatgtatcaagtaaaacattttcctctctcatctccatcacacaccaggaaataaccacattttacagtttggtatatattgctccaggttttattggtttttggtttttattttttgcacatataaattgtatttttaattattttaagtcttctagaaaataggattctactaatgtacaattttacagttgtcttttttcacattatgtcatagcttgaacacctccatgccagaagaaatattatgattattgtaatttacagtatttaaccaaccgaatttgtttttttctttctatatgcttctcttatgaaaccagaaagggagtttgggctttaaagatcactttataaaagcccgaggagactgggacctgagaatttggttgacaactggtaacagaaaataaagcaagttagcaggtcaagggcagtgctggcaatgtgtatattagtccacgtagtccttggaaccatctggtcaagggcattattttttatttatttattttgagatggagtctcactctcgccaggctggagtgcaggggctcagtctcggctcattgcaacctctgtctcctggtttcaagcaattcttctgcctcagcctcctgagtagctgggactacaggcacctgccaccatgcccagctaatttttgtatttttagtagagatagggtttcaccatgttggccaggatagtctcaatgttttgacctagtgatctgcccaccttggccttccaaagtgctgggattacaggcgtgagccaccacgcccggcttcaagggcattttttaaatcctcattttacagatgagaaaattgaagcacaaataggataagcagcttgcccagggttatattcttcttaagtggcagggccaggatttgaagcattttctccaactgttaagcacatgtatgacctttccacacacatttcagtgtcggggcagtgtggtccagtgtgaggggcatgggtggtggactgacagggagcctgggtgggtgattaggatggttctgattccctgtcacccgccacacttgagcgccaggtgttctgctgcctctcagcgtctccagccaatattccaatagatctttctgtcagaaatgtgtcttctctggctttaattcacagctgccccaggctggcaacccagaggcaacttgcatctacagtcactggtttgggaactggctgtgttgggggtgtgtgtgtctgttttgtgggaggtggaaacaagtaaaatgtcagcatctgctccaccaaccaccttgtggccctgcagtatgtcaccttccttagagctgagaggggtttagtgttgagacacatagctcaaggcatttgttgagagattatttcaataacagtaatagaaacaacagctaccatttctttttttttttaattttattattattataagttttagggtacatgtgctgtgcacaacgtgaggtgtgttacatatgtatacatttgccatgttggtgtgctgcacccattaactcgtcatttagcattaggtatatctcctaatgctatccctcccccctccccccaccctacaacaggccccagtgtgtgatgttccccttcctgtgtccatgtattctcattgttcaattcccacctatgagtgagaacatgtggtgtttggttttttgtccttgcaatagtttgctgagaatgatggtttccagtttcatccatgtccctacaaaggacatgaactcatcattttttatggctgcatagtattccatggtgtatatgtgccacattttcttaatccagtctatcgttgttggacatttaggttggttccaaatctttgctattgtgaatagtgccgctataaacatacgtgtgcatgtgtctttatagcagcatgatttataatcctttgggtatatacccagtaatgggttggctgggtcaaatggtatttctagttctagatccctgaggaatcgccacactgacttccacaatggttgaactagtttacagtcccaccaacagtgtaaaagtgttcctatttctccacatcctctccagcacctgttgtttcctgactttttaatgatcgccattctaactgatgtgagatggtatctcattgtggttttgatttgcattgctctgatggccagtgatgatgagcattttttcatgtgttttttggctgcataaatgtcttcttttgagaagtgtctgttcatatccttcgcccactttttgatggggttgtttgtttttttcttgtaaatttgtttgagttcattgtagattctggatattagccctttgtcagatgagtaggttgcgaaaattttctcccgttctgtaggttgcctgttcactctgatggtagtttcttttgctgtgcagaagctctttagtttaattagatcccatttgtcaattttggcttttgttgccattgcttttggtgttttagatgtgaagtccttggccatgcctatgtcctgaatggtattgcctaggttttcttctagggtttttatggttttaggtctaacatgtaagtctttaatccatcttgaattaatttttgtgtaaggtgtaaggaagggatccagtttcagctttctacatatgaacagctaccatttcttaaccactcacaatgtgttaagcactcacttaatctcattctttaaaacaaaacaaaacaaaaacaccaatgaggacacatactgttgcaacaaacactgtacagatgaaaaagctgggactcagaaatgttgaatagcagcccaggacacacactaggaagtaatagggctgggattagcacctgagtgtgtgtgactccagatccatgctcataaccatctggcctcggagccctcccacagggctgtgagaagagattgtcttgctgggccagtgggtgcaggagacactgaagcttggaatagggtgggatttttctcccttacagggaaggagagaattgagtgaggggagccttagcagtccctgactccaccctttctcactagatttgggggaaactgaggcccataatagttggagaggcaggatccagaaaccaggggggtttgtttaccttggcctggagttggctcctcccaggtggctccgcctctgtgtagtgccctcatccctccctctctgtgtccacaggcttcctgtcacttcgtgtcacatcccactcctgtccttcactccctctcagtctatccagccacccccagtgtggagagcagactagactcctttctcggacactgccattgcctcgtcatagaggcagggcagccccagctactcactctgagcctcagggtccttgtctgtgaaatgggaccataccaccactgcagagcttatgtgaggggcaaagcagagactgtatgcagagcacattgcatagctgccagtatgtcaaaaaagccagcactccacagttcctttatgcaatacttataactccaggatctgtggctgctgccactgtggatggtcccgccacggactcttccagcatctagtgagctgaaaggaaggaaagatggtattggcactgaagcctgaaactcagctgaagaaatagaattccgtgccatgacagctgcacatgccacattgggtgtcctgggtcctctgtgacaagaaccttactgaggtctctgtgtggtctgagattagcaccagcagcattggaccgttgccttctttcttcctccaacagaaatgcctccacggctgtgtacgcctgttgcaaccccatccaggagacatatttccagcagctggcacctgcagcacggagctccggcttcccaaaccctcaggatggcgccttcagcctctccggcaaagcaaagcagaagctgctgaagcacggggtgaacttgctctgaactgcacccaggaggtgactgggaaggagaaaaccagcaaaggaagctctgccttttataattgaaaaggcccctctattttatttttcttgaaaacattcccttttttaggaaccaaatgatatttgagtttttgttattccttttgcagattgggatgtgttttgggggcaggggttagttcttcaggtcggcagacccagagcacttgataaagaactgtatttaatcggtagtgttggggccgggacgggcttggctccctctctgccatactgagcctgaggtatttcatatctcctgctgttccatcccagcttgaattggtgccacaagcttccaagttggcattttttctagaacctgatcgtccactagcccagagtgtgtgtgttcaacccccacaccaggtggtggtaggcggtgtgactgcacagcgaggtgccggatctgtgagcaggccgactccactcccacgccgcaggtaggtttctccagtgcgctcttgctgggaggtccggatcgttcctgcagggaagcggcagcacacggagaccacttggttgaattctgttggaactctactcaaatctaggggcgtcttctttggacccacaatgggggcaagccttaataatatggaagggagtttgggctttagagatccctttataaaagctctgggggctgagccctgagaattcagtgacaacaggaccaacctgcgctgcctttgactacaagtgggccgtgcagctggttcctctcgagcgagtgtccctaaataggagtttacaagatgtctgggggtaaaagcactgtgcttttcagtggtggctgcgtgaaagggagcgacactcagctgtgtgttcctgggcttgtgtggtacttagaacctcagttctattacgttatagtcagacatttttttgacagtatgagacagactgcaggatgaaaatatttgtcaaaatcttaactgaatgtttactggaagtacttgagattccatttgagagttgtattgttaataatttcatgtcagtgaactgatatctgatgtttatgatatggtgtctttttcttgaaacaagcttccaagggctagaaataaaatagccaaaaaatgctggagttctgagtaattaaatggcagcatttttttgtgacaaaggtaagggttaagacagtgtgtgtgtgtgtgtgtgtgtgtgtgtgtgtgtgtgtgcgcgcgcgcgcgcgcgcgtaacgtgggcgcatccctcttttccttccctgggttcagtgtggctgggtaaggaccgtctgtttgtagggctgccaggctgcagcctgctgctccagggagcaccagctgcagctgatccaatacaccaagcctgtgtctccctcttctatcacctctctccaggatctctgctgtctcttggatcccatctgcctagatggaagaggatcctatccgaagctaggataaatgttgtcttactcctctgctatgttctcccagaaaaaattgattacaagttctctgctgtggttgctgcagctccaggaagtccccgcaatgtctcacgttgtctttgaccagtggtccccagtaccaggccagcgaagacaactttataatgtcatttgtgttgtgaaaattcttccactgacccaaaatggaaccgtacaaagcctatccgtgtatatggaaaagtctcatgcacctggattaactcagaaaaagtaaagtcctgaaacttca

SEQ ID NO: 15621 - DNA, 31754 bp, Homo sapiens
ggcttgccaggagctggagggggaggtaggcggggcggcgcgtgacctaaggcctctctgccgcgcgcgcaggtacggggcagaagtcgcaggtacccagctgctgcccacatttctggtccagagtcccgaaccccgagcactgggatgcctggctactccggtgggtgggcggcgctcggagcgcggggataccgaggggcgggcccccagcttagagcgtgacccgaccccgcctaatccttaggcgttcgcccaccatttcccagtcccgtagagctggggccagacaccgcacagccctagtgctgttaccagtcgctgcctgcgccccgggggctgcgcccagcagcttcctggcccttttccagccattagcgtccgttttccagccctgctgccccactgaggccccttcccacagcagtatcaccagccccagccccgcgttgttactattacttcccaggctaccagatccttttctgctcatgttccgacgtctcttcctactccagggccattattggtctcttctggacctttcagagataagagaggacctcggtagtgtagggcccagtcctctgggaacaagggatggggagttttaggctgctgtccttggttccagtaacagagataccccctccacaggcacccaaatatgctccatagaatacaatgagtgtggtcctgtggaggcccaatccaaaatatctagagctgagaagagatagagattttacaggccgtcaaatattcaatgggggtcgtctctagagacttttaacaaactgtattgtgtacccacagattgcagaatggtgagcaaacatttgagaccatgttgctaaagcattaagcttggagaaagtgacagtaagaattagacaatagttttgaagtgaccaagaggttgtcacatggaagaattagaccttgttttgtgttttcctgcagagcgttatccagactagcgagtgggaggcagatgtaaaatctggaacgcagattttagtttgttggaaggagaaatgtaacatagtgaaccacgcatctctggagggtgtaaagcagagacagccaaggtaatttttggaaaagagtgcaggagagtagagtaaacgatgccagggttccttccgactctgaaattccgtgatacactgagctgtctttctcttgtggaagtttgaaagccatttgataaagttctcttcattttttagaaatttgccctgctctggaattctgcatgttcaggttacttttggactgtcaagatgacagttccttaatttgggttccattattaccacagcaactggtttatttgtatagctgtccacacctagagcattttcaccctgtcatttgattttatcttccgtgaagcttgtggtgtgtttcccttaactgttcgagaaactaaagcccttactctgaagtctctgcaagcctccctctttgattttgaagcatgattgtcaccctcacagaaagctcttttgaaatataccattcgtttaatcctgctgggtcacatgctctctcacgagttgctgaaatatctattccttgtgtttatttcagagccaaggcactgatgtttgaactggaaacttcaaaacgtttaataagagtcttcaggatgggtttgaactagacaagctagaaatttctttagaacaccagctctagcatgcatctcccacttttggctttcctggagaggagcttgaagaggtggttctgcagacagccacagtgatacttaggaaaccagaggaatggatttgacttttctgctaggattctctgttatagtttctccctgagttgtaagaggcatggaaatatacatgaaactgaagaacctgcaaggaagggaagtggaactttccatgctgagtgaaaactaaccaagtggcagttgtgactgaaaacactgaaacctaccacgtccagattcactggattgggggatagaggaacggtcacagctagggagaaagaagtgataccggaaaagaaaacctaaatgaagagaatgaggatgactgcacagtagatggccacctctacctccacagaggcaaagtcagcctcgtggtgagtaacaaggcctgccatggcatagcttttgctgggctgttggttagagttttggggttaattgaaaatccccagccagattgtgttaattttattaacataacaataaaaatgccattttcctcagagcagctgaatcaagcacgtgagccatcgctctccaaagctaacatgttttaaccttgcaagcctctcccaatgtttgaatgagtctggcattgctgggagattgtagaaaagatagccacagcctgatcatgcagcgagctttgatgataatgtgaatattgtagtcttcaatttgcagagatgaggtatggttgcatttgagaattacagcatgaggagaggtctggccagactgggtatcaaggggtattactcaatgtctgtctgaaacccagttcccttctcaaccctaaatgcgttaatcctttcccataattaggtttagcaaacatcagtcatagaggagatgaaggtgaaaagcaggtttagctagaattagcaggatttagtgactgattatttatgtggaagtcaaaaagatggagcagttcaaaatgacacccaagttttctttcgtgtgcccgcacaagcagggatgctttcatcaagagaacgtggggacaggggaggatggggtgcacatggagtttctgagttggctttgaaacttttttgaggctttttgatctgagcttaccctgcagccagttgtacatccagccttaggtattgggaaagaggacagtgccaagagaccaagttggtgctttatttatttgtttgtttgtttttgagacagggtcttgctctatcctccaggccagagtgcagtggcatgatctcaggtcactgtagcctcaatcccccaggctcaagtgatcctcctacctcagcatcccaagtaactggaaccagaggcacaccccaccatgcctggctaattttgtctgttttttgtggagatggggtttcacggtgttgcccaggctaatctcgaactcctaagctcaagcagtcctcctacctaggcctctcaaagtgctgggattataggtgtgagccactgtgcccagccaagttggtgctttttcatcaggaaggcagggtgggagccatggagggaggcttcagagagggcatagatccagggaagagagcagatgacacattggtcccattgcttgtttatgctatagcctcataaatgtgttctcagagacttagaagtaaaacaggtccagccaggctcagtagctcacacctgtaattccagcactttgggaggccagggcaggattatttgagtccaggaatttgagaccagcctgggcaatatagtgagactcgtttctataaaaaatttaaaaaaaaatagccgagcatgatggcacactcctgtagtcccatctacttgggaggctgaggcgggaggatggcttgagcctgggagattgagtttgcactgaaccgcaatcgcaccactgcactccagcctacagggctacaaagtgagaccctgtaaaaacaaaacaaaattgaggcctggcctttgaggtgtttgttttatggtcttaaagaggtaatcagataataacattacgtaatatagttatactgcagtgtagtctgtaagagtctttgaggaagaacagagggtcatggaaattcagaacaaagagatatctctgggccgagggaatcaggagacggttaatgaggaagtgtgcttgaatgatacttggtgaggtttggcatggtagagaggagttcagagtttctctgtaaattctcataggcccctgttttttccctgttacgaacttttggactcactatcctgcattgaaactgcgtgtttgctcagcaaccgcggagcacactgtgggccctcagtaaatgtttaagtgaatgcatgaattcctggtagaagggctgtttctggaaatctttgtgctcagcacttatgaggagtgcatctaatacatccctaacttattttgttatcagagccttaaaagacagcgtatcagaccatgtggttgtatagttaaggttcagtgtttcaaataagagcagtcattgtgggcgcctcgtttttttttctagctactcgtgtcttctccggcagatggtctaacggctggatagaggcatatttttagtttgaatttcctgcgcttacagaatggttttatctaatttgtagctactggggttctttattctctggggccacctgaaggctttcaaacacagtaataagccctcctcgggctgggaaacaggaagctgtgttttaaatgccgtgatcactggattaaaggaaacatggctccactctgttctcttgccaggtggaattatttttttctttatgatggttccaaggtaaaggaagaaggcgatccaacaagagctggcatttgttacttttatccttcccaggtaagccacacagcattttattgttcagtgaggatcccagtgcctccaagtggtgacttttcaaaagtatggggtttacattaggacagtttggctaatccagacaatgacatttctactgtcttattcttagttgtactatttcttgttgttctggtcttaaaatttccaggcagctcggcactttcatcgtctttagctttctatttccatcatgatttttgtctgcctccctctacccccaattttttgatcagcttggtttttaaaagttattattctgctgggcacggtagtttatgcctgcagtcccagctctttggcaggctgaggtggatggatcacctgaggtcaggagtttgagaccagcctggccagcatgatgaaaccctgtctctactaaaaatcccaaaattagctgggcgtggtggcacgctcctgtaatcccagctacttgggaggctgaggcacgagaatcgcttgaatccaggaggcagagttgcagtgagcagagactgcgccattgcacaccagcctgggcaataagagtgaaactccatctcaaaaaaaataaataaataagtttgtattcaaacatatacaaaaacagagaggcaagtatcatgaaccctcatatgccatcagtagcttcaacaattatcaatactttgccgatttttttttttttttttttgtgatggaggctcactctgtcacccagggtggagtgcagtggcatgatctctgctcactgcatgctccacctcccgggttcatgccattctcctgcctcaacctcccgagtagttgggactacagtcgcccgctaccacgcccggctaatttttgtatttttagtagggacggggttttaccatgttagccaggatggtctcgatctcctgacctcgtgatccacccacctcagcctcccaaagtgcagggattacaggcgtgagccaccacgcccggcaatactttgccaattttatgtgacctatctgaacctcttcttctctctcttttttttttcctggagcaaattctagatgttgcgtcatctcaccagtatcaagcaacatctctaactgaaaagggcattattttgaacattaccacacctaacgaaagttacagtaattagtaacagtaattccttaatattacctgatacccagactgtattcaaattttgccttattgtcttggatattacttattctgctcttccttccttccatgcacccatacttccatccttccatttctttttctttttcctaataaggatccaaacagcatccacatattctatttggttattttgtattttaagtccttttaataacagtcctcacccagccactcatctttttccccctcctctatgccattgaattattgaagaaaccaggtcatatgtgtagtagagtgttagaatgtcccacactctagatttggctgatttgttcctcatggtggtgtcatttaatgtctcctatccactgtatttcctttacattagtagtaagatctagagtcttggtgaggttcaagctcagttttctaggtaagaattcttcatgggtggtgtatacatttcctgtgtatcccatactgtctggctgtcctgtgcgttagttaaggctaaggttgattaggagattctgtacattccctcctgtgactgtgctctgacatggatagttggggttaatctgcatccctctggccactccgtatgggggatttgagtaggagtgaaaggctcatgcttctgctaagcatatgcctataatcctagcaacagaaatgcggttctgtgcagtcatcgcatgtgttcctgctgggtgttctcttagggttcagtcatctcaggtaggggttggcaaactttgtaaagggccagaaagtaaatattttaggctttgcaaggcacataaggtttcaatcacatgttcttctttgttgtaacctttaaaaagtataagaaccattcttagcttacaggccataggaaaacgggtaacagactggatttggcttgcaggctttagtatgctgtaagaaatgacttaagagttcaagaatttcagcttcctatctggaatgtgctcctttcccacagaccctgctagaccaacaggagttgctttgtggacagattgctggagttgtccgctgtgtttctgacatttctgactctcctcctactcttgttcgtctgagaaaactgaagtttgccataaaagttgatggagattacctttgggtaagttgaatggcagaatcagtgctgaagtgttgcaatgataagtttaggaagttatgttgtttctgagtcttgaatttagaattatctgcccccaccaacctcatccatgtactgtgtttagtaatcaccctcgcttcctgtggtactctctgcaggttttcatcatcaagtgctttccaaaacatttctaacatattctgcattgcacacagctggtttctcctttcctttcaaagacttaggccaacttgtggaaattctgtttactctgtgttgtaaattgagtttttatcatcatcttttcttctccatgctctctacacttactgggtaagtgacccagaaaaaaatgatagatatatgttaggttttagagaacccattaaaaaaaaaaaaagaatattgcttgagtccaggagttcgatatcagcctgggcaacatagtaagacccccgtctctataaaaaatttaaaaattaaccgggtgtggtggctcatgtctgtggtcttagctactggggaggctgaggggaggattgcttgagcttaggagtttcaggctgcagtgagccatgattgccactgcacgctagcctaggcaacagagtgacaccctgtcttaaaaaaaaaaaaagaataaaaatcattcctttacattctaatagtagcatataatctaaagtgctgtttcccatggctacatttattttaaggcttcctgaggtaaagggatgcttaagtgtgggatgctatattcaactttgtaggtattatttccaacattttattacgaaaattttttaaagtactgaacagttgaattttacagtgaatactcatatacctcctcaattctacagttagcattttattatagttgttttattacctatctattcattcctttatcctcccattaattcaaattatttttattttattttattgagacagggtctcaatctgttgctcaggctggagtgctgaggtgtgaccttggtttactgcaacctccgcctcccaggctcaaacgatcctcccatctcagcctcctgagttgctaggaccacaggcatgcaccaccatgcccggctaattttttaaactttttctagaggcagggtttcaccatgttgctcaggctggtcttgaactcctcagctcaaggaatcctcccgccttggcctcccaaagtgctgggattacaggcgcgagacactgtaacccagccccaaattattttgttacagttttcaaagtaagttgcacacattagtgtactctccacacagatactctctctatcatgcatatcatcaactaaaatttaatgtttggggctgagcgctgtggctcaggcctgtaatcccagcactttgggaggccaagacagtcggatcacctgaggtcaggaattcaagaccagcctgaccaacatggagaaaccctgtctgtactaaaaatacaaaattagccaggtgtggtggcacatgcctgtaatcccagctactcgggaggctgaggcaggagactctcttgaacctgggaggcagaggttacagtgagctgagatcgcgccattgcactccagcctgggcaacaaaagcgaaactccatctcaaaaaaaaaaaaaaaaaaaaaagaaatttaatgcttgtttgtggttacatgctttacaggcgtctgtcttgccacttaacacttgtgaaattcgttcatgttgttgcatctatcagcgttcgttccattttattatcaaacagtattccgttgtctgaatatatcacaatctgttcttcttttgatggacatctgaactgtgtccagttggggatattaaggataaggcttctgggaacattcctatacaagtattttggtgaacacgtgttttcatctctcctgggtaaatatccagtcctggaattgctgggtcatagagtaggtgtatgttggattttataggaaactgttagaacttttccttcagtggttgtaccattttacattcctaccaagaatgtatgagaattccagttactccacctgctcatcagcattgagattgacagtctgttcatcttagccattctgctggatgtgcagtggtgtgttattgtggttttagtcttcacttccctgatgactaatgatagtgaggccttttcatgtgcttaatgaccacttgaatatcttcctttgtgaagtgtccattcaaagccctgcccattttttaaattgggttttatttttttaattgaattgtagttctttttatatcctagataccagttctttgtcagatacatctttttaaaataatttctcccagtttgtggcatgcctgttaattttcttgttgtcttttgatgagcagaagtttttcattttaatgaagtctaacttataaattttatctttttatggttattgctttctgtgtcttgcctgaaaaaaaccactgcctactccattggaggagatagtctcccttttttattttttgtaagaatttgatagttttagcttttaaatttagatctgtaatccactttgggttaatatttgtgaatggtgtgaatagaggtcaaggatctttttttttttttccacctggataaccagttcttccagcatcattgttgaaaacattttcctttccctattggatttccctttggttcctttgccaaagatcagatgaccatttaagcgtgggtctatttctggactcttttcggcttttccacagatctgtttgaagattctgtgtgagtaccacactgtcttgatttctatagctttatagtaagtcttgaaaccagatagtataagttctccaaccttattctttctcaagatagctttggatatttcaggttctttgtgttttcattgtacaatcagtttgtggtttctgaagaaaagctggtgggattatgattgcaattgcattcagtctgttcatcaattggaagaattgaacacttcttacatgccagactgttgtaagctcttggattacatctgggaacaaagcaaagatccttgtgctactgtagcttacattcagagggaatttttgtttatttgttttctgtcagggtttattagtttaaatatctgatgattcccttaggacagattcctagaggtagaattactacatcaagtaataggaactttttcaggctctttaaacatatgaccagataactttctaactcagcaagtacttttttttttttgagacggtgtctcgctctgttgccaggctggagtgcagtagcgcaatctcggctcgctgcaacctctgcctcccaggttcaagcgattcccctgcctcagcctcctgagtagctgggactacaggcacacaccaccacgcccagtatttttagtagagacggggtttcaccatgttggtcaggatggtctcgatctcttgacctcgtgatccactcaaagtgctgggattacaggcatgagccaccgtgcccggccaagtatttatcttctgtggaactaaccactacgctcagcattttggagatctaggactgggaagattgcggtcagttcttgctcttaaagcactctatccagctggagaaacatgatggccattcatgaaggagtttgagtcctgtccattgtttgtaatggaatccagattaaacatctactgtccaaataacagtcctaacaatgcaagggtcagaaaaaaggtcagcattattggctcgaggtaatagaacagacctcatggagatactgaaattggtggtgggcactgaaggttgtaagttctggggaaatgaacaataaggaaaaggacatttgagattggaaaacatgaattgaggtacagaacttacttgtccatggagattaacttggccagaatgaagggtgtggactcagggacaatagaagatcaatttcgatgggccagtgaagtcaggtaattgagagccctggatgccaggattctgggcttggactcaaagagaaggaagatgcttgtcttcctggtttctctctttacaggtgctgggctgtgctgtggagctccctgatgtcagctgcaagcggtttctggatcagctagttggattctttaatttttacaatggacctgtttccctagcttatgaggtacaagtatggggttgaggagtcttacattgggcctctttataaaaaccggtattgccagaatgcagcacttactctggggtcttgtatacttcatataaacacattgtgtctggggacaaggtcaggagctcttggaggcccctcatatgcctttgggcctagtggcataggtcacatttattccaaatgtttatccccatctcctccctgggatgtttagaaagcgcaggccctgcttgccacccccacgcggcaggcgccgtggatctgtgatgggataggtttaaaacaggtcctcccttccggtcagtttcctgtgtgaggaacaatttttgaggtagttgggactctggccaaagaatctgtccctcaaaatctcagatattgacctgaggctctttctgttttagaactgttctcaggaagaactgagcacggagtgggacaccttcatcgagcaaattctgaaaaacaccagtgatctgcataagattttcaattccctctggaacttggaccaaactaaagtaacattttcatcctccttattcattttatatgtaagactagggcttctggatacttttttaatattcctgaagtgaactatatctggaaaagtgagtagaatgtcacttctcaggcagggccatgacacggcaggtcacctctcagcctcatttcccttatccaaagaatggtgtcagcatacctgccttcttgaactgttttgatgatcaagtgaagcagtacctcaaatgacaccaagtaaatgctcagtaaagggaattagtattttgttcatgcctcagaagtgttgaactcagtaatctgaaggccgcctctcttgatattcatatcatatgatctagttattctcagcatcaaaaatgcccagcatgaacatttcaaaaacaaggttgctgtctttgagagagaatggttgggaactgtttttgtatctctgagccgctccgtttgcggttggcactcagtgaaacctaggctgcttgtgtggctggcctgaccacctgtgctgccccattaagagccagctacctgagccctgactcacagccctctcctgtgtctcactgcgatagtaaataatgtccctgtagcaggggtgtagcactgtggctcagccttcacagagcatgactccaccagacatggggaagggttttccctgctccagtctggaaaacttcctgtagctggccccagagctttatagaatggctggctgggatggcacagtcttgaggctatgaagaataaacttcttaatgtgtcagcagctccggaggctccattaacactagttctaacagctggtggatacttgctggttctagctggcaggtggaagtctgaggaggctgctggttattgctggctcttcctgaccaggtccagatgcttttcttgtatttttagggacttctaggcccctgactccatacaaggaatgtggaactgaggcatatttccccgagtgaaagagcatgatgttttcattttatgtgatggaatagagtcatggaacctggtcagacatcaagccacctgtatcaccatggggattgtgcttcagaaggaaagtggaggatagggtaggtgggtttcacctggtaccatgacatgtatttataggatacaccctcctcttctgctgccgtgaggtcttagcattgtcagggtagacagtcggtctcccaggccatctactttgacccctttgaatagccatatgccatatttgctgcaccttctagcttctggacaggcctccttgttctaagaatttggcatttagtggtgtcagcagttctgagtatagagaggtagaatagtcccaagccatggcacagctttcactgtgtgacacattctccttttccaggctttgagctacaccctgtccagctgttctgtacaaccctttccccttttctcccttcctgattgtgagcatgctgatgggtgggcatgatgcctcttgccctgcacaggtggagcccctgttgttgctgaaggcagcccgcattctgcagacctgccagcgctcgcctcacattctcgctggctgcatcctctataaaggactgtgagtaactccagacccctttcttccagccccattcccttgctgcacaactgaccatcagccacctccagatcacagtggggagcccagtctctggccagttccaagtgggctggttcggcaaatatcaggtagtttagatttgactcagtttagaaagacaggtgtgtacctgtctttgagcaaagctgagaaattggaaatagttgtgttcagaaaagagttaagaatgtccctataattctcagtatggggcatgctggaatagttgtcagtctgcaaaatgctaatgcagagtcccgagcgttgccagcagccagcactgtagtcaagaggcatggaaggggcctgctgtgaccctcctcctgctgcccagagaccctggtgtgcttgcctcagctcagctctgcaaagcagccttacaggcccttatccagctgccttcaagcctcttggctgggccagtgtcttggttggcctctgagaattcacttcacttcttcatgtagttggagggcttcttggtgaatctgagtgcccaagagccactctaggtcatctaaggcctctctcctcatggagggtttgctgtcacagcccagggcaggcagggccattgcgctgtgcccggagcttcctgaggagcaggcaactactgtgtaaatggagaagcactgaggctctcgcaggggcccttgggccagacaggctcggccccagatcctcccttctttcgccagccatgcggccttgggcaagttgcttagcctcaattttctcttctgggaaatagacatcccttgtgaagaatgaaatgagatgacagatgcggaagaaccgagcatagaccctggtgggctttgcactcttcttccttgccccggttcttatcatgatggttctgaatcagctgtgggatttccaagttcgtcagtgacatacccaccaaagacagtattttttttccccttttctcattttgcatttcttaaatgtatatatatatatttttttttcttttttttttttttgtagggacgaggtcttgctatgttgcccaggctggtctcaaacacctggcttcaagcgatcctcagcttcccaaactgcttggattatagacataagccactgcacccagcctgtatttacattatacggctaatacatgaatacattttcactgtaaacaaatcaatcaatagaggaacacacagagcacaatttaaaagccccccttctttcttcaccatttttgtttgtttgtttttgagacacagtcttgctttgttgcccaggctgtagtgtagtggcataaacacagcttactacagcctcgacctcttggactcaagtgatcctcccacgtagctggaacaacaagcacttgctaccacacctggccaagcttttgattttttttttttttttttttgtagagatgggatctcactatgttgctcatggaggtctcaaactcctaagctcaagttattctcccacctcagcctcccaaagtgctgtgattgcaggagtaagccactgtgcccagcctctccctcactcttaacctgtcctcaccattggcagtttggtgggcatcttgctctttctgtgtgtttgtccccactggtacatgtatgcatatattgcttttgtttatttttgctatctccttaaataggatcacatggtttctcaacgcatacagtgaagatttccttaccggttcatatgggtctacctcattcttatgaggactgcatactttttgggattctggctgtgttgtgctttactgtcttgttgatgaacattttggtggtttactcattttttaattgtttttaccattctccctgtaatgaatattcttacgcatacatcttggtacaagctgagtcaaagggtttggatattttaaatgttggtaggaactgccagagtgccctctgtaagggttttaccagttgaaactcccaccagccaagtccccaagatcctcgtcaacacgggctgttaggcatctttaaaatttggagtgttttggtgtatttcgtctcatggtgttcttgttctgtgtgtgacctcctaggattgtcagcacccaactcccgccctccctcaccgccaaggtcctgcttcaccgaacagcacctcaggagcaggtattgtaaagtccacccacctggctggacagcatcccccagagcactggtcactgagcctgaggctggagggatcaggagcagaggccgtggagcagttgtttcacttggtcttgtcaggaccccaagtcctccaatgtcattctcctcagtagtgaagccattggtgaggctgaaagaaaatgttttcttccacgagctaggcctggatagttgttttttcttcaaaccaaggaaatcttggttgaattcgacttcccataagaatttgatgtctctttatgtcaaagagatgttagacttttcagagacagactgtaaaggatgtgtctttagaaagatttagggggttgggcacggtggttcacacctgtaatcccagcactttgggtggctgaggtgggcagatcacttgaggtgaggagttcaagaccagcctggccaacatgatgaaacccatctctatttaaaatacaaaaattagctgggtgtggtggtgcacacctgtaaatcccagctacttgggaggctgaggcaggagaatcgcttgaacctggcaggcagaggttgaggtgagctgagatcgcgccactgcactccagcctgggtagcaagagtgagactctgtctcaaaaaataaaaataaaaataaaaaaataaggaaaacaaactcttctaaaatacttccattttatatttatttaattgtttttatattgaaaaaaaagccatgcatgctcattgagaataaaattgcccatctttgaactgtacagggatagccactgccagcatctggcatatctccttccagtcctttttttgttttgtgtatgaagctgtggtttccagcgtatcatgaggctgtctttttacatgtattagtgaacaggcatgtaaaatgctggtagggctctattcagcctcctcagccactgtggctatgggtgtcaattcaagtagcctttctgggaaacactttgataatgagaacgttaaggatgccctttatttttttcctaataatttgacttctaggaatatatcttaaggaaataatgtaactgctgaaaaaaatttatactcaaaacttgatcacaacaagctttatgaaagtgaaaaatcagacaaaacttgaatgcttaaagtaggaggtggcaaattatggcctgtgggccacctgcctacaaatgaagttttatttggctgcttttgagctataatagcagaaccaagtaggtgggacagagaccatatgccctgcaaagccaaaaatatttactgtcttgtcttttgcacagaaagtttactaattactggtctaaggtaggtaaatgattaatttactcatatcacttaaaccttcataaaattttaatcagccgtttaaaatggccaaagatgttttagtggcaggaaatgcgtgttactgttttaagcagaaatatgaaattttatatagtgtggcctcaaaagtataaaaactgcataggcttaaggaaaaaatacccaatattaatagtactagcttggggatgagggattgtatgtgattttttttttcaacgctttgtctagagtaaattgaggttaggcttagtaatctaaaacatagttttttaaaaatcaccaaaaaaggaagaacaccatatcattctaagattgaaagtcattttggctagaagagcagttcttgtttggtttggttttgttttggtgggttcttttggaaccctcagattgaaacgagagatgttttcatttttgagaaaatcatcaggttttaggccctgattgtgaaccagaacaaacgagagattgggtatagcattttgtttaagtcaaatcctttatcgtgagagtcacagtattttgacatttttattataatggaatttatgtgaattctacatcagggctgtggcagatgtgactgtattctagaatatgagttccccaaaggtgtaaaagagaacaggaatcctcaattttattcccagaagggagagagactgagaaaatcagaacgtagagtgtgatgtgagtttgggtggagctgctgccttgcagcctgtgtgggcccaggttcttgcttcatcccagccatagtgggagccagcagcttgggggagcttctgttccatctgcttggctcttagcatgtggttgggacaagctttctgggcctggctaagttttatgaacagatggcacagcaaattcctgatggttaggtcaagaggagaatgtggtgcccagcgccaacttctgtgtgtgtttgttttcagagactccctacgggagaggatgccccgcaggaacatggtaagtagtgaggcgcatggttgcctcttgagaacggcggtcttttatgctacctacccctgtacaagttatgcgaaggaaaccaagccatctgcatgtttatttcctctgctcataataggaaaatggatgttatggagcttcaagaatcgagttacccaccagaaccctaatggtaaagctatgattttaggcatgctgtcaaatccctgctttcagaccctccttaacttcatattgtgagactgctcggtcaagtgccaggagattgtgattgggagagggtaaggcaaacagcgactgccagaaagaccttttgcaggatgtggaggcgtcctcaggagagttatttcgatttattctgaagcctgagttggagcagatccctttcttagcttatatcttcttcttgtaaaagtgcttttcaacctttctctcccgaacatcttccttctccaaagctgggagtcatgttgcctgcagggactctttccttactgggcccaggagttcgaggtgcagtttggcaacctgtgtcctggctgaggaatgcactcacagcacccctttccgagcccacgtgtgggttggatgcatcacgccagtgcagctattgccccgctgccctctctggctcaggggaaagtcctgttcatattgctttgcaattccaggagcggcattgcccccgaatgtccagattatccctgtttttgtgaccaaagaggaagccattagtctccacgagttcccggtggaacagatgacaaggtaatggagtgcacagagagttaaccttgcaccacacctgagggaccccatcgcgtgattggttaaaaaacaaacctctgatacatcccatcgttccttaattccatcttccccatgccctgtcttgtaaaggagcatctgaatcttgagtttgttaagaaacagagtggcatagagagatgacattggctttcatatcccagctctcttacttataccagctatgggaccttgggcaagtccattccctgcctgagcctcagttttttcatctgaaaagtagacaaaatagtatccctttcatgagttcattgtgacacttgaaaatagtataggtacagcacctagtatagggcctgatgcgtaggagaccttccagatgtgggtcagtcttattcagtgggctctgccattttcagtaggtgagtctggtgtcactacgtaaagccccaagggccagatgttggtgtatttttactcttgtgatttaactctggtggcctcttaggctctgtggcctcaggcacccccttgtccttgatgcctgtgctttagtcttcactgtggaagggcacttgccctgcagtctgtcaacgtgccccttccttacatctctcttgtttgccaggtctctagcatctccagcaggactccaggatggttcagcccagcaccatccaaagggtgggagcacatctgccctgaaagaaaacgccactggccatgtggaatccatggcctggaccaccccagatcccacatcccctgacgaagcttgtccagatggcaggaaggagaacggatgcttgtctggccatgatctggagagcatcaggcccgcaggactgcacaactctgccaggggtgaggttcttggcctcagctcctccctggggaaggaactagtctttctccaagaagaactcgacttgtctgaaatccacattccagaggctcaggaagtggaaatggcctcaggtcattttgccttcctacatgtgcctgttccagatggcagggctccttactgcaaggcatctctcagcgcctccagcagcctggaacccacgcctcctgaggacacagccatcagcagcttgcgccctccctctgctcctgagatgctgacccagcatggagcccaagagcagctcgaagaccatcctggccatagcagccaagcccccattcccagagcagaccctctccccagaaggacccgcaggcccttgttattgcctcgcttagatccaggacagagaggaaacaagcttcccacgggggaacaaggcctggatgaggatgttgatggggtctgtgaaagccacgcagcccctggtctggaatgcagttcaggctcagcaaactgtcagggtgctggcccctctgcagatggaatcagctccaggctgacaccagcagagtcctgcatggggctcgtgaggatgaatctctacactcactgcgtcaaagggctggtgctgtccctgctggctgaggagccgctgctgggagacagcgcagccatagaggaagtggtgagtgtcctcagaccttctcctgcccctctgcggcctctgccgatctcctgtgcttccctcacagcactgtgccaacacccagggaagagataaaggctcagccctcagttgtgtgaccctgggcaagacgttcttgtttagacgatggaggtattacctgcctctgtgggtttttgtggggggtaagagtgagtcaagcgcatagcactggtggtgcattggcatccaacaagtgttggttctcttcttccgctgtttctagttttgcagagcgcaggccttggagaaagggaaggcctgagatggaatcctggcccttgtcctctagctgtgtgaacttgcccacagacctttgtccccttgagccttggctaactcctcagtcacgtagggatggtggtagaccttcctgttccagatgcagtgagataatgcaggcagagactgcacacgtacgtgcatgtgttgtgccgcccctgctcatggcctcatttcctagcctggacagctctaggttctgtgtcagctggaaactcctccgcagtgtgtcacagcctgggttgggagttccctagaaacccagtgtttccctccatagccccagcatcgtacctgatctgaagctccttcctagaaggctgggatgtctgaaatcctgcctggctctggagggctcttaaactattgcagccccttccccgcttagaggcttagagtggtaaactgaccttccctggggcccacgctggagattcgttgctatagtaacagccttgctttagtaggcagggaaagtggtagcagtaagaacagcaggttgaaattgctgcagggcaaatggtgtcttggggctttccttgtttttattcttaaatgtgtattattctaagctgatcttactatcatgcagggcttgtgaccctccataaatgagctagtcaccttgaaatacagaagaagagataagactgcacagcagcttccttgcacagagctcctagcaagagaatgctctctggagctgtcaggcttctctgtgccctttccacagacgctggatcactgagttatggctcatttgcttcctgtatccccattcaccatagctaggagtgactatccatctccttcttatagcagtgcggggagttgtggctgcagtgttaaatgcctcatctccctgccaatgccttggttttcatggtctgttctgcacagtgtcgagccttggaagtgtcattttgaagggcccagtgtttgaatgcaataaagtggatataatacctctctttttaccttcccccacaaaaaggaaaaaatagcccaggctgctctttgagatgtattctgcaccaactatatgtgaaatacttcgcatctctcgttttagccaagccttagaacagttctgggaaggaggcattgtaactcccattttaccagtaagaaaacagcctcattgagatgaaaagacttcctgcaagtggcaggtccagaattcttgcttgtttctggttccccaccccagcctctctgtccccccactgccctgcccttgcagtgatagctgggaagctgaagaaagggggtcagtgtcctgccttctgtggctcgtgctctatggccatatcccctggtttgtcaaggtctatccatgctgttacgacatcagcctccatgggcttctgtggaaagcagggtttgatgctggctaggccccgggaaatagactgcagttttatggaagagaaaaagctaatcttttcttcttttttttttttttttttgagatggagttccgctcttgttgcccaggctggagtacaatggtgtgatctgagctcactgcaacctccgcctccccggttcaagcggttctcctacctcaacctcctgagtagctgggattacaggcatgtgccaccaggcccggctaattttgtatttttagtagagacggggtttctccatgttggtcaggctggtctcgaactcctgacctcaggtaatctgcccgcctcggcctcccaaagtgctgggattacaggcatgattgcacccatccctgaaaagctaatcttttctagtatggagtgactaactttgatcagcccactggtttgagagtgggtttgttaatcagacccaaaggatttctgttttataatcaggaagaggtgtttgattgcctttttgtcccagactagccttgaaaatactttatctgatttccctgcagcccctctgctactgtctagaaaaaccaaatacccccagttacggtgagcacaccccttttgcaagggctccttaatgatgttacatactgccaagctgcccttgtgtcatttggctgtcttgtctttgggtggatcagcttccacagggagtaggggtagggtgaggggcagcaggggttgggattggtgaaaggagccctgggtggagcagccaggagggttgggattggggctggaattccctcagagggagtggaataggctcacaccagggggcagcatagagccgctgatagtccattactcagaccccaagataatctccttgaccttcaaacacagtgatcagattaattatttatcactacaataggacatggagcttctgtgtacagtacatgaggcttgaagttagtgtgagagtgttgccataaaacattttatgaaaaaacaccttcccccaactgggaaaccggtatctctaagtgaatgtgtgttccatgcattgctcctgctgcacgctgtgtcacacactgacatttgtgccacttgctttcgtgtgcactagaagtcagaggacccgggaattagcctcagctctgtgttgcctagggctgttgtgaggatcacattatgtagcagtatatatcggtggctggcaaacattttatgtaaaggaccagaaagcaaatattttcagctttgcacagcttttcagctctgctgttgcagtacaaaaacagccatagacagtatataaatggtatgactgtattccagtaattatttatggacatggaattggaacttcatataatttgcacatgttacaatattattcttttgacttttttccccaaccaagtaaaaaaatataaaaaccattcttaggtctcagactgtacaaagataggcaacaggctggatttagtttataggctagagtttgctgacccctggtatgtatgaaagcacttggttatcagtaaaaattatccacatgtcatctgacatagcatcttgtgattaactgtgtttttatggttaagtgatcctatcttgagtgcaagttaggcagaagattttggaagcaaagctccgtgcctgtggggaaacagtttttggcatggctcactctctgttcttattgtttcttcctctggacaccagctcagcatggaagggatgactgttagcacgttcttgaggtccaaaaactttcagtgaggctgtggtttgacttcatcaggtgaatgcttatgtgtgcccgtgtgcgtgtcggcacatgcacacacacacatctgttcaaataagaggctcagtgttaaacgcagtgttggtcaggctctctcagtgatctgaacatgagatattatgattgtctttcctgagcacatatctttttacatagctctgcaaccttggtttaaaccaaatagctcataaattggcagtgcttggcattggatgtgttcatttattcattcatttagtggattcatttattgagcacctactaggagtcagacactctactaagcattgaggatacaaaactgagcgcatagaaaataactttgtatgtcacacctattgacttgaaatatcatttctgagactttcatacaggaaaactgatttaacaccaatatactcccaaaataacatgtaagcttcatgacatttacttcagaagcattctgtttgcatctctgtactttttatatgcacttatttttcttacatagctgttgaaaaatagtccacaaattatctgtgatctctaaagagacaccatttcttttatatgattattttcatttccttgactttataaaaagactctgcctcaggatagcactttagagtttacaaaggacttttggatgtgtcatttcatttaagtcactcaatagtcccgtactgttcccattttgcagttgactagaaaaatgaggcacagaaaacttggtaacttgctcctggtcatttgactaaaaagaggctgaacttgggatgttttttacctgggaactgcaaatgtttggggacagtgaccttctttcttgtggctgaagcaggcccaggaaaccccatttcagaccaagcctattatgacaggcctggcctactgagtcaagccctcagtggagcttgaggaacactgcacagccattaaagaattatatgatagaatatttaaagacgagaaaagcagttcatgctgtgttgttaggttaaaaaactatcagtcattatttatgatttgatctcatttttattttacagaaaaagagttacacaaaacagtttagtccagtcttttcaattgtacttaaactttatctccttggaggtttgtaaaaatacaggtacttgaacccatctccttgacagtcgtcctcaactgtattcctcttctgaaccatcaagtgcagaaagctgtttgactgacactcagtccttccaagaaagccaggaccgtgctaggtgtagcagagagaagttaccgtgttacatccagtgagggacttctgtacccagggccagtgagaaacaatgcgggatggtcccaggctgtttgtattgtgaaatcatgcagcctgggtaggaaagccatggttaaaataagatacaccacagtggtgacagtggctattactggatggtgaaatgatgggttgttttcttgttatttttttgctcatctcttttctaaatctcctacaatataatcattatttttaaaaacattagaacataagggtgaaagaaaaatgttggtgagagtccattttgctggatcaagtaggcagtaagatactccatgaatgatttttttttttttttttcgagacagagtctcactctatcacccaggctggagtgtggtggtgcggtctcggctcactgcagccttaaactcctggcttaagtgatcctcctgcctcggtctcacaaagcactgggattacaggtgtgagccaccgtgcctggctggaggattttttttttaactaagtctgtggttaactagccctcagaaggcttgctgaggtcagccctacaagcccatgaccctctccccctttgcagtaccacagcagcctggcttcactgaatgggctggaagtccacctgaaagagacgctgcccagggatgaggcagcctccacgagcagcacctacaacttcacacattacgaccgcattcagagcttgctgatgggtaagaaccagccaaggggcctggggcgacggggatgccagattctagatgggtggagatgagaacttgagccccagcatcatgatgacacggctgtgcacagagttgtctgacctgcgttcagggctctcttctcaccgggagcccagtcccactgagtgtggcgttcactgggcagacgcttctctgctcatgtgtctgtttttggcgtttcccagtgttttgagagaagttcatgttcacatatctgtgatagggtttgtctcagaatgttgagatccacacgcagaaaccgggtgctgcatcgcacagcggcggcagccgaagcccaatgccccgggcctttgtctctgccccgggcagccaactcatggccttgagccgtgctcagtccccgtgttcagtactgggcttcatggggtgggagggcagaaggtaactgtctgctcttcacaactctgtgtcctcttctggaagcaaacctgccgcaggtggccaccccgcaggatcgccgcttcctccaggccgtcagcctgatgcatagcgaatttgcccagctgcccgcgctttatgaaatgactgtcaggtgagcctccctgagtcgctccccaacctactctccacggtcctgctcatgggaaccacctgtggggcccaggcagcgccttattcctaagtagatgaaaaacattctagttactctccttaaggccttcctttgtcggttcctattgccgccatcatccactgttgtgcagtcacgtgccatggactttctggttcccttcctactttagacgcttggggtccagcagtgaaggaacctgaggtcctcaccatcatggagctacatccattactagggacggtggctccgtctccttgctagaaacagtgttgaaatattgttgtctttctaattacaaagtaatatggctgggcacagtggctcacacctgtaatctcagcactttgcgaggcagggggatcacttgaggtcagggttcaagaccagcctggccaacctggtgaaaccctgtctctactaaaaatacaaaaaattagctgggcagggtggtgggtgcctgtagtcccagctactcaggaggctgaggcaggagaatcacttgaacccgggtggcagaggttatagtgagctgagatcacaccattgcactccagcctgggcaacagagtgagactgcgtctcagaaaaaaaaaaaaaaaaaaaaaagtaatacgtgctgatcatacagtcatgcagaatgcttggaaatgtatcaagtaaaacattttcctctctcatctccatcacacaccaggaaataaccacattttacagtttggtatatattgctccaggttttattggtttttggtttttattttttgcacatataaattgtatttttaattattttaagtcttctagaaaataggattctactaatgtacaattttacagttgtcttttttcacattatgtcatagcttgaacacctccatgccagaagaaatattatgattattgtaatttacagtatttaaccaaccgaatttgtttttttctttctatatgcttctcttatgaaaccagaaagggagtttgggctttaaagatcactttataaaagcccgaggagactgggacctgagaatttggttgacaactggtaacagaaaataaagcaagttagcaggtcaagggcagtgctggcaatgtgtatattagtccacgtagtccttggaaccatctggtcaagggcattattttttatttatttattttgagatggagtctcactctcgccaggctggagtgcaggggctcagtctcggctcattgcaacctctgtctcctggtttcaagcaattcttctgcctcagcctcctgagtagctgggactacaggcacctgccaccatgcccagctaatttttgtatttttagtagagatagggtttcaccatgttggccaggatagtctcaatgttttgacctagtgatctgcccaccttggccttccaaagtgctgggattacaggcgtgagccaccacgcccggcttcaagggcattttttaaatcctcattttacagatgagaaaattgaagcacaaataggataagcagcttgcccagggttatattcttcttaagtggcagggccaggatttgaagcattttctccaactgttaagcacatgtatgacctttccacacacatttcagtgtcggggcagtgtggtccagtgtgaggggcatgggtggtggactgacagggagcctgggtgggtgattaggatggttctgattccctgtcacccgccacacttgagcgccaggtgttctgctgcctctcagcgtctccagccaatattccaatagatctttctgtcagaaatgtgtcttctctggctttaattcacagctgccccaggctggcaacccagaggcaacttgcatctacagtcactggtttgggaactggctgtgttgggggtgtgtgtgtctgttttgtgggaggtggaaacaagtaaaatgtcagcatctgctccaccaaccaccttgtggccctgcagtatgtcaccttccttagagctgagaggggtttagtgttgagacacatagctcaaggcatttgttgagagattatttcaataacagtaatagaaacaacagctaccatttctttttttttttaattttattattattataagttttagggtacatgtgctgtgcacaacgtgaggtgtgttacatatgtatacatttgccatgttggtgtgctgcacccattaactcgtcatttagcattaggtatatctcctaatgctatccctcccccctccccccaccctacaacaggccccagtgtgtgatgttccccttcctgtgtccatgtattctcattgttcaattcccacctatgagtgagaacatgtggtgtttggttttttgtccttgcaatagtttgctgagaatgatggtttccagtttcatccatgtccctacaaaggacatgaactcatcattttttatggctgcatagtattccatggtgtatatgtgccacattttcttaatccagtctatcgttgttggacatttaggttggttccaaatctttgctattgtgaatagtgccgctataaacatacgtgtgcatgtgtctttatagcagcatgatttataatcctttgggtatatacccagtaatgggttggctgggtcaaatggtatttctagttctagatccctgaggaatcgccacactgacttccacaatggttgaactagtttacagtcccaccaacagtgtaaaagtgttcctatttctccacatcctctccagcacctgttgtttcctgactttttaatgatcgccattctaactgatgtgagatggtatctcattgtggttttgatttgcattgctctgatggccagtgatgatgagcattttttcatgtgttttttggctgcataaatgtcttcttttgagaagtgtctgttcatatccttcgcccactttttgatggggttgtttgtttttttcttgtaaatttgtttgagttcattgtagattctggatattagccctttgtcagatgagtaggttgcgaaaattttctcccgttctgtaggttgcctgttcactctgatggtagtttcttttgctgtgcagaagctctttagtttaattagatcccatttgtcaattttggcttttgttgccattgcttttggtgttttagatgtgaagtccttggccatgcctatgtcctgaatggtattgcctaggttttcttctagggtttttatggttttaggtctaacatgtaagtctttaatccatcttgaattaatttttgtgtaaggtgtaaggaagggatccagtttcagctttctacatatgaacagctaccatttcttaaccactcacaatgtgttaagcactcacttaatctcattctttaaaacaaaacaaaacaaaaacaccaatgaggacacatactgttgcaacaaacactgtacagatgaaaaagctgggactcagaaatgttgaatagcagcccaggacacacactaggaagtaatagggctgggattagcacctgagtgtgtgtgactccagatccatgctcataaccatctggcctcggagccctcccacagggctgtgagaagagattgtcttgctgggccagtgggtgcaggagacactgaagcttggaatagggtgggatttttctcccttacagggaaggagagaattgagtgaggggagccttagcagtccctgactccaccctttctcactagatttgggggaaactgaggcccataatagttggagaggcaggatccagaaaccaggggggtttgtttaccttggcctggagttggctcctcccaggtggctccgcctctgtgtagtgccctcatccctccctctctgtgtccacaggcttcctgtcacttcgtgtcacatcccactcctgtccttcactccctctcagtctatccagccacccccagtgtggagagcagactagactcctttctcggacactgccattgcctcgtcatagaggcagggcagccccagctactcactctgagcctcagggtccttgtctgtgaaatgggaccataccaccactgcagagcttatgtgaggggcaaagcagagactgtatgcagagcacattgcatagctgccagtatgtcaaaaaagccagcactccacagttcctttatgcaatacttataactccaggatctgtggctgctgccactgtggatggtcccgccacggactcttccagcatctagtgagctgaaaggaaggaaagatggtattggcactgaagcctgaaactcagctgaagaaatagaattccgtgccatgacagctgcacatgccacattgggtgtcctgggtcctctgtgacaagaaccttactgaggtctctgtgtggtctgagattagcaccagcagcattggaccgttgccttctttcttcctccaacagaaatgcctccacggctgtgtacgcctgttgcaaccccatccaggagacatatttccagcagctggcacctgcagcacggagctccggcttcccaaaccctcaggatggcgccttcagcctctccggcaaagcaaagcagaagctgctgaagcacggggtgaacttgctctgaactgcacccaggaggtgactgggaaggagaaaaccagcaaaggaagctctgccttttataattgaaaaggcccctctattttatttttcttgaaaacattcccttttttaggaaccaaatgatatttgagtttttgttattccttttgcagattgggatgtgttttgggggcaggggttagttcttcaggtcggcagacccagagcacttgataaagaactgtatttaatcggtagtgttggggccgggacgggcttggctccctctctgccatactgagcctgaggtatttcatatctcctgctgttccatcccagcttgaattggtgccacaagcttccaagttggcattttttctagaacctgatcgtccactagcccagagtgtgtgtgttcaacccccacaccaggtggtggtaggcggtgtgactgcacagcgaggtgccggatctgtgagcaggccgactccactcccacgccgcaggtaggtttctccagtgcgctcttgctgggaggtccggatcgttcctgcagggaagcggcagcacacggagaccacttggttgaattctgttggaactctactcaaatctaggggcgtcttctttggacccacaatgggggcaagccttaataatatggaagggagtttgggctttagagatccctttataaaagctctgggggctgagccctgagaattcagtgacaacaggaccaacctgcgctgcctttgactacaagtgggccgtgcagctggttcctctcgagcgagtgtccctaaataggagtttacaagatgtctgggggtaaaagcactgtgcttttcagtggtggctgcgtgaaagggagcgacactcagctgtgtgttcctgggcttgtgtggtacttagaacctcagttctattacgttatagtcagacatttttttgacagtatgagacagactgcaggatgaaaatatttgtcaaaatcttaactgaatgtttactggaagtacttgagattccatttgagagttgtattgttaataatttcatgtcagtgaactgatatctgatgtttatgatatggtgtctttttcttgaaacaagcttccaagggctagaaataaaatagccaaaaaatgctggagttctgagtaattaaa

SEQ ID NO: 15622 - DNA, 31755 bp, Homo sapiens
cggcttgccaggagctggagggggaggtaggcggggcggcgcgtgacctaaggcctctctgccgcgcgcgcaggtacggggcagaagtcgcaggtacccagctgctgcccacatttctggtccagagtcccgaaccccgagcactgggatgcctggctactccggtgggtgggcggcgctcggagcgcggggataccgaggggcgggcccccagcttagagcgtgacccgaccccgcctaatccttaggcgttcgcccaccatttcccagtcccgtagagctggggccagacaccgcacagccctagtgctgttaccagtcgctgcctgcgccccgggggctgcgcccagcagcttcctggcccttttccagccattagcgtccgttttccagccctgctgccccactgaggccccttcccacagcagtatcaccagccccagccccgcgttgttactattacttcccaggctaccagatccttttctgctcatgttccgacgtctcttcctactccagggccattattggtctcttctggacctttcagagataagagaggacctcggtagtgtagggcccagtcctctgggaacaagggatggggagttttaggctgctgtccttggttccagtaacagagataccccctccacaggcacccaaatatgctccatagaatacaatgagtgtggtcctgtggaggcccaatccaaaatatctagagctgagaagagatagagattttacaggccgtcaaatattcaatgggggtcgtctctagagacttttaacaaactgtattgtgtacccacagattgcagaatggtgagcaaacatttgagaccatgttgctaaagcattaagcttggagaaagtgacagtaagaattagacaatagttttgaagtgaccaagaggttgtcacatggaagaattagaccttgttttgtgttttcctgcagagcgttatccagactagcgagtgggaggcagatgtaaaatctggaacgcagattttagtttgttggaaggagaaatgtaacatagtgaaccacgcatctctggagggtgtaaagcagagacagccaaggtaatttttggaaaagagtgcaggagagtagagtaaacgatgccagggttccttccgactctgaaattccgtgatacactgagctgtctttctcttgtggaagtttgaaagccatttgataaagttctcttcattttttagaaatttgccctgctctggaattctgcatgttcaggttacttttggactgtcaagatgacagttccttaatttgggttccattattaccacagcaactggtttatttgtatagctgtccacacctagagcattttcaccctgtcatttgattttatcttccgtgaagcttgtggtgtgtttcccttaactgttcgagaaactaaagcccttactctgaagtctctgcaagcctccctctttgattttgaagcatgattgtcaccctcacagaaagctcttttgaaatataccattcgtttaatcctgctgggtcacatgctctctcacgagttgctgaaatatctattccttgtgtttatttcagagccaaggcactgatgtttgaactggaaacttcaaaacgtttaataagagtcttcaggatgggtttgaactagacaagctagaaatttctttagaacaccagctctagcatgcatctcccacttttggctttcctggagaggagcttgaagaggtggttctgcagacagccacagtgatacttaggaaaccagaggaatggatttgacttttctgctaggattctctgttatagtttctccctgagttgtaagaggcatggaaatatacatgaaactgaagaacctgcaaggaagggaagtggaactttccatgctgagtgaaaactaaccaagtggcagttgtgactgaaaacactgaaacctaccacgtccagattcactggattgggggatagaggaacggtcacagctagggagaaagaagtgataccggaaaagaaaacctaaatgaagagaatgaggatgactgcacagtagatggccacctctacctccacagaggcaaagtcagcctcgtggtgagtaacaaggcctgccatggcatagcttttgctgggctgttggttagagttttggggttaattgaaaatccccagccagattgtgttaattttattaacataacaataaaaatgccattttcctcagagcagctgaatcaagcacgtgagccatcgctctccaaagctaacatgttttaaccttgcaagcctctcccaatgtttgaatgagtctggcattgctgggagattgtagaaaagatagccacagcctgatcatgcagcgagctttgatgataatgtgaatattgtagtcttcaatttgcagagatgaggtatggttgcatttgagaattacagcatgaggagaggtctggccagactgggtatcaaggggtattactcaatgtctgtctgaaacccagttcccttctcaaccctaaatgcgttaatcctttcccataattaggtttagcaaacatcagtcatagaggagatgaaggtgaaaagcaggtttagctagaattagcaggatttagtgactgattatttatgtggaagtcaaaaagatggagcagttcaaaatgacacccaagttttctttcgtgtgcccgcacaagcagggatgctttcatcaagagaacgtggggacaggggaggatggggtgcacatggagtttctgagttggctttgaaacttttttgaggctttttgatctgagcttaccctgcagccagttgtacatccagccttaggtattgggaaagaggacagtgccaagagaccaagttggtgctttatttatttgtttgtttgtttttgagacagggtcttgctctatcctccaggccagagtgcagtggcatgatctcaggtcactgtagcctcaatcccccaggctcaagtgatcctcctacctcagcatcccaagtaactggaaccagaggcacaccccaccatgcctggctaattttgtctgttttttgtggagatggggtttcacggtgttgcccaggctaatctcgaactcctaagctcaagcagtcctcctacctaggcctctcaaagtgctgggattataggtgtgagccactgtgcccagccaagttggtgctttttcatcaggaaggcagggtgggagccatggagggaggcttcagagagggcatagatccagggaagagagcagatgacacattggtcccattgcttgtttatgctatagcctcataaatgtgttctcagagacttagaagtaaaacaggtccagccaggctcagtagctcacacctgtaattccagcactttgggaggccagggcaggattatttgagtccaggaatttgagaccagcctgggcaatatagtgagactcgtttctataaaaaatttaaaaaaaaatagccgagcatgatggcacactcctgtagtcccatctacttgggaggctgaggcgggaggatggcttgagcctgggagattgagtttgcactgaaccgcaatcgcaccactgcactccagcctacagggctacaaagtgagaccctgtaaaaacaaaacaaaattgaggcctggcctttgaggtgtttgttttatggtcttaaagaggtaatcagataataacattacgtaatatagttatactgcagtgtagtctgtaagagtctttgaggaagaacagagggtcatggaaattcagaacaaagagatatctctgggccgagggaatcaggagacggttaatgaggaagtgtgcttgaatgatacttggtgaggtttggcatggtagagaggagttcagagtttctctgtaaattctcataggcccctgttttttccctgttacgaacttttggactcactatcctgcattgaaactgcgtgtttgctcagcaaccgcggagcacactgtgggccctcagtaaatgtttaagtgaatgcatgaattcctggtagaagggctgtttctggaaatctttgtgctcagcacttatgaggagtgcatctaatacatccctaacttattttgttatcagagccttaaaagacagcgtatcagaccatgtggttgtatagttaaggttcagtgtttcaaataagagcagtcattgtgggcgcctcgtttttttttctagctactcgtgtcttctccggcagatggtctaacggctggatagaggcatatttttagtttgaatttcctgcgcttacagaatggttttatctaatttgtagctactggggttctttattctctggggccacctgaaggctttcaaacacagtaataagccctcctcgggctgggaaacaggaagctgtgttttaaatgccgtgatcactggattaaaggaaacatggctccactctgttctcttgccaggtggaattatttttttctttatgatggttccaaggtaaaggaagaaggcgatccaacaagagctggcatttgttacttttatccttcccaggtaagccacacagcattttattgttcagtgaggatcccagtgcctccaagtggtgacttttcaaaagtatggggtttacattaggacagtttggctaatccagacaatgacatttctactgtcttattcttagttgtactatttcttgttgttctggtcttaaaatttccaggcagctcggcactttcatcgtctttagctttctatttccatcatgatttttgtctgcctccctctacccccaattttttgatcagcttggtttttaaaagttattattctgctgggcacggtagtttatgcctgcagtcccagctctttggcaggctgaggtggatggatcacctgaggtcaggagtttgagaccagcctggccagcatgatgaaaccctgtctctactaaaaatcccaaaattagctgggcgtggtggcacgctcctgtaatcccagctacttgggaggctgaggcacgagaatcgcttgaatccaggaggcagagttgcagtgagcagagactgcgccattgcacaccagcctgggcaataagagtgaaactccatctcaaaaaaaataaataaataagtttgtattcaaacatatacaaaaacagagaggcaagtatcatgaaccctcatatgccatcagtagcttcaacaattatcaatactttgccgatttttttttttttttttttgtgatggaggctcactctgtcacccagggtggagtgcagtggcatgatctctgctcactgcatgctccacctcccgggttcatgccattctcctgcctcaacctcccgagtagttgggactacagtcgcccgctaccacgcccggctaatttttgtatttttagtagggacggggttttaccatgttagccaggatggtctcgatctcctgacctcgtgatccacccacctcagcctcccaaagtgcagggattacaggcgtgagccaccacgcccggcaatactttgccaattttatgtgacctatctgaacctcttcttctctctcttttttttttcctggagcaaattctagatgttgcgtcatctcaccagtatcaagcaacatctctaactgaaaagggcattattttgaacattaccacacctaacgaaagttacagtaattagtaacagtaattccttaatattacctgatacccagactgtattcaaattttgccttattgtcttggatattacttattctgctcttccttccttccatgcacccatacttccatccttccatttctttttctttttcctaataaggatccaaacagcatccacatattctatttggttattttgtattttaagtccttttaataacagtcctcacccagccactcatctttttccccctcctctatgccattgaattattgaagaaaccaggtcatatgtgtagtagagtgttagaatgtcccacactctagatttggctgatttgttcctcatggtggtgtcatttaatgtctcctatccactgtatttcctttacattagtagtaagatctagagtcttggtgaggttcaagctcagttttctaggtaagaattcttcatgggtggtgtatacatttcctgtgtatcccatactgtctggctgtcctgtgcgttagttaaggctaaggttgattaggagattctgtacattccctcctgtgactgtgctctgacatggatagttggggttaatctgcatccctctggccactccgtatgggggatttgagtaggagtgaaaggctcatgcttctgctaagcatatgcctataatcctagcaacagaaatgcggttctgtgcagtcatcgcatgtgttcctgctgggtgttctcttagggttcagtcatctcaggtaggggttggcaaactttgtaaagggccagaaagtaaatattttaggctttgcaaggcacataaggtttcaatcacatgttcttctttgttgtaacctttaaaaagtataagaaccattcttagcttacaggccataggaaaacgggtaacagactggatttggcttgcaggctttagtatgctgtaagaaatgacttaagagttcaagaatttcagcttcctatctggaatgtgctcctttcccacagaccctgctagaccaacaggagttgctttgtggacagattgctggagttgtccgctgtgtttctgacatttctgactctcctcctactcttgttcgtctgagaaaactgaagtttgccataaaagttgatggagattacctttgggtaagttgaatggcagaatcagtgctgaagtgttgcaatgataagtttaggaagttatgttgtttctgagtcttgaatttagaattatctgcccccaccaacctcatccatgtactgtgtttagtaatcaccctcgcttcctgtggtactctctgcaggttttcatcatcaagtgctttccaaaacatttctaacatattctgcattgcacacagctggtttctcctttcctttcaaagacttaggccaacttgtggaaattctgtttactctgtgttgtaaattgagtttttatcatcatcttttcttctccatgctctctacacttactgggtaagtgacccagaaaaaaatgatagatatatgttaggttttagagaacccattaaaaaaaaaaaaagaatattgcttgagtccaggagttcgatatcagcctgggcaacatagtaagacccccgtctctataaaaaatttaaaaattaaccgggtgtggtggctcatgtctgtggtcttagctactggggaggctgaggggaggattgcttgagcttaggagtttcaggctgcagtgagccatgattgccactgcacgctagcctaggcaacagagtgacaccctgtcttaaaaaaaaaaaaagaataaaaatcattcctttacattctaatagtagcatataatctaaagtgctgtttcccatggctacatttattttaaggcttcctgaggtaaagggatgcttaagtgtgggatgctatattcaactttgtaggtattatttccaacattttattacgaaaattttttaaagtactgaacagttgaattttacagtgaatactcatatacctcctcaattctacagttagcattttattatagttgttttattacctatctattcattcctttatcctcccattaattcaaattatttttattttattttattgagacagggtctcaatctgttgctcaggctggagtgctgaggtgtgaccttggtttactgcaacctccgcctcccaggctcaaacgatcctcccatctcagcctcctgagttgctaggaccacaggcatgcaccaccatgcccggctaattttttaaactttttctagaggcagggtttcaccatgttgctcaggctggtcttgaactcctcagctcaaggaatcctcccgccttggcctcccaaagtgctgggattacaggcgcgagacactgtaacccagccccaaattattttgttacagttttcaaagtaagttgcacacattagtgtactctccacacagatactctctctatcatgcatatcatcaactaaaatttaatgtttggggctgagcgctgtggctcaggcctgtaatcccagcactttgggaggccaagacagtcggatcacctgaggtcaggaattcaagaccagcctgaccaacatggagaaaccctgtctgtactaaaaatacaaaattagccaggtgtggtggcacatgcctgtaatcccagctactcgggaggctgaggcaggagactctcttgaacctgggaggcagaggttacagtgagctgagatcgcgccattgcactccagcctgggcaacaaaagcgaaactccatctcaaaaaaaaaaaaaaaaaaaaaagaaatttaatgcttgtttgtggttacatgctttacaggcgtctgtcttgccacttaacacttgtgaaattcgttcatgttgttgcatctatcagcgttcgttccattttattatcaaacagtattccgttgtctgaatatatcacaatctgttcttcttttgatggacatctgaactgtgtccagttggggatattaaggataaggcttctgggaacattcctatacaagtattttggtgaacacgtgttttcatctctcctgggtaaatatccagtcctggaattgctgggtcatagagtaggtgtatgttggattttataggaaactgttagaacttttccttcagtggttgtaccattttacattcctaccaagaatgtatgagaattccagttactccacctgctcatcagcattgagattgacagtctgttcatcttagccattctgctggatgtgcagtggtgtgttattgtggttttagtcttcacttccctgatgactaatgatagtgaggccttttcatgtgcttaatgaccacttgaatatcttcctttgtgaagtgtccattcaaagccctgcccattttttaaattgggttttatttttttaattgaattgtagttctttttatatcctagataccagttctttgtcagatacatctttttaaaataatttctcccagtttgtggcatgcctgttaattttcttgttgtcttttgatgagcagaagtttttcattttaatgaagtctaacttataaattttatctttttatggttattgctttctgtgtcttgcctgaaaaaaaccactgcctactccattggaggagatagtctcccttttttattttttgtaagaatttgatagttttagcttttaaatttagatctgtaatccactttgggttaatatttgtgaatggtgtgaatagaggtcaaggatctttttttttttttccacctggataaccagttcttccagcatcattgttgaaaacattttcctttccctattggatttccctttggttcctttgccaaagatcagatgaccatttaagcgtgggtctatttctggactcttttcggcttttccacagatctgtttgaagattctgtgtgagtaccacactgtcttgatttctatagctttatagtaagtcttgaaaccagatagtataagttctccaaccttattctttctcaagatagctttggatatttcaggttctttgtgttttcattgtacaatcagtttgtggtttctgaagaaaagctggtgggattatgattgcaattgcattcagtctgttcatcaattggaagaattgaacacttcttacatgccagactgttgtaagctcttggattacatctgggaacaaagcaaagatccttgtgctactgtagcttacattcagagggaatttttgtttatttgttttctgtcagggtttattagtttaaatatctgatgattcccttaggacagattcctagaggtagaattactacatcaagtaataggaactttttcaggctctttaaacatatgaccagataactttctaactcagcaagtacttttttttttttgagacggtgtctcgctctgttgccaggctggagtgcagtagcgcaatctcggctcgctgcaacctctgcctcccaggttcaagcgattcccctgcctcagcctcctgagtagctgggactacaggcacacaccaccacgcccagtatttttagtagagacggggtttcaccatgttggtcaggatggtctcgatctcttgacctcgtgatccactcaaagtgctgggattacaggcatgagccaccgtgcccggccaagtatttatcttctgtggaactaaccactacgctcagcattttggagatctaggactgggaagattgcggtcagttcttgctcttaaagcactctatccagctggagaaacatgatggccattcatgaaggagtttgagtcctgtccattgtttgtaatggaatccagattaaacatctactgtccaaataacagtcctaacaatgcaagggtcagaaaaaaggtcagcattattggctcgaggtaatagaacagacctcatggagatactgaaattggtggtgggcactgaaggttgtaagttctggggaaatgaacaataaggaaaaggacatttgagattggaaaacatgaattgaggtacagaacttacttgtccatggagattaacttggccagaatgaagggtgtggactcagggacaatagaagatcaatttcgatgggccagtgaagtcaggtaattgagagccctggatgccaggattctgggcttggactcaaagagaaggaagatgcttgtcttcctggtttctctctttacaggtgctgggctgtgctgtggagctccctgatgtcagctgcaagcggtttctggatcagctagttggattctttaatttttacaatggacctgtttccctagcttatgaggtacaagtatggggttgaggagtcttacattgggcctctttataaaaaccggtattgccagaatgcagcacttactctggggtcttgtatacttcatataaacacattgtgtctggggacaaggtcaggagctcttggaggcccctcatatgcctttgggcctagtggcataggtcacatttattccaaatgtttatccccatctcctccctgggatgtttagaaagcgcaggccctgcttgccacccccacgcggcaggcgccgtggatctgtgatgggataggtttaaaacaggtcctcccttccggtcagtttcctgtgtgaggaacaatttttgaggtagttgggactctggccaaagaatctgtccctcaaaatctcagatattgacctgaggctctttctgttttagaactgttctcaggaagaactgagcacggagtgggacaccttcatcgagcaaattctgaaaaacaccagtgatctgcataagattttcaattccctctggaacttggaccaaactaaagtaacattttcatcctccttattcattttatatgtaagactagggcttctggatacttttttaatattcctgaagtgaactatatctggaaaagtgagtagaatgtcacttctcaggcagggccatgacacggcaggtcacctctcagcctcatttcccttatccaaagaatggtgtcagcatacctgccttcttgaactgttttgatgatcaagtgaagcagtacctcaaatgacaccaagtaaatgctcagtaaagggaattagtattttgttcatgcctcagaagtgttgaactcagtaatctgaaggccgcctctcttgatattcatatcatatgatctagttattctcagcatcaaaaatgcccagcatgaacatttcaaaaacaaggttgctgtctttgagagagaatggttgggaactgtttttgtatctctgagccgctccgtttgcggttggcactcagtgaaacctaggctgcttgtgtggctggcctgaccacctgtgctgccccattaagagccagctacctgagccctgactcacagccctctcctgtgtctcactgcgatagtaaataatgtccctgtagcaggggtgtagcactgtggctcagccttcacagagcatgactccaccagacatggggaagggttttccctgctccagtctggaaaacttcctgtagctggccccagagctttatagaatggctggctgggatggcacagtcttgaggctatgaagaataaacttcttaatgtgtcagcagctccggaggctccattaacactagttctaacagctggtggatacttgctggttctagctggcaggtggaagtctgaggaggctgctggttattgctggctcttcctgaccaggtccagatgcttttcttgtatttttagggacttctaggcccctgactccatacaaggaatgtggaactgaggcatatttccccgagtgaaagagcatgatgttttcattttatgtgatggaatagagtcatggaacctggtcagacatcaagccacctgtatcaccatggggattgtgcttcagaaggaaagtggaggatagggtaggtgggtttcacctggtaccatgacatgtatttataggatacaccctcctcttctgctgccgtgaggtcttagcattgtcagggtagacagtcggtctcccaggccatctactttgacccctttgaatagccatatgccatatttgctgcaccttctagcttctggacaggcctccttgttctaagaatttggcatttagtggtgtcagcagttctgagtatagagaggtagaatagtcccaagccatggcacagctttcactgtgtgacacattctccttttccaggctttgagctacaccctgtccagctgttctgtacaaccctttccccttttctcccttcctgattgtgagcatgctgatgggtgggcatgatgcctcttgccctgcacaggtggagcccctgttgttgctgaaggcagcccgcattctgcagacctgccagcgctcgcctcacattctcgctggctgcatcctctataaaggactgtgagtaactccagacccctttcttccagccccattcccttgctgcacaactgaccatcagccacctccagatcacagtggggagcccagtctctggccagttccaagtgggctggttcggcaaatatcaggtagtttagatttgactcagtttagaaagacaggtgtgtacctgtctttgagcaaagctgagaaattggaaatagttgtgttcagaaaagagttaagaatgtccctataattctcagtatggggcatgctggaatagttgtcagtctgcaaaatgctaatgcagagtcccgagcgttgccagcagccagcactgtagtcaagaggcatggaaggggcctgctgtgaccctcctcctgctgcccagagaccctggtgtgcttgcctcagctcagctctgcaaagcagccttacaggcccttatccagctgccttcaagcctcttggctgggccagtgtcttggttggcctctgagaattcacttcacttcttcatgtagttggagggcttcttggtgaatctgagtgcccaagagccactctaggtcatctaaggcctctctcctcatggagggtttgctgtcacagcccagggcaggcagggccattgcgctgtgcccggagcttcctgaggagcaggcaactactgtgtaaatggagaagcactgaggctctcgcaggggcccttgggccagacaggctcggccccagatcctcccttctttcgccagccatgcggccttgggcaagttgcttagcctcaattttctcttctgggaaatagacatcccttgtgaagaatgaaatgagatgacagatgcggaagaaccgagcatagaccctggtgggctttgcactcttcttccttgccccggttcttatcatgatggttctgaatcagctgtgggatttccaagttcgtcagtgacatacccaccaaagacagtattttttttccccttttctcattttgcatttcttaaatgtatatatatatatttttttttcttttttttttttttgtagggacgaggtcttgctatgttgcccaggctggtctcaaacacctggcttcaagcgatcctcagcttcccaaactgcttggattatagacataagccactgcacccagcctgtatttacattatacggctaatacatgaatacattttcactgtaaacaaatcaatcaatagaggaacacacagagcacaatttaaaagccccccttctttcttcaccatttttgtttgtttgtttttgagacacagtcttgctttgttgcccaggctgtagtgtagtggcataaacacagcttactacagcctcgacctcttggactcaagtgatcctcccacgtagctggaacaacaagcacttgctaccacacctggccaagcttttgattttttttttttttttttttgtagagatgggatctcactatgttgctcatggaggtctcaaactcctaagctcaagttattctcccacctcagcctcccaaagtgctgtgattgcaggagtaagccactgtgcccagcctctccctcactcttaacctgtcctcaccattggcagtttggtgggcatcttgctctttctgtgtgtttgtccccactggtacatgtatgcatatattgcttttgtttatttttgctatctccttaaataggatcacatggtttctcaacgcatacagtgaagatttccttaccggttcatatgggtctacctcattcttatgaggactgcatactttttgggattctggctgtgttgtgctttactgtcttgttgatgaacattttggtggtttactcattttttaattgtttttaccattctccctgtaatgaatattcttacgcatacatcttggtacaagctgagtcaaagggtttggatattttaaatgttggtaggaactgccagagtgccctctgtaagggttttaccagttgaaactcccaccagccaagtccccaagatcctcgtcaacacgggctgttaggcatctttaaaatttggagtgttttggtgtatttcgtctcatggtgttcttgttctgtgtgtgacctcctaggattgtcagcacccaactcccgccctccctcaccgccaaggtcctgcttcaccgaacagcacctcaggagcaggtattgtaaagtccacccacctggctggacagcatcccccagagcactggtcactgagcctgaggctggagggatcaggagcagaggccgtggagcagttgtttcacttggtcttgtcaggaccccaagtcctccaatgtcattctcctcagtagtgaagccattggtgaggctgaaagaaaatgttttcttccacgagctaggcctggatagttgttttttcttcaaaccaaggaaatcttggttgaattcgacttcccataagaatttgatgtctctttatgtcaaagagatgttagacttttcagagacagactgtaaaggatgtgtctttagaaagatttagggggttgggcacggtggttcacacctgtaatcccagcactttgggtggctgaggtgggcagatcacttgaggtgaggagttcaagaccagcctggccaacatgatgaaacccatctctatttaaaatacaaaaattagctgggtgtggtggtgcacacctgtaaatcccagctacttgggaggctgaggcaggagaatcgcttgaacctggcaggcagaggttgaggtgagctgagatcgcgccactgcactccagcctgggtagcaagagtgagactctgtctcaaaaaataaaaataaaaataaaaaaataaggaaaacaaactcttctaaaatacttccattttatatttatttaattgtttttatattgaaaaaaaagccatgcatgctcattgagaataaaattgcccatctttgaactgtacagggatagccactgccagcatctggcatatctccttccagtcctttttttgttttgtgtatgaagctgtggtttccagcgtatcatgaggctgtctttttacatgtattagtgaacaggcatgtaaaatgctggtagggctctattcagcctcctcagccactgtggctatgggtgtcaattcaagtagcctttctgggaaacactttgataatgagaacgttaaggatgccctttatttttttcctaataatttgacttctaggaatatatcttaaggaaataatgtaactgctgaaaaaaatttatactcaaaacttgatcacaacaagctttatgaaagtgaaaaatcagacaaaacttgaatgcttaaagtaggaggtggcaaattatggcctgtgggccacctgcctacaaatgaagttttatttggctgcttttgagctataatagcagaaccaagtaggtgggacagagaccatatgccctgcaaagccaaaaatatttactgtcttgtcttttgcacagaaagtttactaattactggtctaaggtaggtaaatgattaatttactcatatcacttaaaccttcataaaattttaatcagccgtttaaaatggccaaagatgttttagtggcaggaaatgcgtgttactgttttaagcagaaatatgaaattttatatagtgtggcctcaaaagtataaaaactgcataggcttaaggaaaaaatacccaatattaatagtactagcttggggatgagggattgtatgtgattttttttttcaacgctttgtctagagtaaattgaggttaggcttagtaatctaaaacatagttttttaaaaatcaccaaaaaaggaagaacaccatatcattctaagattgaaagtcattttggctagaagagcagttcttgtttggtttggttttgttttggtgggttcttttggaaccctcagattgaaacgagagatgttttcatttttgagaaaatcatcaggttttaggccctgattgtgaaccagaacaaacgagagattgggtatagcattttgtttaagtcaaatcctttatcgtgagagtcacagtattttgacatttttattataatggaatttatgtgaattctacatcagggctgtggcagatgtgactgtattctagaatatgagttccccaaaggtgtaaaagagaacaggaatcctcaattttattcccagaagggagagagactgagaaaatcagaacgtagagtgtgatgtgagtttgggtggagctgctgccttgcagcctgtgtgggcccaggttcttgcttcatcccagccatagtgggagccagcagcttgggggagcttctgttccatctgcttggctcttagcatgtggttgggacaagctttctgggcctggctaagttttatgaacagatggcacagcaaattcctgatggttaggtcaagaggagaatgtggtgcccagcgccaacttctgtgtgtgtttgttttcagagactccctacgggagaggatgccccgcaggaacatggtaagtagtgaggcgcatggttgcctcttgagaacggcggtcttttatgctacctacccctgtacaagttatgcgaaggaaaccaagccatctgcatgtttatttcctctgctcataataggaaaatggatgttatggagcttcaagaatcgagttacccaccagaaccctaatggtaaagctatgattttaggcatgctgtcaaatccctgctttcagaccctccttaacttcatattgtgagactgctcggtcaagtgccaggagattgtgattgggagagggtaaggcaaacagcgactgccagaaagaccttttgcaggatgtggaggcgtcctcaggagagttatttcgatttattctgaagcctgagttggagcagatccctttcttagcttatatcttcttcttgtaaaagtgcttttcaacctttctctcccgaacatcttccttctccaaagctgggagtcatgttgcctgcagggactctttccttactgggcccaggagttcgaggtgcagtttggcaacctgtgtcctggctgaggaatgcactcacagcacccctttccgagcccacgtgtgggttggatgcatcacgccagtgcagctattgccccgctgccctctctggctcaggggaaagtcctgttcatattgctttgcaattccaggagcggcattgcccccgaatgtccagattatccctgtttttgtgaccaaagaggaagccattagtctccacgagttcccggtggaacagatgacaaggtaatggagtgcacagagagttaaccttgcaccacacctgagggaccccatcgcgtgattggttaaaaaacaaacctctgatacatcccatcgttccttaattccatcttccccatgccctgtcttgtaaaggagcatctgaatcttgagtttgttaagaaacagagtggcatagagagatgacattggctttcatatcccagctctcttacttataccagctatgggaccttgggcaagtccattccctgcctgagcctcagttttttcatctgaaaagtagacaaaatagtatccctttcatgagttcattgtgacacttgaaaatagtataggtacagcacctagtatagggcctgatgcgtaggagaccttccagatgtgggtcagtcttattcagtgggctctgccattttcagtaggtgagtctggtgtcactacgtaaagccccaagggccagatgttggtgtatttttactcttgtgatttaactctggtggcctcttaggctctgtggcctcaggcacccccttgtccttgatgcctgtgctttagtcttcactgtggaagggcacttgccctgcagtctgtcaacgtgccccttccttacatctctcttgtttgccaggtctctagcatctccagcaggactccaggatggttcagcccagcaccatccaaagggtgggagcacatctgccctgaaagaaaacgccactggccatgtggaatccatggcctggaccaccccagatcccacatcccctgacgaagcttgtccagatggcaggaaggagaacggatgcttgtctggccatgatctggagagcatcaggcccgcaggactgcacaactctgccaggggtgaggttcttggcctcagctcctccctggggaaggaactagtctttctccaagaagaactcgacttgtctgaaatccacattccagaggctcaggaagtggaaatggcctcaggtcattttgccttcctacatgtgcctgttccagatggcagggctccttactgcaaggcatctctcagcgcctccagcagcctggaacccacgcctcctgaggacacagccatcagcagcttgcgccctccctctgctcctgagatgctgacccagcatggagcccaagagcagctcgaagaccatcctggccatagcagccaagcccccattcccagagcagaccctctccccagaaggacccgcaggcccttgttattgcctcgcttagatccaggacagagaggaaacaagcttcccacgggggaacaaggcctggatgaggatgttgatggggtctgtgaaagccacgcagcccctggtctggaatgcagttcaggctcagcaaactgtcagggtgctggcccctctgcagatggaatcagctccaggctgacaccagcagagtcctgcatggggctcgtgaggatgaatctctacactcactgcgtcaaagggctggtgctgtccctgctggctgaggagccgctgctgggagacagcgcagccatagaggaagtggtgagtgtcctcagaccttctcctgcccctctgcggcctctgccgatctcctgtgcttccctcacagcactgtgccaacacccagggaagagataaaggctcagccctcagttgtgtgaccctgggcaagacgttcttgtttagacgatggaggtattacctgcctctgtgggtttttgtggggggtaagagtgagtcaagcgcatagcactggtggtgcattggcatccaacaagtgttggttctcttcttccgctgtttctagttttgcagagcgcaggccttggagaaagggaaggcctgagatggaatcctggcccttgtcctctagctgtgtgaacttgcccacagacctttgtccccttgagccttggctaactcctcagtcacgtagggatggtggtagaccttcctgttccagatgcagtgagataatgcaggcagagactgcacacgtacgtgcatgtgttgtgccgcccctgctcatggcctcatttcctagcctggacagctctaggttctgtgtcagctggaaactcctccgcagtgtgtcacagcctgggttgggagttccctagaaacccagtgtttccctccatagccccagcatcgtacctgatctgaagctccttcctagaaggctgggatgtctgaaatcctgcctggctctggagggctcttaaactattgcagccccttccccgcttagaggcttagagtggtaaactgaccttccctggggcccacgctggagattcgttgctatagtaacagccttgctttagtaggcagggaaagtggtagcagtaagaacagcaggttgaaattgctgcagggcaaatggtgtcttggggctttccttgtttttattcttaaatgtgtattattctaagctgatcttactatcatgcagggcttgtgaccctccataaatgagctagtcaccttgaaatacagaagaagagataagactgcacagcagcttccttgcacagagctcctagcaagagaatgctctctggagctgtcaggcttctctgtgccctttccacagacgctggatcactgagttatggctcatttgcttcctgtatccccattcaccatagctaggagtgactatccatctccttcttatagcagtgcggggagttgtggctgcagtgttaaatgcctcatctccctgccaatgccttggttttcatggtctgttctgcacagtgtcgagccttggaagtgtcattttgaagggcccagtgtttgaatgcaataaagtggatataatacctctctttttaccttcccccacaaaaaggaaaaaatagcccaggctgctctttgagatgtattctgcaccaactatatgtgaaatacttcgcatctctcgttttagccaagccttagaacagttctgggaaggaggcattgtaactcccattttaccagtaagaaaacagcctcattgagatgaaaagacttcctgcaagtggcaggtccagaattcttgcttgtttctggttccccaccccagcctctctgtccccccactgccctgcccttgcagtgatagctgggaagctgaagaaagggggtcagtgtcctgccttctgtggctcgtgctctatggccatatcccctggtttgtcaaggtctatccatgctgttacgacatcagcctccatgggcttctgtggaaagcagggtttgatgctggctaggccccgggaaatagactgcagttttatggaagagaaaaagctaatcttttcttcttttttttttttttttttgagatggagttccgctcttgttgcccaggctggagtacaatggtgtgatctgagctcactgcaacctccgcctccccggttcaagcggttctcctacctcaacctcctgagtagctgggattacaggcatgtgccaccaggcccggctaattttgtatttttagtagagacggggtttctccatgttggtcaggctggtctcgaactcctgacctcaggtaatctgcccgcctcggcctcccaaagtgctgggattacaggcatgattgcacccatccctgaaaagctaatcttttctagtatggagtgactaactttgatcagcccactggtttgagagtgggtttgttaatcagacccaaaggatttctgttttataatcaggaagaggtgtttgattgcctttttgtcccagactagccttgaaaatactttatctgatttccctgcagcccctctgctactgtctagaaaaaccaaatacccccagttacggtgagcacaccccttttgcaagggctccttaatgatgttacatactgccaagctgcccttgtgtcatttggctgtcttgtctttgggtggatcagcttccacagggagtaggggtagggtgaggggcagcaggggttgggattggtgaaaggagccctgggtggagcagccaggagggttgggattggggctggaattccctcagagggagtggaataggctcacaccagggggcagcatagagccgctgatagtccattactcagaccccaagataatctccttgaccttcaaacacagtgatcagattaattatttatcactacaataggacatggagcttctgtgtacagtacatgaggcttgaagttagtgtgagagtgttgccataaaacattttatgaaaaaacaccttcccccaactgggaaaccggtatctctaagtgaatgtgtgttccatgcattgctcctgctgcacgctgtgtcacacactgacatttgtgccacttgctttcgtgtgcactagaagtcagaggacccgggaattagcctcagctctgtgttgcctagggctgttgtgaggatcacattatgtagcagtatatatcggtggctggcaaacattttatgtaaaggaccagaaagcaaatattttcagctttgcacagcttttcagctctgctgttgcagtacaaaaacagccatagacagtatataaatggtatgactgtattccagtaattatttatggacatggaattggaacttcatataatttgcacatgttacaatattattcttttgacttttttccccaaccaagtaaaaaaatataaaaaccattcttaggtctcagactgtacaaagataggcaacaggctggatttagtttataggctagagtttgctgacccctggtatgtatgaaagcacttggttatcagtaaaaattatccacatgtcatctgacatagcatcttgtgattaactgtgtttttatggttaagtgatcctatcttgagtgcaagttaggcagaagattttggaagcaaagctccgtgcctgtggggaaacagtttttggcatggctcactctctgttcttattgtttcttcctctggacaccagctcagcatggaagggatgactgttagcacgttcttgaggtccaaaaactttcagtgaggctgtggtttgacttcatcaggtgaatgcttatgtgtgcccgtgtgcgtgtcggcacatgcacacacacacatctgttcaaataagaggctcagtgttaaacgcagtgttggtcaggctctctcagtgatctgaacatgagatattatgattgtctttcctgagcacatatctttttacatagctctgcaaccttggtttaaaccaaatagctcataaattggcagtgcttggcattggatgtgttcatttattcattcatttagtggattcatttattgagcacctactaggagtcagacactctactaagcattgaggatacaaaactgagcgcatagaaaataactttgtatgtcacacctattgacttgaaatatcatttctgagactttcatacaggaaaactgatttaacaccaatatactcccaaaataacatgtaagcttcatgacatttacttcagaagcattctgtttgcatctctgtactttttatatgcacttatttttcttacatagctgttgaaaaatagtccacaaattatctgtgatctctaaagagacaccatttcttttatatgattattttcatttccttgactttataaaaagactctgcctcaggatagcactttagagtttacaaaggacttttggatgtgtcatttcatttaagtcactcaatagtcccgtactgttcccattttgcagttgactagaaaaatgaggcacagaaaacttggtaacttgctcctggtcatttgactaaaaagaggctgaacttgggatgttttttacctgggaactgcaaatgtttggggacagtgaccttctttcttgtggctgaagcaggcccaggaaaccccatttcagaccaagcctattatgacaggcctggcctactgagtcaagccctcagtggagcttgaggaacactgcacagccattaaagaattatatgatagaatatttaaagacgagaaaagcagttcatgctgtgttgttaggttaaaaaactatcagtcattatttatgatttgatctcatttttattttacagaaaaagagttacacaaaacagtttagtccagtcttttcaattgtacttaaactttatctccttggaggtttgtaaaaatacaggtacttgaacccatctccttgacagtcgtcctcaactgtattcctcttctgaaccatcaagtgcagaaagctgtttgactgacactcagtccttccaagaaagccaggaccgtgctaggtgtagcagagagaagttaccgtgttacatccagtgagggacttctgtacccagggccagtgagaaacaatgcgggatggtcccaggctgtttgtattgtgaaatcatgcagcctgggtaggaaagccatggttaaaataagatacaccacagtggtgacagtggctattactggatggtgaaatgatgggttgttttcttgttatttttttgctcatctcttttctaaatctcctacaatataatcattatttttaaaaacattagaacataagggtgaaagaaaaatgttggtgagagtccattttgctggatcaagtaggcagtaagatactccatgaatgatttttttttttttttttcgagacagagtctcactctatcacccaggctggagtgtggtggtgcggtctcggctcactgcagccttaaactcctggcttaagtgatcctcctgcctcggtctcacaaagcactgggattacaggtgtgagccaccgtgcctggctggaggattttttttttaactaagtctgtggttaactagccctcagaaggcttgctgaggtcagccctacaagcccatgaccctctccccctttgcagtaccacagcagcctggcttcactgaatgggctggaagtccacctgaaagagacgctgcccagggatgaggcagcctccacgagcagcacctacaacttcacacattacgaccgcattcagagcttgctgatgggtaagaaccagccaaggggcctggggcgacggggatgccagattctagatgggtggagatgagaacttgagccccagcatcatgatgacacggctgtgcacagagttgtctgacctgcgttcagggctctcttctcaccgggagcccagtcccactgagtgtggcgttcactgggcagacgcttctctgctcatgtgtctgtttttggcgtttcccagtgttttgagagaagttcatgttcacatatctgtgatagggtttgtctcagaatgttgagatccacacgcagaaaccgggtgctgcatcgcacagcggcggcagccgaagcccaatgccccgggcctttgtctctgccccgggcagccaactcatggccttgagccgtgctcagtccccgtgttcagtactgggcttcatggggtgggagggcagaaggtaactgtctgctcttcacaactctgtgtcctcttctggaagcaaacctgccgcaggtggccaccccgcaggatcgccgcttcctccaggccgtcagcctgatgcatagcgaatttgcccagctgcccgcgctttatgaaatgactgtcaggtgagcctccctgagtcgctccccaacctactctccacggtcctgctcatgggaaccacctgtggggcccaggcagcgccttattcctaagtagatgaaaaacattctagttactctccttaaggccttcctttgtcggttcctattgccgccatcatccactgttgtgcagtcacgtgccatggactttctggttcccttcctactttagacgcttggggtccagcagtgaaggaacctgaggtcctcaccatcatggagctacatccattactagggacggtggctccgtctccttgctagaaacagtgttgaaatattgttgtctttctaattacaaagtaatatggctgggcacagtggctcacacctgtaatctcagcactttgcgaggcagggggatcacttgaggtcagggttcaagaccagcctggccaacctggtgaaaccctgtctctactaaaaatacaaaaaattagctgggcagggtggtgggtgcctgtagtcccagctactcaggaggctgaggcaggagaatcacttgaacccgggtggcagaggttatagtgagctgagatcacaccattgcactccagcctgggcaacagagtgagactgcgtctcagaaaaaaaaaaaaaaaaaaaaaagtaatacgtgctgatcatacagtcatgcagaatgcttggaaatgtatcaagtaaaacattttcctctctcatctccatcacacaccaggaaataaccacattttacagtttggtatatattgctccaggttttattggtttttggtttttattttttgcacatataaattgtatttttaattattttaagtcttctagaaaataggattctactaatgtacaattttacagttgtcttttttcacattatgtcatagcttgaacacctccatgccagaagaaatattatgattattgtaatttacagtatttaaccaaccgaatttgtttttttctttctatatgcttctcttatgaaaccagaaagggagtttgggctttaaagatcactttataaaagcccgaggagactgggacctgagaatttggttgacaactggtaacagaaaataaagcaagttagcaggtcaagggcagtgctggcaatgtgtatattagtccacgtagtccttggaaccatctggtcaagggcattattttttatttatttattttgagatggagtctcactctcgccaggctggagtgcaggggctcagtctcggctcattgcaacctctgtctcctggtttcaagcaattcttctgcctcagcctcctgagtagctgggactacaggcacctgccaccatgcccagctaatttttgtatttttagtagagatagggtttcaccatgttggccaggatagtctcaatgttttgacctagtgatctgcccaccttggccttccaaagtgctgggattacaggcgtgagccaccacgcccggcttcaagggcattttttaaatcctcattttacagatgagaaaattgaagcacaaataggataagcagcttgcccagggttatattcttcttaagtggcagggccaggatttgaagcattttctccaactgttaagcacatgtatgacctttccacacacatttcagtgtcggggcagtgtggtccagtgtgaggggcatgggtggtggactgacagggagcctgggtgggtgattaggatggttctgattccctgtcacccgccacacttgagcgccaggtgttctgctgcctctcagcgtctccagccaatattccaatagatctttctgtcagaaatgtgtcttctctggctttaattcacagctgccccaggctggcaacccagaggcaacttgcatctacagtcactggtttgggaactggctgtgttgggggtgtgtgtgtctgttttgtgggaggtggaaacaagtaaaatgtcagcatctgctccaccaaccaccttgtggccctgcagtatgtcaccttccttagagctgagaggggtttagtgttgagacacatagctcaaggcatttgttgagagattatttcaataacagtaatagaaacaacagctaccatttctttttttttttaattttattattattataagttttagggtacatgtgctgtgcacaacgtgaggtgtgttacatatgtatacatttgccatgttggtgtgctgcacccattaactcgtcatttagcattaggtatatctcctaatgctatccctcccccctccccccaccctacaacaggccccagtgtgtgatgttccccttcctgtgtccatgtattctcattgttcaattcccacctatgagtgagaacatgtggtgtttggttttttgtccttgcaatagtttgctgagaatgatggtttccagtttcatccatgtccctacaaaggacatgaactcatcattttttatggctgcatagtattccatggtgtatatgtgccacattttcttaatccagtctatcgttgttggacatttaggttggttccaaatctttgctattgtgaatagtgccgctataaacatacgtgtgcatgtgtctttatagcagcatgatttataatcctttgggtatatacccagtaatgggttggctgggtcaaatggtatttctagttctagatccctgaggaatcgccacactgacttccacaatggttgaactagtttacagtcccaccaacagtgtaaaagtgttcctatttctccacatcctctccagcacctgttgtttcctgactttttaatgatcgccattctaactgatgtgagatggtatctcattgtggttttgatttgcattgctctgatggccagtgatgatgagcattttttcatgtgttttttggctgcataaatgtcttcttttgagaagtgtctgttcatatccttcgcccactttttgatggggttgtttgtttttttcttgtaaatttgtttgagttcattgtagattctggatattagccctttgtcagatgagtaggttgcgaaaattttctcccgttctgtaggttgcctgttcactctgatggtagtttcttttgctgtgcagaagctctttagtttaattagatcccatttgtcaattttggcttttgttgccattgcttttggtgttttagatgtgaagtccttggccatgcctatgtcctgaatggtattgcctaggttttcttctagggtttttatggttttaggtctaacatgtaagtctttaatccatcttgaattaatttttgtgtaaggtgtaaggaagggatccagtttcagctttctacatatgaacagctaccatttcttaaccactcacaatgtgttaagcactcacttaatctcattctttaaaacaaaacaaaacaaaaacaccaatgaggacacatactgttgcaacaaacactgtacagatgaaaaagctgggactcagaaatgttgaatagcagcccaggacacacactaggaagtaatagggctgggattagcacctgagtgtgtgtgactccagatccatgctcataaccatctggcctcggagccctcccacagggctgtgagaagagattgtcttgctgggccagtgggtgcaggagacactgaagcttggaatagggtgggatttttctcccttacagggaaggagagaattgagtgaggggagccttagcagtccctgactccaccctttctcactagatttgggggaaactgaggcccataatagttggagaggcaggatccagaaaccaggggggtttgtttaccttggcctggagttggctcctcccaggtggctccgcctctgtgtagtgccctcatccctccctctctgtgtccacaggcttcctgtcacttcgtgtcacatcccactcctgtccttcactccctctcagtctatccagccacccccagtgtggagagcagactagactcctttctcggacactgccattgcctcgtcatagaggcagggcagccccagctactcactctgagcctcagggtccttgtctgtgaaatgggaccataccaccactgcagagcttatgtgaggggcaaagcagagactgtatgcagagcacattgcatagctgccagtatgtcaaaaaagccagcactccacagttcctttatgcaatacttataactccaggatctgtggctgctgccactgtggatggtcccgccacggactcttccagcatctagtgagctgaaaggaaggaaagatggtattggcactgaagcctgaaactcagctgaagaaatagaattccgtgccatgacagctgcacatgccacattgggtgtcctgggtcctctgtgacaagaaccttactgaggtctctgtgtggtctgagattagcaccagcagcattggaccgttgccttctttcttcctccaacagaaatgcctccacggctgtgtacgcctgttgcaaccccatccaggagacatatttccagcagctggcacctgcagcacggagctccggcttcccaaaccctcaggatggcgccttcagcctctccggcaaagcaaagcagaagctgctgaagcacggggtgaacttgctctgaactgcacccaggaggtgactgggaaggagaaaaccagcaaaggaagctctgccttttataattgaaaaggcccctctattttatttttcttgaaaacattcccttttttaggaaccaaatgatatttgagtttttgttattccttttgcagattgggatgtgttttgggggcaggggttagttcttcaggtcggcagacccagagcacttgataaagaactgtatttaatcggtagtgttggggccgggacgggcttggctccctctctgccatactgagcctgaggtatttcatatctcctgctgttccatcccagcttgaattggtgccacaagcttccaagttggcattttttctagaacctgatcgtccactagcccagagtgtgtgtgttcaacccccacaccaggtggtggtaggcggtgtgactgcacagcgaggtgccggatctgtgagcaggccgactccactcccacgccgcaggtaggtttctccagtgcgctcttgctgggaggtccggatcgttcctgcagggaagcggcagcacacggagaccacttggttgaattctgttggaactctactcaaatctaggggcgtcttctttggacccacaatgggggcaagccttaataatatggaagggagtttgggctttagagatccctttataaaagctctgggggctgagccctgagaattcagtgacaacaggaccaacctgcgctgcctttgactacaagtgggccgtgcagctggttcctctcgagcgagtgtccctaaataggagtttacaagatgtctgggggtaaaagcactgtgcttttcagtggtggctgcgtgaaagggagcgacactcagctgtgtgttcctgggcttgtgtggtacttagaacctcagttctattacgttatagtcagacatttttttgacagtatgagacagactgcaggatgaaaatatttgtcaaaatcttaactgaatgtttactggaagtacttgagattccatttgagagttgtattgttaataatttcatgtcagtgaactgatatctgatgtttatgatatggtgtctttttcttgaaacaagcttccaagggctagaaataaaatagccaaaaaatgctggagttctgagtaattaaa

SEQ ID NO: 15623 - DNA, 80207 bp, Homo sapiens
ttttctggctttccctttcggacatgcgcgctcggagcaaggcgccctcgcactcagcttaccgcgcatgtacgttgccaggggtaacgcaggtagccaaagtggcttgtggagtggcgaccgttagtgaggcggttgctgagacagacgctgaggcgggtaggaggagcccgagccgtaagggaagccgtgatgagggccgtgttgacgtggagagataaagccgagcactggtgaggagcggggcggttcgcgaagagcaggaggtcgagtcctcgcggggagtgcgcgagccgctgcagcgtgtttgaggggggcagcgggcttgctgcctgggccgagggcactgaaccccggcctgggagactgcagggtcgccctcccgccccttggcggttggagaaactcccgagggttggagagcggcaaagggaggtgccgcgcctgaggtggtggcgggtggaggcggctcttccctcacggtctggccctgtcgctgccttggattcatctcacacccacgagacagcacgaagctgctcaagcttcacagttcttgccacatccacatagtacccatactcttgttttcttgacgtttttctctaaattgtctcatttattttaattatgatttcacattttacaaggaaactttattactccatttatgaaaaccagtgtcacttgctctaaatgttaagataaaatcagcgtcgcttgctctaagtgtaaaagtaaaacttaaagtagggagaaacaaaactgaacaagctgtagctagctattgttgctagggagcctttaaacctgagatctcgtttctctaaaactggagatgggcaggtatgatcagaaaggtgctcaaaatgagcaccaaacacaagctctcctaattgggaagtctgaaaaagaactgaaggggaatgactttgtcaccttttgattcagttatttaatgtcctattccattgttatcgcctaaatctataacatagcagtctgttttgtcatattcttacttatgggataggtcttggcctgactttgaaaatcattcagcattgttgtgaagcctctgttctggccactggagcaggttacttgtctttggttctgtcccttctgagatctttctctgtgtaaagcatgccgtctctcctcatctcacacggaaatcctgaacatccttcaaggctcacgttggagacgggtcctctcttttgtgttcggcactagtggtagctgacactatgtgccaggtgctggctaagcacttcatatcctttatctcgttgtgtcttcaccactctctaaggtaggtactataatttcctctattttatgtatgaggaaactgaagcccagagagggtggataatttgccagcgtcacacagtgaggggtggaaccagctttcaagctcaggtcttcctcactccaacgtcaacgctctcagccactacattaatttttccttatgttacagacgtggcaaactcaaatgtctgcaggagacaggcaggtaacataaatgggagatgtttatttgcatcttcaacactaggaattgtatgttttccctaggaatagtcttgtattctgtaccccatttttcttgaaacacagccgtatcagtgaatctttcatttgtacttttaatagagatttgagttttaaaaaatcattttacttttaactttattataaacgtacctatagcacaagctgatgatagctggcaactgaacatttggcttcaatgtcagagtaatagagtgtggcaaactgcagagctcatgctcggcctaaaaggggcagctgctgctcagctcctgccaattaccaccatgcaggaatttggcctagtgtgctcagctcttcctgtttttaccagaagctaggaatctgggtttttatgtgaaatggcctaatttttaaatgttagcatccactctgaaaaaaaaacaaaacaccgtgtgggccaaataaaacatttgctggccgaatgcagcctgatttgctctgttttcaacccctggcacagaattttgttcatttctctcttgtggtacttccagagtctgttgagcataagagttaattttttaaatctgtttaattcagaagtctaataaacccgttaaaggcaatggctatgtcttactcgtttccaaattattctagagacaggtcagtggttgttgttactatggatagtaataaaatactagatatatataaaacgaaatactgtgggtagatgtattcatacgtgaatgaatgatgaataaagattggttttctggtttttggcccattacagatttgagacaacctattaggataagggatgtaggggttctatagaccatcaatcctgatggctgctagatataccagctgatagcccagaatgaaaacaaaacaaaaaactaaacaaaaaaaaaaaagacagtagaactaaaaaaatcctagatgtcaaagattagtcctccacatccaaatcagccattgtctcccggtctgctcctttgcttctattttaaccttcacatagcagcaggaactctgtttttttaagacctgctgctgtgatcctgttactctacttctcataaacctagagtgattcccaattactttccatgtcaagtcgtgcattttgctagagggtcctcctgaccctcctccccatcaggcttgcaacatttaaatttatacttttaggttgagctgaaaactctatttttctacccgaagatccttcccaaatgctcccttattctatgaactccctagttttctcctttaaatgcacagctccaggttcatctcaaccaggatgtcttattaggctagcccactgtattccaatcaggctagcatctgctgtaactctccattcatgccagctagtatttactgagtacttgctataggccacatgtccacatgtctttataggtgttatcatgtttaatctctacaacatgtgaggttggaattttcatctcatttaaagatgaagaaattgagatttaatgaggtgacataagttacctaagattacaaaatgagtaagtggggctgggtcagatgatgcaggaattggagaggcactgtgggacattggtttacagtgaggtgggtgcagggttgtcagaggacaatttgcaggattcctctgtatctctgcaatggaatctgacagtgtgtcttctgacagtgtatctcttttataaaaagaggcaggtggagagagaaccatcctacagtagaatagactgcctgcaaatgagtgagctcccagccctggagtgttcaagcaggggctagatggccatctataaggaattcttgccctgatgggccagatggactgcatgacaaggtctagagtcctttccaattctgagtttctggtgatttcataattatatttattacatgtctaggacagtgccatgcactgtgggtccacaaatatgtagaacatggccattgctttcaaattgtgtatgactataattaaaggggcaaggcaagataatatctaacacaatgtaaagaagactgtataagtcagagctaaactgaaatgtacagattctaagtacattaagagtttagattggggcaaatcagacatatatgatatattttaggaaggcaaatttcaagatattcagagaaaatgaatttttatatctaagaggaagaatgttcaggcttggctcaaatgagacattcagaaatgattttgtgataattcaacccaaaatgacccttatgaagaagaggtcacacaggaatcactttgatgagctcatatgtgtacaaggcagaaaggaagccacataccaaggatgactttagatgagaggtgcagacactgctccaacatctaataatccaccatagcaatccacaagtgtcaggcgctttggatagactggcttgtgcaccccgtgagtaggaggctacctctctatccttgttttgtaggtgagaatgaaagctcagataggagatcagcttttctggccccacgtcccccctactttttattccgccatgctgcttctcaaaatgtgaaatgtgccaaggctcagaggaagaaagcgtaagaaacaaggaaggcccaggtctgttaccacataatggtgaggaagctgaaaaactcagggcttcagtttgcccagctggaaagagtgtgataatcatccttgttccagcttctttatcagccagctctgtgactaggagcaaacaacttgcctctctgtactttagtttcctcattggtaaaatcggggcagtggtgcctgtcctgtctactacattatgttttcgtaaggatcaaataagataatgtaagtttacactcttttttttttttgagacagagtctcgctctgttgccaggctggagtgcagtggcgcaatctcggctcactgcaagctccgcctcccaggttcaagccattctcctgcctcagcctcccgagtaggtgggactacaggtgtgcaccaccacgcccagctaatttctgtatttttagtagagatacagtttcaccatgttggccaggatggtctccatctcttgacctcgtgatctgcctgcctcggcctcccaaaatgctaagattataggcgtgagccaccatgtctggccaagtttacactctttaacaattcttaaatattgaataactgtgaagagtttttattaaaggaagcgtcaggtcaacagagccatattaaaagctttctgaattcttcatgtaatgccttaagtaggtaataatacctttttttgacatatgccaacaatgataatggcagccacatagcataatggttaaaacatgggcttcaggccagattgcctgggtttgaggccggatgcagtggctcacacttaaaatcccagcactttgggaggctgaggcagatggatcacttgaggtcaggagttcgagaccagcctggccaacatggtaaaaccctgtctttaccaaaaatacaaaaatgacctgggtgtggtggcaggcacctgtcatcccagctactcaggaggctaaggcaggagaatcgattgaaactgggaggcagaggttgctgtgagccaagatcctgctactgcactccagcctgggtgacagagcaagactccacctcaaaaaaaacaaaaacaaaaacaaaaaaacagattgccttggtttgaatcctggctccatttccattcagtagcactttattttcaggcaagttatttaacttctctgtaccatagttttctcatctgtgaaacaggtatacagttgttttgaggttaacatgagttaatacatgtaaagcatttaagctgtacctggcatacacaataataaatgtgttcaataaatgttagtcactgttattaaagtatgaaggataacagatttgacatacttggcagtaattcaagggagcagaaggcagcatagcgcgttaattacaagcacagactctagagtcagacctgagttgaaatcctggcccttgcacttgctagttgtgtgacatcaggcaaactacttgacctctctgagccatggtatcctcatctacaaaacagagtaataattcctacctcacagaattattgtggagatgaaataaaataatgcattttaagagctcagcaggtgctgtctggaataagagttcgaagtactgtcattgagagtgtacttccaagttactgacaaaagcttgatttttagattactggtataaaccaaaaataaaattcagaggccccccaaccatctgaatggatttccttctcaaccagggctcttttaaaatttaacctgagagactgtttcaggccatgatgggaaatgggggtcaaacatgcctcagtatacctctctggcattaacatcaacacagactttaagtatgataagaaacattttacaaactctcctctctaaagcctagtacctcaaggcttcctctgcaaacagtaacttgggttgccacaatcctttatcttaacccaggcattcctttctgttgaacctaggttttttgttttttttttttctgagacagagtctcactctgtcgcccaggctggagtgtagtggcgcgatctcagctcactgcaagctccaccttccgggttcacgccattctcctgcctcatcctcccgtgtagctgggactataggtgcccgccatcatgcttggctaattttttgtagagacggggtttcaccgtgttagccaggatggtctcagtctcctgacctcatgatccacccacctcggcctcccaaagtgctgggattacaggcatgagccaccgcgcccggccgaccctaggtccttagataagctcaaccaattgtcagaaaaattttaaatcaacctataagctagaagccccctgcttcaagttgttccatctttctggaccaaaccaatgcatttcttaaatgtatttgattgaagtctcatgtttcactaaaatgtgtcaaaccgagctgcaccctgaccaccttgggcacatgttctcaggaccacctgagggctgtgtcatgggctgtggtcactcatatttggctcagaataaatctcttcagatattttacagagtttgattttttgttgacactggcaagtttatcccatgctaaacttttactatgggttgggttttgtttttttgttgttgttgtttgttttttgtgtgttttgttttgagtaacttcagtagtaaccttaacaatagtctgttttgacaggtttttgacacattcttactatagtcacctgaaccaatgaaatcctctgcctggggcatttgaaaaatctttgtaatatggctctagcccatttttctagcctcatttctccatgttctagcaacatcttgcacatagccagatgtttcagtcaaattaaattattttgattacttgtgttggcaagaagagtcaaactgcaaaatattttaagagatttattctgagcctaatatgagtgaccacagccagtgacacagccctcaggaggtccacagaacatgtgcccacggtggttggggtgcagtttggggaggcatgagacatcaatcagatacatttaagaaatacattggtttgatccagaaaggcaggacaactcaaagtgagggcttccaggctataggtaaatttaaacattttctggctgacaattggctgagtttgtttaaagacctgggatcaacagaaaggaatgtctgggttaagataaaggattgtggagacccatgttcttatttgcagaggaagccttcgggtactaggcttcagaaagaataggttgtaaaatgtttcttctcaccctgcaaaacagagtcttgctgtcacccaggctggagtgcagtggtgcaatctcggctcactgcaacctctgtctcccgggttcaagcaattctcctgcctcagcctccctagtagctgggattacaggcgcccgccaccacacctggctaatttttgtatttttagttgagacagggtttcaccatgttggtcaggctggcctcaaactcctgacctcgtgatccgcccgcctcggcctcccaaaacgctgggattacaggcatgagcaccgcacccagcctaaaatgtttatcatacttaaagtctgtgttgatattaatgccggagaggtacaatgaggcatgtcagaggcccacttcccgtcatggcctgaaacagtctctcaggttaaattttaaaagagccctggttgaggaggaagtccattcagacggttgggggggcttacaattttatttttgttttacacttgttatttctcactttcatgtctttgcttgttttattttctttgcctgaaatgtcctttacccagtgtcctcctccatgtttcaaaagccctacctttttcaaatatcttcttcattaatctttttctgatcctctccttgaattaaaatgctgttgaagcggcgtcattgtctggggtaaatatccgagatttgttgtctcaacagcaatggaaaactaggatacggacacaccagagtgaggttacgagtagaagtttaacaggcgaaagaaagagaagagctcactgcagctgacagcgttctcgaaaaaatgagttgccacctctgtggtgaaatgcaggttttatagataagcttgaggaggtggtgtctgatttacatagggcacaaaagattgattggattggtgtttcatttgcataactttcgaaaaactggttagggctaggtgtgtcatttgcattgggtgcgaaaagctggccacccccaccctaatcttttattatgcagttgggttatttacgtggccagcgccatgttgcccgtttctttactgtacacgtggtgacaaattaaagggaggacagaacctccatgttgaacatacttggcccccaggtagcctttttctattggcacagctgccggcattcaccagtgcaagcttccagcttgcctttttatttatttatttattttttttttttgagacggagtcttcctccgtcgcccagactggagtgcagtggcatgatcttggctcactgcaacctctgcctcccaggttctagtgattctcctgcctcagcctctcgagtagctgggattacaggcgctcaccacccaccaccatgcccagctaatttttgtatttttggtagagacaaggtttcactatgttggccaggctggtctcgaactcctgacctcaagtcttcctcctgccttggcctcccagagtgctgggattacaggcatgagccgctgcgccaggcctcagcttgcctatctatgtttgcagctcgatttttcaggctgctctttgttagaaaaaaataatttcttgggctgctttttattaaaagggaagttctgccgaagactcttttaccttcactatctggctaaataatttctttctagctcctgtatcactgcgtcttcctccttcgaatcctgttttcatgtgtctcttaaagcctttatcagagtactgttctgtatttcatccaatctaataggtcattgattataaaataccattgttttgtgtatcaataagaaagcaaaaaatgctgccagttacactgaaacatcatcaattataagacacaaccttagaggtgagaaaatgtgaaaaaaaaatgtaagctttagaattgatgacatatggtagttctttgtgaaagtgtctgtttcacaccttctcactggatagtaatttccctgaggggagggagggattatgatctgttcatatctgttggtgcctggcacctaagagggactcagtaagtatctgtggatttactggcccttaacacattctctcatgttgtctagcctttatgatattattagaagagttaataccctcaacagttgaccctttgaataatttcttgtgtctggcttctggacaagaggaaatcaggacaaagagctaactactgagtggatcatgattgaatgggctgctgtggtgtggcggttgaatggaatttgcaacaaatgcaattcgtagttattctttttctcctcagtacacacacagtgtttcttaatggcaataaagtttactttcctggccattagcagacttcatcattttggttcctaattgtctttttcccttgtcttctgttcagtataaatgacatcgcatttaagcctgatggaactcaactgattttggctgccggaagcagattactggtaggattttgtcttagtttcctcttaaagtgcttccctaacctccctcttgtgagtactctgaaatttgaccctttttttttttttttgagattaaaaaggcaagggtggaaaaaccttccctattactttttaatagggatggaaatgggctatttaaaacgggcaagtaaactatcagataagaacctgtgaacaataccacctttggggtcattcatctttccctttttactttgagacacccatgaaagagttgaaaacaatcacaatgcctttgaaactggactggtgtcagtttacattttgtcccccagaaaaattcaagcaacaggactgacggtgctgtgtccatgaaaagtcagatagcctgaccccaacttttaggcattggcctatctaaacagttccatatggatgttgtcctatttttcatattttcaaataacataagctccctctggaacctatccaggtatataaaagtaattttcagagaaccccttatgtttgaccaaaaaacctttgtatgatctctctttctgtctaagtctacttcctcttctctgttgtctctagatacgcagactgattaatctccattctttgtatggttaactacataatcttaaaacatggttaaattgttctgcagacttctctccagtgtaaacaatccaaactctattagtttttctacataggttatcttttccaatactctaaccatttcagaaagtttccgcttgatttctcagatggtgtgtgtgtgtgtgttttttttttttttttttttttttggagacagagtctggctctgtcgcccaggctggagtgcagtgacgcgatctcggcttactgcaagctccacctcccgggttcacaccattctcctgcctcagcctcctgagtagctgggactacaggcgcctgccgctacgctcagctaattttttgtatttttagtagagacggggtttctccgtgttagccaggatggtctcgatctcctgacctcgtaatccacccacctcggcctcccaaagtgctgggattacagaggtgagccaccgcgcccggccagatggtgtgtttttaaactctccacatagtgatagatgtcacatggctatcaaatacctaaatccatattacagctgggttttattttatttcttagagacagggttgtgctctgttgcccaagctggtgtgcagtagtgcagtcatagatcactgcagcctcaaactcctgggcttaagggatcttcccacctcagcctcccgagtagctaggactgtggacacacaccacctcgtccacctaatttttatttttttttatttttatttatttttattttttgtagagatggggtttcacttagttgcccaagctggtcttgaactcctggtttcaagcaatcctcccacttcagcctcccagagtgttgggatgacaggagtgagctaccatgcctggcctacagttgggttttataacattccctcctacttgaaagcccagagttctgtgactttcaaattcttggtagcaaatatgaaacatctattatgttgatttagtgcagagctggcattaaaatttaatcatgttgtagctggctctttttatgggctagttttatttaggagggcctgccttgatcaatcatatatccaaattcaggtaaggatgagtataaagaatttccatggagtgagtaattgaacctttggttctcaaggattggtagtatattcctggtcacatagtacatagacctgggtcctctacttcttggttacccaactttaagtcacgttgtttttggttttgcagtgcagtttttattggctacagatttagaatattgacacgtattgttataaaaacaaaaatagcagtagcaaccctgcaggaattctgactaatagatatcacatagataatctgtatttgtctcttttgccaggtttatgacacctctgatggcaccttacttcagcccctcaagggacacaaagacactgtgtactgtgtggcatatgcgaaggatggtaaaaggctgctctgggtttccattctctataatagcctcatcattgttcatttttctctttagtcactttttaattatttctagtaagctggagtacaagttgcaagttcagaagacagtgaagttgctaagacttcagtttggtcattcaatctagcaagtatttattgaggtcatctatgttccaggcactgttcaaggtgcttgagttacttcagagaaaaaaacggtggtccctccccttatggggcttctgttttatggggtggtggtgagaagtgagggaggaagaaagtatgagggaagacatacagtaaacatagtaaaaaggtaaattaagtagtatgctggaaggtgataactgttatggaagaagaaaaagtagagcagaatgagggggattgagagtgctgggcagggcagggggttgggtacagtattgaattagactagtgagggtgggctcattgagatgaggacaggtgaggaaaaagactttgaagtcaggaggcaatgagattgtgccagtgggcatcggggggaagagagctctttgcagaggaagagccattgcagaggccctcaggtgtgggtgtggctgctaggagctggatcaaagagaatcgggaattgtagaggatgaggataaagtggtaacagacatggggtggtcagatcataaagattttgattctcagtcaaaatggaactactgaaaggtcctcagcagaggagggatctgatttgatttgtattttaaaaggatccctctagttgctgagttggaaacaacctgcaagaggtgagggttaggacatctgtgtgaggaagcatcatccagacagggggtgatggtggctcagacctctgtgggggcagaggaggtgatgagaaattatcagactctggatataatgggagggtggagccaactggattgtctgacagattggatatgggctatgaagaaaaaggagtcaagtttttgacctgaggactgaaaggttggagttgccccccccactgagatggaaaagactgcaggtagagaaaagttatggttgaagatcagaaattcagttttatacatgctgaatttgagaaaagttgatgatgtcggagaggggagagaactgctggaacagagttgttgagtaggcaagaggagatgggatctagggcatagacggggtatttgctttagataggggcacagtaggaactgcagaggccagcagatggggacaatgtggtagtaggaatctaatggaaattctcaattccattttttttttcttcagtgaaataggaagcaacagcaactgagagtggcaatggggaagggaggtttcagagagttgaagagaaagggaaaaagtgtaaagtcactgcctcagagaatgggacagcgagtggacccaggaggtgtagtgagatccccggtgacatgaagggccctcttgaagattgtgatcatgaattgaaagtgagattagttggtgtgattgtgtctttttctccagcgattttgagctgcatagttgtagaggcagaagaggtgaatttaaccagaggtggttttgcaagcacatttgaagatgaagtaggagggcaagggagcagaaagtgtatacagataaataattatgtacattaaccttgaattgttggctgaataatgaagggagagaggacagcaatggagaagtagtaggttctggtggtgttgaaggattgttacagttggggtaccaggtgggttgggaaggaagggaagtggtgcatgaaactgagatttaaatttattttaaaataaatccatgttgtcccacagcataggattagtgggaagaaatgggctttggaatgagacagttgtgagttccaaccccaacccaacaccagagttctgtgagtctgagctggttattgagtctgagtcacgatttcttcatgtatcaaatggataacattgagataacattctgtagccactgccaagaagtcacaaaattgtaatgttataattcttgaatgaaccttggagattattccagtcccaggtttttaacttcttttggctgatgggcctctttgataatcagatggaagctttagaccactttctagaaagatgcaaattcttcatgtgtatgcagaatttcatgcatataattttagtctgattagtccagtctcttcactttagtcctgcataaagacataaacaattggccaggcacggtggctcatgcctataatcctactgaaatcctaaagctctgggagcctgagttgggaagattgcttaaggcaggagtttgagaccagcctgggcaacatagtgagactccctaaaatctggcctgggtgacagagctagactctgtctcttaaaaaaaaaaaaaaaagacaagtcatgtgacttgccaaggccatgcagcagattggcccaaagacaaaactaatttcttgcttcatagtcaggtgtgctgtaccatggtagtcatatttgtgtgtgtgtgtgtgtgtgtgtgtgtgtgtgtgtgtgtgtgtgcatgtttgagttcaagttcagaataatgttttagggagacctgtgaggagggagcctggagagctgaactgtttctgtctcatcctagtggctgttgaggaatgtgggtcagtccagggcccagtataaggcccagtaggtacagaagagctattgggcctctggtgcctctggtgtttataagcatagcagggctctttgacctgcaacaccattagggcacttgaggatgtcagagtgtgacccatcagtagtggcatttgcacagcactttgcagagtcctgtcacacacatctcacttgatgcttccaacaactctctgaagcaggcagcaaggggactcttatctccgctcaaagatgagaaaacagacttggagcaattacaggtgatggtggcagaggcaggcctaacccaggttctctgactgcagagtctttgttctttctagtgtatcatgctgcctcttcatgacacctgtataatgattaagaagtcttttagtcctcagaattggttttttcctcttagacctgaagattgagatacactgaattccagctttgctctttaagtctgcttgtttctgatttctcctttaagttcattaagttttttttgtttttttttttgagatgaagtctcgctctgtcgcccaggctggagtgcagtggcgcgatctcggctcatggcaacctctgactccctggttcaagtgattctcctgcctcagcctcctgagtagctgggactacaggcacgcgccaccatgcctagctaatttttgtattttcagtagagacagggtttcaccatgttggtcggcctgatctcaaactcctgacctcgtgatccgcccacctcggcctcccaaagtgctgggattacaggcgtgaaccaccatgcctggcccaagtttaataagtatttaatgagcaaccatgatataaaagtatgtaagacatagtttttttgttcaagaaaaacaatataatatgaagaaataatagaaatagctaatttttttttaattctattccaggcccagttctaagcaacataagggttaggggtgccactgcctgtgcaataaaaaatctgcatgtaatttctgaaccccccaaaactttactattaatagcctactgttgaccagaagccttacctgttacataaacagttaacacatttttaatattatatgtattatatattgtattcttaaaataagctagataaaatgttaattgagaaaaaagaaaaatatatttactcttcattaaatggaagtggatcatcataaaggtcttcatcttcattgtcttcaggttgaataggctgaggaggaggaggaggaggaggaggaggaagagggattggtgatgctgtgccagggagacagaggcaaaagaaaattcacatgtaaaagtggactcatgtagttaaaactcatgttgttcaggggtcaactgtatgtacacatgtacatacactcatttaatcttcacaccaaccatgaggtaaatactaacattgtatccatttttcaaataaggaaatgaaagctcttcagtagcttgtttgggtcatgcagctggtcagtgagatctctaggaattctgacccagagactctgagcccaaagcttatgcttttcatcaccatcacctgctacctaccaggatgagggaggagtgatggaaatagtaagagcagtttctttgtttatttagtatttgcagcaatatcatatggctcaccctaatatctactatttcagctactgtaaaaggtacttggccgggtgtggtggctcatgcttgtgatctcagcactttgggaagccaaggcgggtggatcatgaggtcaggagtttgagacaagcctggccaacacagtgaaacctcgtctgtactaaatatataaaaattagctgggcatggtggtgtgtgcctgtaatcccaactacttgggaggctgaggcaggagaattgcttgaacctgggaggcggagattgcagtgagctgagattatgccactgctctctggcctgggtgacagagctagactccgtctcaaaaagggccagtcgtggtgactcatgcctgtaatcacagcactttggaaggcggatcacctgaggtcaggagtttgagaccagcctgcccaacatggagaaaccccatctctactaaaaatacaaaaaattagccaggtgtggtggtgggcacctgtagtcccagctactcgggaggctgaggcaggataatcgcttgaacccgggagtcggaggttgcggtgagccgagatcgtgccactgcactatagcctgggcaacagagtgagacttagtctcaaaaaaaaggtactttacagatactatcttagttgactcccataaaaagactctgaggaagatactgttcctctgtgtttcagatgaaggcattgaggctcagagaacagtgacttgcccaaggtcaccttccacttgccctgtgaataaagtctaaaagtccttaagatgtacagaatgtggcacatacttacctcttaatcctcgtctctcaccagagtaggtgaagaccccgttatttgctgccatggtaccgtgatcctcttccaaatgcttataaatgtggaacagtgtaattaataacaaattacttgttatatgttgcctctctccagtctgttccttcataaagcccaagtagtatgaaaatgcgaatctgatctatcactctttgcttaaaacctttctttggcttcccattgctttaggataaagagcaaggcctctgctgtgtccctgaggtcccaagagatccttccacaacccacctcacccttccctccgttccatgatgactccgctcattccctcagacatgccaggcttttcctgcttcagggcctttgcacatctgttccatccatgtggatgggtctgtctcctctctacatctggctaagctctgctcatcctttaggtctccactgaaggatctcatccttagagaaatgttccctcatctaaattaggtcccccaggagatgttgaccaaagggtagtttcagtcagacaaaaggagtacatttttgagatctattgcacagcatggtgaccatagttaataatagcgtatatttcaaaactggcacaggaatagtttttttttttttttttttttgagatggagtctcgctctgttgcccaggctggagtgcagtggcgtgatctcggctcactgcaagccccacctcctgggttcactccattttcccacctcagcctccagagtagctgggactacaggcgcccgtcaccaggccggctaattttgtttttgtatttttagtagagacggggtttcaccgtgttggccaggatggtctcgatctcctgacctcgtgatccacccgcctcagccctccaaagtgctgggattacaggtgtgagccactgttcccggccaggaatagattttaaatgttctcactataaaaaaataagtatctgcagtgatggatatgttaattagcttaatcattcttcaatgtgtatgtatataaaataccacattgtacttcataagtagatataattattatttgtcaaaaataaaaatttaagtaaaaaagtaaatcaggttccccagttattctctttcataggatccgtgtcttaccatgttgtatttgtgttagattaatttgatgtgtacttcttacactagactgaactttatgaaagtagggatcatgtgtgttttaatcattacttaatccctagcatagaacatgacagctacatgtagtaggctcccaatacatctttgtttactcagtgtcagacaaagcaggtttggaacccaaatattctgactccaaggtcctgcctcccagtactgataagaactaggaaagaagctaacacttactaggtaccttaaagaactagttttctaaagaattctctctgggaaatgctggtttaagataaatgtaagactttccattttacaaacacttttaggcaagcgctttgcttctggatcagctgacaaaagcgttattatctggacatcaaaactggaaggcattctgaagtacacgtaagtaacttaggtgtacagtattatgagtttgatgcttattgaataattgcagcaaaagcctcttagaaaagatgtaggagaaaacttttttctcttaaattgaacttgaaattaagttgtgggtgtgtgtggttggtataggaaggttgagtagtgaataagttaatgaatatttcttggccacttactggcgtggccagcactgggctaggtgcttttatgtagctcatctcagttcatctgacattgtagactttatcccacccccaacctgtcatcttccagtgtccctgtctcagagaatggccttatatccacccagtgtcaaatgtcagaaacttggggtcagtgtgctccaggcctcctcttactattggggatctgccgtgttcttcccctgttcctctactagttggtccctatttaccctgcagatctcagactcaaatgtcagtttctttgtaaggactttcctgcctctctagactggaacaggtctctttcgaggcatttctcacaattgcagttttaggtttattctggtgactgatcagtattgctcatcggcctgtaagttccataagaacagatactgcatctattttttgttttgttttgttttgttttgagacagagtcttgctctgttgcccaggctggagtgcagtggcacgatctcggctcaccgcaagctccacctcccaggttcacgccattctcctgcctcagcctcccgagtagctgggactataggcgctcaccaccatgccaggctaattttttgtatttttagtagagatggggtttcaccatgttagctaggatggtctcgatctcctgactacatctattttttttttctcactcttgtgtccctgatacaatgcctagcccataattggtactcaccaattttccttccttccttctttccttccttccttccttccttccttccctccctccctcccttcttccttccttccttccctccctccctcccttcttccttccttccttccttccttccttccttccttccttccttccctccctccctcccttcttccttccttccttccttccttccttcctttcttttcagtcttgctctgtctcccaggctacagtgcagtggtaactagctcactgcaactacaaccttccaggctcaaataatcctcttacttcagcttcccaaatagctggaactgcaggtgcacacccccacaccaggccaatttttaaatttttttttttcttggtagagacagggtttcactttgttgcctgtactggtcttgaactcctgggctcaagcagtcctctcaaagtactgggattacagatacgagccactgcacctggcctcttttcaattgtggtaaaatatacatgacataaaatttatcatattaactactttttaagtttacagtttaatgttaaatacatttacattgttgtgcaaccaatctcccaaactcttttatcctgctaaactaaaattctatatccttcaaatacctactcacccttctctcctacccccagcccctgaaaaccagcattctactttctgtctctctgagtttgactgctttacatacctcatataagtagagtcatacaatgtttgttcttttgtggctgagttatttcatttcacgtaatgtcctcaaggctcatctgtgttgtagcatgtgtcagaatttactttctgtgttgtagcatgtgtcagaatttacttccttttttttctttattattatttttttttatgaagacgaggtctcactatgactcctgagctcaagcaatccttctcccttggccgcccaaactgctgggattacaggtgtgagccactgggctcagcttccttcctttttaagtctgaatattattccattgtatatatagaccacattttctttatccattcatctgttgatggacacttgtgttgcttctgcttcttagctattatgaataatgctgctatgaacatgggtgtacaaatcaacaaacaatttttgaaggaatgaatgaatgagtgaagttgtaagtaaagtattacccacaagtgaaggactaaaacgggttgagacgccttgcatggtacatgatttgctcagctttcattgttgtctaaggatttgtcatgtttccagatcttggtctgtgatgtcttcattgcacctccatcttccatttctgggcctccacaaaacagtaagagtaacagccacagataaagcacctaaaggccaaggtgggaggattgattgcttgaggccaagcgttcaaaaccaacctggccaaaagtgagtccccatctctacaaataagaaaacagtgggtgaggagaaggagaattaattctttaggagtaggagaattaatttctgtgctttttgttggtcacttgcagaagagcatgtggtctaaagtcagaggctgtgggctcattattaaaatcttcagttgtagccactgaaatctttgtggtttgctgcatagtaatctacagttgtttacttcccaggcacaatgatgctatacaatgtgtctcctacaatcctattactcatcaactggcatcttgttcctccagtgactttggtacgttctgattcctgatgtcctgtcctggaataactgaaaatctgggctaaaaatgctaaaatgcattcagaatatggtgattttatcctgagagagttaatactacttctctaccttcaatggctgaggggaggctgacagttattctttaaattgtgtggaaaccaagacagtgaatggtgacctttactctggtaagacatcagagactacaggaagggccccagcaaaggaaatggtaacaagattgggagggcacaggcataacttggtgttgctgcctttgggaagccttcccttggtgttgctgcctctgggaagccttccctgactcaccctggcagagacagtgcagttgtcctcacctttgtattgacccacatctatgtttatgtgaaattcttcactgttgcggttctacttcttgtgcaatttgtcgtcattactggtttaggtggctgtagctgtcctccctgaggggctgaacaccttgaggagttcatcctggccacggtcccgtgccagcattacagcactggtgtagtactggcacaaaagaggtgtcagtaaaatgtctgtggagggaggaagggagtgaaattgggcagaggcttgtaggttatttccattaatggttgattctgttttcagctctatcagtctgtgttcgttgctagtggatacaatgaagtcactagatgaggagtcagaggcctaatccctctcagtgttccagttcccttatctaaaaggagcatgctactcactgtgtctcactgatacggttctggttctgaggttcaaaagagagaatggaattgaaagccaattgtataaatacatggagaaaggcctgtcatttgtttaacatattttatagcattttcttcatgtgaagcactggtctgtgtgcttacactggaatattaaaaaggcaaaatagaatccctaccctcaaggagcttgtggtcttaggagaaggtgggattaaaaaaaatataatattaagtactagtatttattgaatgcttgcagtgtgctaggcactgttctaaggattagaaatgaatttctatttgagctttatgacagcccctgaggtgtcaggtattattctcattcccaccctactgatgaaaaagaggtagaggtcccttagctagtaagtggaggaaccagggcttggactttagaccaggtgattgcatacagagcctgctctgctaagcactgctgaaggaggcccaggaggaaggagtttcttccagcttggggctccaggcaggcttagtggaacacagataacatgtgcacacgtcaaaatgtttggaggaagcgttctggaccaggggaaaggcaaaaaataacttgtttgatgttgcacttggccatgtatttgtgcactggagttaccttcttgattgtacttcgcaacttggcaaatagaagaatttgcttatgttgtctagacatacacttgctatgaggcactgagccagggcatctgggacaggggggagcaagccttaggtgaccagtgtgccatgggagaggcacagctcagatagagtcatgtgttgtgattgagacctatgaaagaaaactagattttcagaaagcatcattgttattttaaatgctaggttatactctggttgcagtgtcaaagttataaacaatgaaactgtcatttctttgagagtcaaatccctgaaaagttggctagaactttaccaatctattttatttttcttctgaaagaatgatagattcatagtaagttacaaagatggtaccaagaagtctatgtacttttcatccagtttcccccagtggatccatcttatgtaactattatacaatatcaagaccaggaaactgagactggcacaaagtgtgtatattatatagttctgttgttttatcgcatgtgtagattgccatcagcgtgacacagaactaagccatcaccatgcagttaccacttagtgtcatatctactcaccttacctccagttatctccaaaccctggtaaccacaaatctgttctccatttctataattttgtcattcaagaatgttatataaatggaatcgtacagtatatgaccttttgagattatgttttttcattcagcataaaatcctggagatccatctaagttgttgtatgtttcaattatttgttcctttttattgctgggtagtattccaaccaatccatcttcttttatattattgtgcattgaagggttgtggtctcctgaacagaagtctgtctccaaacacaaatcaagcagcaagatcatctgctgcaggtaagtgcagctctgacgataagatttatgttccttcatcttccacacagactctcaaaatccaattatttcatgcagcagagaaggtcttgtgttaggtagttggtttaggcccctgtatttccttttttcttctttcttcgtctcctcgatgggaaagacttgtgcctttgatcatgaagcaaaagagaactacaagttgccttcatgcagttacttagcaacaagcctcaacatccagctatactgagtggaggcttgttgaaaatgtgaggctgtcattgtccaggcagcatgtgtggggaagaaagctttccctcccacactttgatgctagacctgaattagaatccagaatctctcattgacaggccatgtgacctcaggaaagttactaaatctttctgagctggagctttacgttcctcatctgacagatagggataaaaatactgacttgacgagattgttgtgaaatgcacacaaactcatgagtgtaaagcgtgcaggacagtacctggtgtacagtagacactctaaatggtagctattcttgctgttcagcttctaggagtatatcccttccgttcagcatctgttgagcaccttctacaaagcaagcactgttctaggggttggaagacaccaagtctgttcttaaggtgctctttaagtgggaggggattgagatggagagtgggaagtggtggctggcccagagatgtaggcacaagctaagggctgtcatagaggtatgtacagagggctgggggagctcagaaaaaggcaccaaatggtgccttcacttctcactgtttattacagaactaaatagcattttaagtttgatcctctgactttatgtcaggaccggcaataatgaaaccatatcccagctgttgctgcctcatcagacttttatttcaaaccaaggcatcatcctcactagttttaccttctgtggggtgcttcccctatccccatgccttttgttggttgtgtacacagctggacaaatgatggtcagtacctggcgctggggatgttcaatgggatcatcagcatacggaacaaaaatggcgaggagaaagtaaagatcgagcggccggggggctccctctcgccaatatggtccatctgctggaacccttcaaggtactcttaaagttgtcctccttctagaacaaacaccatcatgaagaagggctttttgtcttcctgaggtctccctacattcaaaggcttctcacctcacttgaatggtctgttttagaacctgtcccatttgtatggattttttttttaatagtcccgctacctgagaatgtatggaatttattaagagcctcctcaaaagttgagtttaggaatgaatcctggacattttagcaaagcagatgagctatttaggacaggccaaagtgtgtgtgtggcgtgtgtgtctgcgcacatgtgcatgcacacatgtgtacgtgtacatgtatatgagtgtgtgtgtgtgtgtgtgtgtgtgtgtgtgtgtgtgtgtgtgtgtggtgtgtgagtgatgcagcaggaccatttccttatgaatcaatagtggagctctttgctgtggctttatttttgcctttccttttttagttcttccctccaagtttgggcagaatatgtgcccacctgttaataaatagctttttcatgagcctttttttgcccttgtcagaaagtcaaaattaagtctacagacgtccctaaagcctagagatacacaaacaattggcacctaccttcttaaattttatacacactttgctttctatgtccatgtgactttgagagtaaactaattatatgctctttttttttttttttttttttttgagatggagtctcgctcggttgcccagcctggagtgcagtggcacaatctcggctcactgcaacctccacctctcgggttcacgcagttctcctgtctcagcctcctgagtagctgggattacaggtgcctgccaccacgcctggctaattttttttttttttttgagacggagtctcgctctgtcgcccaggccggactgcggactgcagtggcgcaatctcggctcactgcaagctccgcttcccgggttcacgccattctcctgcctcagcctcccgagtagctgggactacaggcgcccgccaccgcgcccggctaattttttgtatttttagtagagacggggtttcaccttgttagccaggatggtctcgatctcctgacctcatgatccacccgcctcggcctcccaaagtgctgggattacaggcgtgagccaccgcgcacgcctggctaattttttgttgccaccacacctggctaattttttgtatttttagtagagacagggtttcaccatgttggccaggctggtcttgaacttctgacctcaggttatccacccacctcagcctcccaaagtgctgagattacaggtgtgagccactgtgcctgaccctatatgctctttatatatcctataatattattaaaccatcagtatcctttacagagtcctctgagggtaaacgaaaggtcctacttgtttaccagctcaatgtcattttacagatggttgcctacttgatttagaaggttgtttggaaggttattatgcttcttcctgaataattttttttggcccatgctgtaccatgcatgtctaatgctgtcaaaggccattagcctgccccagagttcctgctgtttgatttgtggctgcagaggacttggtggctctaggctaccatttttaattcatgagaagcaggaggccctgtatacctggtggctgtcctcctccaggtagggttcagaggctccttttattttttatttttattcttttttttttttttttttttttttgagacggggtctcactctgtcacccaggctgcagtgcagtagtgcgatcttggctcactgcaacctccgcctcccaggttcaagcaatcctctcacctcagcctcccaagtagcttggatcacaggcacatgccactacacctgtctaattttttgtatttttggtagagacagggtttcaccatgttggccaggctggtcttgaactcctgatctcgagcgattcacttgcctcggcctcctgaagtgctgggattacaggcgtgagtcactgcacctggcccccaggggctccttgccaggattttaaattatagttttagtgtagttctaggcaatgtaattttgaacaactacttactgtctacagccgatgggagagtttctggatgaacagagagaatgaggatgccgaggatgtcattgtcaacagatatattcaggaaatcccttccactctgaagtcagcagtgtacagtagtcagggtagtgaggcagaggaggaagaaccagaggaagaggacgacagtcccagggacgacaacttgtgagtgtgtcccagtgagtgggaacccttctggtaagggcccaggccccacacagacttgccaggacagatgttaaactctttggccaagggagtgcagggactagggggaactgtgggtgaaagcgccttcaaaaaaaggagacatacccttaaaacttgtgtgtgggtataaagtgatcctgtgagaaactataggaaatactgaaaagactaaaggagaaagttcaacttttctgataaaaccccatcccctgaggaaatcactgttagcaatctagtgtatttctcctcagtcttttcgtgtgttcatataattaactaagtcatattctgctttttttttcacttaacattatagtgtgaaccctttccagtaacattacaaatccttcgaagaacatgatttttaatgtctgaaaagtgtgcccttttgtggatgccccatcactcgacacttcctctattactggacacgtttcttagcctgttcccacactatcccttaccttaccttgcattttctaggatgtatatcagagaggaagcccttaccttagccacagtcttcactcccaaatcctggctgtctagtcattcttctcttcagttgagattgcctgtagggaaaacatgggcaggccagagtggggaaagctggggtagccaggatatctcagtttggcagtagagatctagcttgagactttccaaactgttttacatagtacctgagtttccttggaagaatcccaccctgaggtcatgggggctgggaagtggggaccagtaaaggaggaaggtatggctttgggtccccatctcagtgcctttgattgtttcaacatgagtttttgtttcataaagaatcctactgccccaggaggtaaaagggggttgaaaatcactgatccatctcacagggactgagcccagcccagagccatatgtggcctccccaagagggctcactggtgggctgggctcctggattgtgtttggactttggacatcagtgccagtcacacaaaggtcatctgcaggctccctcattaacatccctctcggtctttgtctcttttcccttagttttgggttagtgcctatgacatttgccactcttggctgggttttacaaacaaggctttaccttgcctgcctacatatccagtggtgctaccaggttaccacaagacactgggatcagaaaagctggaattaataaacaaagaggcaacattaggtggattaagacccagcctcaagggctaggaatgcttttcttttttttttttgtgacagagtctggctctgtcacctgggctggagtgcagtggcacgatctcggctcactgcaacttccgcctcccgggttctaagcgattcttgtgcctcagcctctggaatagctgggattacagacacgcgacaccacgccgaactaattttgcattttcagtaaagatagggtttccccatgttggccaggctggtctagaactcctgacctcaggtgatccacctgcctcaacctcccaaagtgctggaattacaagcgtgagccatcacgggctgccgcttttctcttgaactagattcccaggtagcttgctctccagcctcaggcaagggagtttctcctgtgtgctggtcctacagtcccagccccacagcactgatccccataggttctcagtttcaaagacagttgtttgttttcagagcccattgctcttttttgaaaattagattcagtcagaaaccatttcacctgtgcaaggacccccgcctgcaggagaacctatttttaggtgttaattttctttcttcaggaagagcaagcaagtttcccttctattaaaaaatgtctttgtgctgcaagagatgtttctctgccatctccccacattttctagtatgtaagagaaaagcagtctcaatattgcagccttgcctatcttagtgttgctccccagtaagctctgaaatgagaggtttatcttcttcagctgcagcagtgtccccagcaccataaggtcatagcaggggactcagtgaaacagcagatcccaggaaggctgaacctcaactctgcttcatcccgtaagactgattgatgggttgggccaaattataacttttggcttcagtaaagctgtacaacatttggcaacctgaggccaggacttccttgttcctgttgtttaagcccttagagctatactcatcagcaggctgtggcccttcataacctcttttatcttctgttgattagagaggaacgtaatgacatcctggctgtggctgactggggacagaaagtttccttctaccagctgagtggaaaacaggtatgtagccctgtacaaatccaattgcagtcatgcctgttatattttcattttctgagattctgttactattaattatacattatcattgttagttcctgcttattgagcatttgctgtggtaccagatactgtgctcactgctttgcatactttatcctattttattcttataaaacccaatgaagtgggtactactttccttatcaactttttagaaatgagtaaaccagaactcagagcagtgaaattatatgcccaagatctcacacagctagtaaatggtggagcctaggagttaaacccaggttggtttgactttaaaatctagctcttaattttgaccttactttcctctattcgctttctttcattcaaccagtatttatgagtacccactcaggaaagccctttcataaaggagctgctgacatagagctgggaaagtgatagcctctacctgcaagagctcacaggctggcggagacacacttgatagcaaagagcccctgtgtggtgtggtatgtgacacaatagaaagctgtacagatagacagctttttgggacacaaaagagggtaacatcactacttggtagagatgggaggtcttgttagaggttatctttgagcaggccatctttgagttaggctaaggacattgggaatggtgtttcaggcagaaaaaaaaatagcatgtatcaaggcaggaaggaatgaaaatatatgacagttcagagaatggtgagttgtacagggtgactgcatctcagagtttgtgacctgaaaacagagctgaagaggaacatgggggtatgattttttatttatttatttatttatttatttatttttaatttttttcgagatggagtctcactctgtggcccaggctggagtgcagtggctcagtcttggctcactgcaagctccgcctcctgggttcacgccattctcctacctcagcctcctgagtagctgggactacaggcgcccaccaccacgcctggctaatattttttgtatttttagtagagacggggtttcactgtgttagccaggatggtctcaatctcctgacctcgtgatccgcccgcctcagcctcccaaagtgctgggattacaggcatgagccaccacgcccggcctatgattttttgtttgtttgttttgagacagagtctcactctgtcgcctaggctggagtgtaatggctcaatctcggttcactgcgacctctgcctcacgggttcaagagattctcctgcctcagcctcctgggtagctgggattacaggcatgtgccaccatgtccggctaattttgtatttttagtagagacggggtttctccatgttggtcaggctggtctcaagctcctgacctcaggtgatccacctgcctcagtctcccaaagtgctgggattacaggcatgagctgccaccacgcctggctggagatgtgattataaaggacctgagtagtgtgaataagaagtttgaacatcatatactgtaagtattcaggagccataggtggcaggaagtggcatcacagattcttgcttcagaagaataacttgtttccatggagggtggattaaaatatagagagcatggtagtaggatgacttattagtaggcaggaaatgccaaggattagagtaaaggtgctgggtacagatttcacaccacagccaagcaagtgagaaatgcaacctgtgcagtgaagcctttaattgcgtagcatccttattcctcaaaacatgtcatgtaagagggaagagttttagatgtgtgtagcccagcttttgggccatttcttctacccctgccttaccattggtcatttcttttgtattcgagtaaagaaaagataaagggagcagataatgaagtattttctcagtttcccatggctgatttcctaaaactctcattttaattaactatcatctagtttccctggccctctctattcatctgcttaatgtgtgtacatcatcattcaacagatacttattggcacacctactgtgtacgaggcactggatgtgggtactgaagactcttgggaacaaataaccacactgcagtgggagggaatggggtcttgttgctatggccacagaagaaaagagctcaacatggccgagggccacaggaaatatcttgcatgtatgcagccccagagctcatgttgtggcccaaagtttctgcacgatgagcaaccttaacctgctgagatggtaaccccaacttgtttgggacagtaaaattgttttcttgctgggtgtcttcccttcccaatctaggaagatttagaattcaatataggatgatgaagtaaatcaaacccatacttttgtgttagtctgaggtataatttgtgtatttttgtcatttgaagtgttagtaatacttaaggggatctggcttaataataataatagctaacatttattgaattccaggcattatataaactctttacaaggattaactcttttaatccttataacaaccctatgaggtaaatactgttatcatcaccattttacatgtacgaaaattgaagcacagagaggctcaataatttgcccaaaggcacacatttagtctgtggtccaccctgctgaaacccaggcatactggtgccagaatccatattagaatgtctatcagattagtcttgcaatgaccattcaaaagttgtattgagtaatttcatatgtctgattttatttactttttgagaaaaggcctcaccctgttacccaggctggagtgcagtggtatgatcatggttcactgcagccttgatccccctgggctcaaggaatcttcccactttggccttccaagtagctgggactacaggcacatgccaccacatcctgctaattaaaaaaaaaaattttttttttttggtagagatagggtctcctatgttgtccaggctggtctcaaactcctgggctcaaatgattcttctgccttggcttcccaaactgctgggaatacaggtgtgagccaccatatctggcctacttctgattttaagtggaaagataagaattatatttaaagtgtatattatttaaggttcctaagcaatattggaatgcttaagcaatttgttacatttttcttcttggtgttcactgagctttttgaatctacacattgatatcgttctgtctttcaccaaatgtgaaaacattttggccatgatttcttgaaatatttcttcttctccattctttcctttcctctggaactctaattacacttacattagaccttttgttactgttctccaagtcatcgaggccctgttattatttttttaaatcccttcttttccctctgatcttcagattagaggatttctgttgttcagtattaaatttcattgactcttctgcaacttccaatatttttcttaagctcattcagtgtgtatttgtttcagttattattgcatttttccttttctagaatttccatttggttcttttttcctttttattcattacaagcgtatttttctttatagccttaatcatagttataataactgttttaaaattctcatctgcagctgggcatggtggctcatgcctgtaatcttagtacttctggaggccaaggagggacgattgcttgaggccaggagttcaagactagcctgggctacatagagagactccatccctaaaaacgaacaaacaaattggccagggaggtggcaggcacccattgtcctaacaactctgtaggctgaggtgggagtattctcaagctgaggagttcaaggctgcagtgaactcttaccactgcactccagtgtgggtgacagagcaagacctgtgcccaaaaagcaaacaaaaattcttatctgctatttctaacatttgggtcgtcatggttcagtctccattgatttttttcccttgaatatggttcacattttcctgctttggggaattttgaattgtactcaatattgtgagtaatatgtcataaagactcatatccatcatgttcctctgaagattattgtgtatgtttgtgtgtatatatgtttaagcaggcagtttactttgctgggctcaaaatcaaaactccatgttttcagtggtgtcagcagctgacatctctgtgcagttctttagctgtagctaggctgcttggcatcttgtcacagtttatagttcaagggtttccagatattcagtggagtttatgtgcagaatttaagctcttactttgcttctcttttctgggatttcccacttcactttccgggtgctgtggtcctcccaaattctatactcacccagcatgatggtgaagagggctgccctcaggcaaaaacccttaaaaaaatgagaagttcacctagtgtttgttcccttcttctaaatgtgcatgtgtcttcagtttctgcctgcttttggtcgccctgaaatggttgttgtttatagttggtccagagtttattgttgttactttgtgggaagattggtccgatgggaactagtgagccatttccagaagctgctagccttccatgtcgtgattcataagaatttttagttttcttgttaggttttctagcatcagataagtgctagggaaagttttcgttgctaggcatttgaaattcctatacaggaaaggaaatttgaatgtattaaacttataattgcagtttaaattggtgtaagggaattaatttaactaagttttaaatgggactggatatttaagggattttataatctgttcaaaattggatgccttaaacagtcaaagtcaattggctgttcactttaactagatttataaataggaaaatatttgtaaattgaacttaagaacttaaggagaaaccagttccctaaagttatttcttttataaattgaatattagtttaataatgttaatcacaaatcgtctttttattcacaaaagacacccttggggcagcaaaaaactccagtggtaataaggaacttgggctttagtggggcagacctgattaaccctgtgtctacagacaacgagagaagtgcaatgggataggcgagcacaagtgctgtgggaggatgaggggatggggattggagatgttcctggaggagatgacacctggcagacaaagtgagggaaagagcattcctggctgggtctaggaatggtgtggagtgtagcacctgtgaggatgtggaggcctgaaaaagcattgcccgcttaggaaacttacaagttcattttggctgagagaatgaccttgggggctgagctcgggagtttgacctgcatcctagaagctgaggaagcaccatcaagaaagagaaaagacaacccacagaatgagagaagttttacaactcatatatctgataaaggacttgtatctggaatatataaagagctataaagacagggctgggcatggtggttcacacgtgtaatcccagtgctttgggaggcagagacagggagatcacttgagaacaggagttcaggaccaacctgggtaacagtgggaccccacctctaaaaaaatatatttttaattagctgagtgtggtggtatatgcctctagtcccagctactgggggtggtgaggggctgaggcagaggaattgagcccagaagttcaaggttgcattgagttatgatcatacgactgcattccagcctaagccacagagtgtgacatttctctgtggccaataagcacatgaaatgatgctccatatcattagccatcaggaaaatgcaaattgaaaccacaatgagataattcgcactcactaaaatggagaaattggaatcctcatacactgctaatgcaaatataaagtggtgcattcacttgaaaagtgtagcagttcctaaaaaaggttcaacgtagagtttaaaaataaaaaaatataggccaggagctatgactcactcctgtaatcccagcactttgggaggccaaggtgggtggatcatctgagctcaggagtttgagactagccgggacaacaaggagaaacaccgtctctgcaaaaaatacaaaaattagccaggcgtgttctcacacatctgtagtcccagctacttgggaggctgaggtaggaggatcacgtgaagctgggaagtggaggttgcagtaagccaagatggcgccactgcactccagcctgggcaacagagtcagaccctttttcaaaaaaaaaattttttgccaggcatggtggcactcacctatggtcccagctacttaggaggctgaggcaggaagatcgcttgagtccaggagttgaaggctgcagtgagccgtaattgcaccactgcactccagcctgggtgacagagtgagaccccatcttgaaataaacaagaattaaaaaatgaagagaagtagtatgggtgtagttgcagaataaaggacagtctttaaactgaataaactcagctttataaaatacttttttaaaaaggcggagaaaagaagctgagggaacccattgaactataggaagaactatatttgcagagggaggggggcctttgggaacaaaaccacccacagtctccatcttggcggaggagccctgacacactcctgcactcctggagcacttgggtgggactaggggaggtgccactgactccaggagctgaggtttgggctgtgtagaggatgagtagggagatgcagaggcagagaggcctgtgttcaccatgggatgacacaggagaaaaggctggccagctctccctgtcttcccaactccctctaaagttggcgagaaaaagcccttaattgtattgcaatggttatggattcggaaatggtttttcccttgctgtgtgttctttttcctcagattggaaaggatcgggcactgaactttgacccctgctgcatcagctactttactaaaggcgagtacattttgctggggggttcagacaagcaagtatctcttttcaccaaggatggagtgcggcttgggactgttggggagcagaactcctgggtgtggacgtgtcaagcgaaaccggattccaactatgtggtaagaagagaaagtttgttctgtggggccatggcttgaagaggcactgagcagccgccgtgtctcgagtcacatcactggggtttgtgtctgacaaatgggggaatgcagactttctccagagagctgggaattgacagttctctcaccccgcaggtggtcggctgccaggacggcaccatttccttctaccagcttattttcagcacagtccatgggctttacaaggaccgctatgcctacagggatagcatgactgacgtcattgtgcagcacctgatcactgagcagaaaggtaagaggcaggtccagaccttgggaagagggacaggtggaagcaggtggaaagggctggtgacagggcacttgaaatgacaggaaaaggtttctctttggcgttttgcaaacctgttagccactgggtctgtgtcttgttttcttttttttttttttttggtgggggaagtagggatgccagtctccttgaggatctcatgaaagcaataaatcctctctgaaaaatgtaccaactcagaattttgcacataatttcaaggagtacatgaatttccttagtgagggaggatgatttatgacaggttggagccaggtggttgacctgcatgggtcttcgtggacctttatcctttctggtcagagtcactctggggtgcttctccctcagccctgtctccacttgcctcctggtgggtccttctgccagagatgagcagtggaattggattggcacaggctaggtcagaagatcagagttcccggcctcgcatagtcattctaagccctaagactgcagtctctccctctgtccacttaagttgctgtgctggttaaatagactcaatccacttacttcaggtgtattcatatctggatgtgctggccttagtgcactgctaggtgcctttgcaagggatccaggttgggggttgtcttgtagattcagatgagtgtcctttggtccccctgggggaccctatctttttgaagattctggctgtggtggttggggcaaagccccttgggcagcttcacagtgtcccccttagggacattttctccacctggtctgtagtgggagtgtagagcctggtgtgtaccagaaattacatgtcttccccgtttgtcaaggaggtgggcagggagcggccagaggtgaggtcagttacttaggcaggcttctgatcaccgggggccactagtgctgtgcagaggagtttatatttgtatccagcaagtgatggtaacagtgagtagtttatttccatactcagttgtcagccttggaccatgaagattgtgtcctataggactttggatcccagggttcagcagagttgattgtatgtattagatactctaaagatttttcaatgagagtatctcactttaattgccagtagcgctaagtaaatgatggcttttaatttctctgccttgcaccttacataacaacctcttgctagaactagatatttttttctttgacagttcggattaaatgcaaagagcttgtcaagaagattgccatctacagaaatcgattggctatccaactgccagagaaaatcctcatctatgagttgtattcagaggacttatcagacatgcattaccgggtaaaggagaagattatcaagaagtttgagtgcaacctcctggtggtgtgtgccaatcacatcatcctgtgccaggtgggcagcagcatgttgaaggagttgggctgaattccatttgtgctccccccccagtgatagggtgcccacctcatggttttaaaactggtcactagaaaacaagtctgttccatcaaactaagtggtgcttattggctttcattttcctggcatctggatgaaccagactctatcagcaagtcatgagccataaactggagaatgtttttttgttttattttattattttttaaaaaatatttttcttgagacagacagggtcttgctctgttgcccaggctggaatgcagtggcacaattatggctcactgcagctttgacctcccaagctcaagcggtcttcctcctgagtagctggcaccacaggcacatgccaccacacccaactaattttttatttttagtagagacgcgaggctgtactttgggaggctaaggcgggaggaatgcttgaacccaggagtttgagacctgtccagcttcctaaagtactgggattataggtgtgagccactgtgtctagccaagaataccttgttctattgcagaacatcttgtcatactgggattagatatactttaatgacttaaaacataaattggtgtacagaatgaagatagtttttattgataagcatatacacataaaatttgtatcaactcagtaattgtcaaggaagttttaattcctgaaagattttttttcatagaaaaatatttctcaagattcttagagagtgtctaagtcaatgccaagagaagtttggaaagactttgagagaaggctagcccagcatcttggaagtagaggtggatttagttttacatagttctgttggaggtgataaaagagaagaattccttaggaatcactgtagtgtaaaatactattaaaatctctcaaaagcctagaactgggctgggtgcagtggctcatgcctgtaaatcccagcactttgggaggccaaggcaggatgattgcttgaggctagtagttcgaaagcagtctagaaaacagagaccccatctccaccaaaaaaaaaaaaaaaaaaaaaaaattatttaattagctgggtgtggtggcgcttgcctgtagtcccagctacttgggaggctgaggcaggagaattgctttagccagaaattggaggcagcagtgagctatgatagcgccactacactccagcctgggtgacagagtgagactctgtctcaaaaacaaataataaataaataatcaaagttagaactccaagcggtttagggttgctacaaattacaggatagatgtggcaagtatgtgtacttttgagtgctgcctctggcctaggctgcctgggtgggggtttgcattgaagatctgaggctgaattgggctccgtggggaagccttgcatggagtcttggattaacgatgccaatcgtggggtctacattgggttagatagatggatactgaatgtgtaggtattttctccccttagggacagaaagatctccttggggaggtctgggggcacttattctgttgaatttccatgcagagctgggtttgcttcctaggagaaacggctgcagtgcctgtccttcagcggagtgaaggagcgggagtggcagatggagtctctcattcgttacatcaaggtgatcggtggccctcctggaagagaaggcctcttagtggggctgaagaatggacaggtgagtgctccctcacgtctcctgtcaggctgataatctgcatgcacacgtgggtgacccgtctagcaatgactctgagctgggttctcagggcaggaaaagggcttctctcctccatgggtgaattgtggggcagcctgagttcagttttttgaggacagcctcaggccaaaggtgctgtggccctcacactcctagcaggcccacgttttggcagagttgagctataacctttggctacatgtagagtgtattagtggcttaaggtctccagaaggtgggagatttgttagagatgttgcttctgtggatttctagagggaggcagagatcgttacctaggtcagctcctgattagggcagcgagtggattaaggcagtgcgttccagcatgtgtcctaaagaatgctgggtcctcaagatactgatagatgtcataagcaaaatgggccctttggccagttagatgtgggatatccaggttacacaaaattctgtgtgtgtgtatacatgtgtacacgtgtgttctttgctcagcataagaaaagttctaagtaggctgctacatggaactttgaaagtgacaatgtagctgcattagcctgacagccaagctgtgcagcagatggcttatggctgaggcttgtcaggtctttgctggggatggaagtcacagggcatgagagcagtgggtgaagtcaagcagcaatgccaaggggaggaagggccgcttatttctcaggcagctctcacttccaatgggagcatggactatggggtcaggtgggccggaggtcgtgttcttacttagctactcactggctttgtcatcctgggcaggtcactttacctctgtgaggctggttttacatgaggataataccacatatttcatagggctgtcaaaaacagatatcatcagggttgggagttaaagccaatgttaaaaacaaaacaaaacaaaaaaaacaccaggggtattaaaacaggcatggtggagggtacctgttttcccagctactcaggaggctgagataggaggatcactttgagcccaggagtttgaggctgcagtgtgatatgattatacctgtgaatagccactgcgatcagcctgggcaacatagcaagaccttatctctaaaaaaaattttttttaaaccagggatatcagtaaatgatagctatcatgatcactatcatcattattataattttctaccacatgtcttgtcagtgttcatagtagctttttcctgtgttagttcgtgactcagatctctgctaggtggcatctcctaaagctgcagtttgggtaatgtcatcaacaaatccccagtccgaacagacactgaagtgagctcggcctgtctcagggctgtcattacttctgcagcctctgatgaacctcgcttctggcctcctaaggataagccattgccccccacccccctctttcttttgatgagtccttttccctgcacagagcttctggtgaaggtggtgggagttgttcttgcagagcacatgggattccaacggcctggcagtgggccaggatcttgttgccatggtgactgacactgttttcgctgaaattttgccagatcctgaagatcttcgtggacaatctctttgctatcgtcctgctgaagcaggccacagctgtgcgctgcttggacatgagtgcctcccgtaagaagctggccgtggtagatgaaaatgacacttgcctggtgtatgacatcgacaccaaggagctgctttttcaggtgaagtccctgagggggcccagggacatcatcctttgattagagactctcctctagcttcccagtccctgcaggaggctctcctgctctggcccaggcaggtctctgggaggggcaggggccaagcacatgcacagagtcccagaggccctgggccacaacctgctcctcccacacaggcacaagccgcagggcctggaccggcctctttaactttggtttccttgccaatggaaaccgaaggctctgagccagcagagcctttcttaagcgtttaccatgaacaagaaatggggcaatgactctgagaggggtgtgacgttggcactcagtgaatggggcgatggatgcacttcctttgcagaagtctgtgtctcacctgctgcaggcctgcctgtgtctatgcgcacctacagcgtgggaaggaaacaggatgttttgtcatctgaaagggggaaggggatgggcaagcctggccttctacttaattcacaagaatgctagaagagccagcagaatgcgaagtgcttggatctttggggttgtaggcgttgttcagtggagtcatccagccctgtggcctgaggaagtgtgtcaccagagaagacagcccggcagctctgtgccccgggcctggttggctttctgctgggctcgcgccattctttctctctttaggtctttgtaggtggtcaggactggttttccagagtgaagttccccccaaagctggagcccctcctgactggtttcctcggccactgcagggtttcctgatgttatgggcagattcagtccccttaccaggctcctccttgttctcagcagcagaatcgatgggggaggggtctggagtggggagcagcctcagtcaattagaaggagttacctggccacctctagcccagaggtaactccatgtcagtctcaactcactcatgtccttgagagagtagaatggtttcggggaaagagagggcatagccttcaagctgacctgggcttgggtcctgcctgcatcccttactgtgtgatcttaagttagtgagcctctctgagccttaattacttttctctaaaatgaaattagtaattgccccttacagaattgctacaggaatacactagatactacagtgcctagctcagtgttgagcacaaaatggggcctgaaatgttacttcccttctccccagcctcacctcccacctatagggggcatagctggccccaaatgtgaatcttgtgtctgagcctagaatcatacaagtgtggaagggcgtctgtgctgccccatccccactgctggctctatggcaggctaggggaggtgattctcagccctgccaggagacatcagcattcccagctgtaacattgcctgctggcttttcctcttctccactgcccctccctctacacataaaacagctatattgattttttctcattataaaaaacaatccatgctgattataaaagatttagtcattataaaagatcctaggcagaaaggtatgagcatatttcaggagaataattttttttcaaaagtaatacttgcttactcaaaaattccaacaacacgcaggtgcatggaggggcttgcctctgttcatttctcttgcctctgttcatttctttgtggtcccctttcatccttttccctccatcccactgtaagcaatttagtgggattcagtctttaagagggtattgggctgaaatgtgtgagcgctgaccaagcccagggtggttctcacaggatccccactgtccctgttccccaggaaccaaacgccaacagtgtagcttggaacacccagtgtgaggacatgctctgcttctcgggaggaggctacctcaacatcaaagccagcaccttccctgtgcaccggcagaagctgcagggctttgtggtcggctacaatggctccaagatcttctgcctccatgtcttctccatttctgccgtggaggtgccgcaggtaactgggggtgcctgtccactcttagcactggcaaggctgacaagaccagggaagctgggccctttgctggtgctttggggagagagtagcaaggagagaagaatggcagctgtgaggtcgtgggaggcagtctgggcctggaacctgccgccctgtctccactccttgcaacctgtgtgactgggggcaaacagctcaacctccctgagtatcagtttcttccttgtcccctttctgtagggatgggaggggtatgcagtgttgtcagcagcgtgtgttttgcagagagcccagcgtggggccgaatggagtgagcagcaaagccgggagtccggcagggtgtgtgtgtgagtacgtgtgtgatggtggtgatgtgtgtgtgagagagaggggagagagagaatgagtgggtggggggtgtgggctgaggtctgtgagccaataagggagcatgggactctgcacaagctctctgaaccaggaggtggccagaacagaaatggggcactgaagggtggagccacagaatgggggagggcagaaccacagacaggcgcctgagattgacctcccgaatgcaggatggtctcccctccaccttctgcaccccaggcagatggtgctcactgtagaattgccataaaacagagacgtgcatagcgagaaactgtagccttcagcatcccatcctcaggacagaatcactcttaaacatgttgaaatacatctgcttagcgcttttctacgtgtatatataatatatgcataatatacaattaggagcatgtggttttataagaacatttttaaacaaaagtggaatcacactgcaaatacttttcatgacttttatgtgtatacgtattgctacctatagatggaacctcagatttactgtattccctgagcctggcctgtaaacaagacttctcatcccttcctttatggctatcttctcatttcacctcacattcggttatggcagccccatcactgtctatgaagtgctggctgtacactagtcatctggccttttcactcaacaatctcctaaagcatcgttctgtgtcagtaaatggtaaatgttcttattctgcatggcaaaatttagggtaattgtagactcacataaattgtaggaaataatacagagatcccttaaaccctttgcctagtttcccccaacggtaacagtgtgcatagctctagagtgatcttcccacccatgttggcatgtgtaatctcccaccacagtcatggcactgaacactgccaccaccacaaggtccctggtgttgtgctttttacagccagcacccctccctcctgcctggtccccacctgccttgtatttacagctgcattttattgtgtcttgtggatgttccacagctttctttaccagtcctactggacatgtttgctgcttatagcttttttgtattattgtaaatagcaggcatctttctagctaggtccttgcacctgtcccaacttggcgccttggcataaattcctagaaatgaaattgctgggtcaaagcacgtgtacctttgaaagacttttagggaaatttccaggtttcccttccgctaggctctgtcagtctgttttccccatacaactcagcttcaggctagagcccacttcttctaagttgatgataccctcgaaactcatgactgcaagacttactggggaaatgcccatcatccatgcctgacacagatcagctattcaagaaatgttagtggaattcagatctgaggaaaaagaccagaaagcaagaggaagaagggaatgaggtgggtggaagtggcagcaggacgaggggcacgaacagcttctcctggactgtgtcctcgtcatccttgtctgccccattacaaacccacgcaccacatccaccaggaactcatctccctcaattgccccaaactagctctgcttattttattaaaaggttttctcccaagattgccatcctgacctcaaaaataaatgcagtttgctgctctctgactgtggccggccaagaggagccagaggggcagcctggggcttcctctgccaggactttaagattcagcagcaaagtcttgctgactgcaccaaggccatcctgctgacgcagcgggtcaggactgccaagggttaggaaacacattctcaagacaaaggctgttcatctgtcgcctctgcctccggccatcctgtggttttggcccagagaggagggagaaagcatcagacccagtcttggaatttttggttgcctttcgaaatttacattgtcttgtgcaagaactggtttgtcagggctgccaagtaggacaacgagccctaggagggcttctcaaggcggtggtgacttcatgtttgaaatccaacagcaagataaagtatagctcagagagtatttgttcagtggggtctatttttaaaactccactcaaattgtgcctcccaagtaagtccaagtgttagccatccatcatatgctcagctgtgatatgcctgcctgagtgcctgtcccactcacggggcagtcagcatggcaagcagttggtgtggttcggggaaggagcaccagctttcagtcctgactctgccatctcaagcagctgtaactagagcaactcatttcactctttggggcctcatttcttttctgtgaaatggggttaattatacccatctttcaggtttcgtcaagccaaatttctattattatttctccttattactgactcataaaatagcaaaaaccacaaaacacaactaaattgcaacaggctgtacttactgacggactttagaaaggaaagctcattgtgtgctttaagaaaagctttcaggagtttgagaaagcttccaggagatggtgaaacttgatctgagccctgagaggtctggaaaggaagagtggagcagggaagcttttcaaacaaagggaaaggtgggggtaggaacaagactggagagcctgggagatggtgaggagctggtgctgagaaaatacagtgaaggtaatgatcatgcctgcattttgcccagtgcttcattatttttggagcacatctctcctttgcccatggtagcctgagctgggcaggacatctaaacagaagttaatggatttacccaaaaagtcaccagcctaggatgtggctgagcctggcctgggttctaggtcacctgctccgtagcctatgcctgctgccccgctaaagggagcatttaatgtgccaatgaggagagatggcatggtggaaaagataagcacttggaagcagccatgttttgctctgagagtagacagactcaaaataaaaaaaattccttcaattctaaagctaaaaaatgggactggaaatttcaaagacagacaaaagccccaaatggagaaaacaatacttcaagctccacatttgggaaccattagcacagaggtcctggctgatttctcttccctgcccaggaagccaggagagatgcaggccactgaagcacactggctggcctaaaacaagggcaaggcctttccttgttaaagatgtcatggcccaactcaagactcattctcaggcctgcacgcacatatgcacatatacacgcgtgcatacatgtggcaggaaggggcacagaacctggagtccagtcacctctggctattgccagctatttgctgggacaggtcatttgtcctctctgagtctcggtctcctgggctgtagccagggagaaataatacctactgcacaggactgtggggacagccaaaagccttttataaacctaagaaagagaagtcgttaggaactattcatgggcactcacagcaaggcaaccccatcttgtaggagggcatctgtccccagggcagggatcaggagagctgtttccagaggcttccagggtaacttggagcaaatcacttacctttcttggactcagtccctggaagaagaggccattccagaccgcttcctcccacgaactcattcattgtgtcagcaaacgtagactggggttctgctgagggaggccgatacaacccaccactgcccacggctgtgcacggctttgctgtgggaacaggcctgtaactgcggcacaacctgcgatctggacaaagggcagaggaagctgagactctttcccctggggtgggggcttgaggggcttgggaggactctgcagaagaggtgacatttcaacagggccttgaaagccaaataggtattttccagaggcagagtggggaggggcaaaggcattccaggtgagggtgacatcctatggcgaggcaggcctgtaggtgggaaggaggggaggatgggcagagagtttgtgctgtggagcacagtagcccagtcatgagagaggtgcaggatggagcacacagggtgggctgggcaggctgggcagggtgctgattggcggctgcagggctgctccccaggcatgggtaatcatcccacgcatctggaggcaggctctgtatgcatctggttctttccatggctctgaaaacagtcttctttttttcccttgatgaaatcctgcagtccgctcccatgtaccagtacctggataggaaactgttcaaggaagcctaccagattgcttgcttgggtgtcacagacactgattggcgtgaactggccatggaagcgctagaaggtttagattttgaaacagcaaagaaggtaagcatctagccagcaggagctggagtttggtccttgtggggtcccttaagaaggcagatggggacccaggtggcacggagaggccatagactgcagcagtctctggagttaggctgacctgggcttgtatcttagccacttcctcactgtgggcctgggtaggtgacaccctttctaagattgcttctctatagacgtaggatgatgacaggccccatcctcacaaagctgtgaggatcaaatgggaggatgcctgtaaagcctgacccaggagcagcatgtcagattctggctgtcactcttattagctgttctctgtgggaagcacctgactagtagcctggcacatcacaggcactccgtaaatggcggcttttattatcggtgtagtcactggccatgatgctgcacacaatgctgcttttcttagcatctgccaactaaggtgggagagatggtcaaggtctctgattctgacagcaatgtgggcacttcccacgtaccttcatggcgggattcatggacttgattcgttgtgtcctttcctggcctagtctatgaaagctagagagatggctgaaaacatctgacccctctctgcacataaggaaaagcccaggtatgttcctgagctgtgtttccatctagaacctcagatggaggaaggaatggcttccaacctccactcccctaccccttccctctttatctccccacagtcaattaatgagctgctcattttgtccatattcccgggctgacattgaaggagtggcaaagagggacgtgatgcccgccttgggttagatcaagacttgtaggcatgaagagaggagactggaccagaccaggactaagaagcctggctgagaacgagctgtgtcacataaggggctctgggacctcaggccagccactttccttggagccccagtcctcccagttctgaaatgggggtggtgagaatgcccgctgcagtcatgaggcttaactgagatgttgtaaaggggaatttaaatcagggatggttgtgcagatgctagccattactaaacaagggaagtgatcgttgtgtaacaatgatctagattatatttttagatgtcctcagtgtaggaaagtggagatggaggaggctgtaagaattcagaggaggggccaggcgcggtggctcacgcctgtaaatcctagcactttgggaggccgaggtgtgcggatcacaaggtcaggagatcgagaccatcctggctaacacggtgaaaccccgtctctactaaaaatacaaaaaattagccgggcatggtggcaggcgcctgtagtcccagctactccggaggctgaggcaggagaatggcgtgaacctgggaggcggagcgtgcagtgagccgagatggtgccactgcactccagcctgggccatagagcaagactctgacttaaaaaaaaaaaaaaaaaagaattcagaggagggaggaggcatctctatggagggagcttccctctcctgccccacccagaaatgccagcagggagggagacgacaaatccctagaatagaaaggattgtaaaaagccacaaggtttaatatgagtgtttactgatatttttataaatatatatatttttatatatttgtttaaatattgagacggggactcactgtgttgcccaggcaggtcttgaactcctgggctcaagcagtcttcttgcctcagcctcccaaagtgctgggattacaggtataaaccaccacacccagccagatttactatagttgaaaagtaagtgtatgtggtatatatctattgtgtacaacatgctgttttgaaaaagccacatgatattgaagataggctggatgttactatttcatctaaatcccgagtaccccacctctttactctgtgccaggcactcaggctcaccagcttggatatagtggttcctagagatggacagccatccccactagatggcagagaagagctgctgagctcccgccagaccctgagcagagctgcaggttcctccctattcccaggcttccctctgctgagctcattcaggggccttgtgactctgaccaggcaccctgacgctgcaaaatgtgtcaggttgaaggaactcggaaacagatttattaatgggcaaatcctagacactagcacagctgagctacagctagaaagacccttgagagggtgtcagtagcaggcccctttccacaaagaagatggttggagcccagaagcagagaagtaggctcagagcgaggactcagacctcgaatgctcctttccctcttggccactgtgctgggctttgcagggttgccctctcaaggcgctttaaggaaacccagatctagagggtgatgtgtaagacctacagcttgggacacaggtagtcttagccctgtgttccttggcccatgtgatgcccgcattgcccttttctacgaattcctcttcacaaacacttgtttgccaggttctgactctgatgcctcccttaacgctgcctcccacccctgctcatgctcagaccattcatccgtgttctccaggcatgtggttcgtagttggagagctcttagctctgggaggtgtcatgatctgtttaattgaccagctttccctgttagaatgtggacctctgaattgtggagggggacaggggccgagacatgtttctccctgggtcctcagtctcttgacaggaagcctggtcctgtgggatgaaaagataaagttgcattgtggtcacctgcaaggcaggccggggacttgctcatctcccgaggtcttttcaggagggaggatgccatgctgctgagcagaggctgcaagtggtcaggattgctctgcgtgttcagttcaaagggctctggagctgctgcctcctctaggcacaggtcagcccattttgaatggggcaataaatggtgacagcaaagccacctgaaagcagcctgacctggtggcttgtgctcctccaaaccctgggcagaatctgaaagcagcaaaactagcttagctaacaccagtctgcttgttcctcagaaacttctagaggtccatgagttaaagtctctggctttactgtgagttcaaggcaagggctgcaattttagggtttacataaagagtttgccttccacagacttggtgggattcattccctacccctccaccttcttccagaatctgtctttataccctctcagctttcccctcctctgctccctctgtggtaccaggggctctgggtcccctgtgtctgtggcaccactgggtaggcatagctgtcccctgcattctacccatgttgccaagatgtataggcagtctctcatcagtccatgcatctcatcctctcctgctgtgatgctgcgtgaccccccagagggtcagaccggcttgttcttctttgggtctagagtctcccaaggaggcaccgccacagactgtggcatcacggttttgttttacctgatctcaaaatgactgatgcaactgggatgtctttgctgttctttacatggtccaatcccatggataaagccatgcctcgctgggtggtataacctcctgcacgcacgatgattaatctgtgcttgctcccttcctctcctctgtggctcactgtctagatagagcttgacttcccacccctagccaatcacccacttttgaagccaagaagacagcttattttattctttatttcttcgccacaggccttcatcagagtacaagacctccgatatttagagctcatcagcagcattgaggtaaaagatgaagcatttttccttctcaagaaggcatacttggggttcctgttttaggggcagcccttctaacaggcaagagccttgaggacatgggaacagagctcactggcgtctgggcatctgggccacagccttgctccgggggcagagtggccacactgggggagacaacagcaggtagtgtgagctgttgtgtgatagctgggtgaggcacatgggttccggatctctccagggttgggtttctagtctgtgaaaagggattggacctacctcacaggctgctgtgaggattcagtaggttctcaggaactggtttgcatcctcctggtggcggatagctggtcaccatcctctcagactccagtaatctgatagtgttggaggagtttcccaaatgcacatgagctgagctccattccccagaaatggacctggggagcaaggcccacagtctgaactgagcgccccagagttctggagcaacccctagccctactgtttctggctgagaatattgaccttgtcatccaaacccaataggcctgcagtgtgctaaggaagctggttgtaggtatgccatttgctgggtggtggtcaacactatgctttttttttcttttttttttttttttttctgaaacaaggtctcactctgttccccaggctcaagcgcagtggcacgatcacagcttactgcagcatagacctcccaggctcaaatgatcctcccacctagcctcccaagtagctgggaccacatgcatgtgccaccccgcctgattaattttttgtatattttttagagcagggttttcccatgttgcccaggctggtttcaaattcgtgggctcaagctattagcccaccttagcctcccaaagtgctagcattatagacttgagctaccatgcccggcccttagacactattcttaatttctgtgtatctcagtgctgtctggctgtctgttaaaaggcatatacattttttctcctgaacatatttattgtgaaggtatgggaatgtgagatacatttgaattcccagttggaaacagtgaggaaatagcaaatgtcttgtccctctcattcatttccccataataaacacctgtcatgggccagcccttgtgccgagctcagtgggcacagagctgaggaggagagaggctgacaggagctcacagcctgctaagcctcataacgtaatctgctctgtgccacatgcgtgatttatgtgaatgctgttctagatcctcacattaactgaatgaggcaggtactgttgctctccctattccatgcaggaggaaattaaggctcagcaagacgatgccacatccccatgggtccatagccaaaaacttggtggaattcaagcccagtctatttcctaagctcatgctctctcggccacataccctccctacccgcgtgttgtaaggggcatctgtatattctggggtttacctacccgcgtggtaaagggcttgttcggagctattgctcaaaatgcccagtgctgctgactttcacttgtaaatccactggcctggatctgggggtcttcacctgaagccaaggagcataattttcctctctacaaaagtaactgctgtggggtccaactattacttgtcacatcttactggggtcaaaatgtagtcctctcctcgtatgctatgagctgggaagtgcgttaaagtaaactcctaagattgtctcttgaaaaaaagtaaagtgcctttgagtgtgctctatatcgactgcctgcagacttatttgcacacatctgggtgctcagcataattccagagaactgcagatccttagtgggtgccttttggataggggagatgttcttgtcctgctgacggggggaaagaacctgcccatgttgacatgcacctgctgagtgccatagatcgtttttattggtcatggtgatatcctggggcctagaatggatatggcctgaatttcatgtctagtaaaaccttttttgtttgtttgtttgttttttttttgcagagatagagtctggctatattgaccaggctggcctacaactcctgggctcaagtgatcctcctcttttgacctcccaaagtgtagggatcacaggtgtaagccaccatgtccagccaaaatcaatcttttatctcacggcaagatttcaattcatttccaactattaggagttagtttgtttgatgagcctgagctgtgtgcaggtttttagaatgataatttctgtcagtatggaagcatgttgcctccagctgttaaaactttcaccagcttgtctaagagtttgattcaatgtcttatcgtcctccaatatgctgctctttctagaaaacaagcaaaaggaaactgctagggctcagggtttgggtgctactgagtgtttacaaatactcgagctgtagacaagcgaatgttccctgacacagaaggaagaagctttatcctagctgtgctaagtgtgtgtgtgtgtgtgtgtgtgttgttggggacatcacttgcttcaaaagactacattgtgtgatacaaggaatatctggagtcagacagaactgcgtccaaattccagctctgtctgaccctgacctgttcctcttcttgagtctcagcgtccttcactctaacacttgggtagtgagacctaccctgagggtcactgagaggaataaaggggccatgtgtgtataaagtatatacccagaacctagtggatgttcagcatgcgggatttcttaccttctctttagaagtagggatatcgtaagacttgtcatcctattttattggtctccctcttgggcagaaaccctaaacattctcctgctctgtcatccccatgagccacaactctgccaaacggggcctgcggatttgggagatcttgggagcttaggggtcatggatgagtcagagcacacactattcaaactattccgtcatagccttggaatacacaggaaagcaaccctgaggaatttccattaaacaaacaaaggtttgcatctttttttgatctttgcttgtctggtaaaagcctgcttttgttgtcaagccttcccagcgggaacctaggggagagagacaacagccaggagccaagcccaggttccagtaggaaggcccaggggcctcacttgaaatagccacatctaacctttgtaaaggctgcttcctgcccatggctgcagaggccatttcctttgcttctaatttttccaggagaggaagaagcggggagagaccaacaatgacctgtttctggcagatgtgttttcctaccaggggaagttccatgaggccgccaaactgtacaagaggagtgggcacgagaacctcgcgcttgaaatgtacaccgacctctgcatgtttgagtatgccaaggtaacctaccctgtcccaggcccaagctccagcttggagcccactggtattctcacgtgcggtgtccaagttattttccccaagagtgctgcggacaaaaactagcaatggtctcagaaaggatgtggggaaactggtaaacaaaggacccatctacagccactggttgaaactcacctaaaactgacctttaaggctgacaccaagggggcagactatggcagttcagaccttcatcagtgacagggctggatggctgtgggtctacaccagcacaatcccttcattgagttgagggctcagggcttcagggctgtcccccacaaatcctctcaatccttgtcaggagccgccaagaatcggtgtcttcaggcaggagccggtcctgccgatcatgcaggacgacatggtgcctgccagccaagtttcccatagcacctgctgattgtcctggacttctcactgggcttctgggaagtcaggcagagcctccgccctcccatgttagcgcagcatgcctcacgcctgccggctgcagagtggctaccatgtggttgcagtgggtgatggcagagattcccttttgcattgggacggcccccatgaaccttactccccagcagagctgggccttttaaggcaggtgtaggagaggagcttcctggaccaggctcctgatggcttctgtgggaaggagttgcactaaggagcccagagcagtcaagacatttgcagttcagtctaagcaaggttcaaagaggcttcggtacactgggcaatgagggtcttccttccatcaaggggctttgttaacctgccttttctggaagtgtcaaaagtggctctcagtatgttatgaagtgactcatcagccataacctattggtgggctactaatggtagttctccagctcacaagttcaagatggaaaatcttccccacttttttctgcttttctattcctgaagatggctgtgctcttccaccacctgttcgaccctggggctgaaggtgtgtttggtggcctgtgatgttgcccaggacctattgttcatcaggacttggacgagctcctgggccccagcctgtcttttcaccttagtgatttcttcactccgtacctgagacccagggtgttcaggctccctctactttttcctcgtcacctttcctaccctccctcaggccccaccaaagacacctagaagatttcataacacattcatactgagatcaccagagtcagtgcatctctgcttccggggataacaaaattttaactcaggatgaacccttaagggatcaagaccctagaggtagaatttagggttgggaacccctgaggcctcctcaaggaggcagctgtgctgcagtagaaaatgcctgaccaggctgggcatggtggctcaaacctgtaatactagcactttgggaggctgaagtgggtggattgcttgagctcaggaggtcgagaccagcctgggcaatatggtgaaaccctctctctaccaaaaatgcaaaaaattagctggtgcctgtagtcccagctactgggaggctaaggtggaaagattgcttgagccccagaggtggaagttgcagtgagccaagatcacgccactgcattccagcctgggtgacagagcaagacccatgtcaaaaaaaaataataaaatgcctggccttggtgccccagagctggtgtgagtgcagtttctttctgtgggatgacctggggaaaggctcttcggtttgccaaacctcccttcccttctcagatggtaatagcgacagctcagtttagtcatgagatttgcacagaataatgtataggaaagcgcattagaaatgccaacctgtagaaagattaggaagatgagaggggccacacgtgaccacagagtggattttcatacctctctccctggctggccccactcctgcccctgctctgaggcccctccttacactgtggtggacttcgtgtgcccacagcctcccaccagaactgcagcccatttacacactccatttgctccgtctctctatgaaggtaaatactctgggacttgtttttggttttagtttttgatcactattccaaggaggttggttccttttcaatcccccctgcccccacctggtagtctgaatttgagaaatatgtacctacacattatgtggggggtgggggagatctagtcctgattaacgtggcatatttttgtttacttgaaaattgcttcccaagattcaatctggttttcagaaaattttaaaattacattcccacgtacaaataaattgtatgctttctggataagtgacatgtttatatggtgataaagggaattataatgctcttaactcttatgtagtatgttcttatcaaaatcaccaagcatgagaacactgtttagtctcattcatcactcagcacagcctctttctgtccacttcagggccaagtctttgccatggccccagataatgtgtaacttagcttcaggaaagcaaaaagcctttgaatttccagtttgctgagccttgaaggaagcttttagacccagcttcaatgaagtcacagctccctgagtgaccagctggcctaggcttatggctccctctcagcctctcacccttgccgtggtcacccctggtcccctgagcactcactgaagtccctttgaaggacatttctagtctcctaagatgcctgttttcctccagctgccaccctcatttcaccagccaggtaggcagggtttccagcttcgtgctggcatagagaatccgcgccatagcagctgccagaaggaaaggtgtgtctgtaaaggcccaaactaggcggggacagcggctgctttccaagccccttccctttgtcagctccagggagaaccaaaggccagccagggggcctgtcttctattgggtcccagcatcagggtatacaatgcgctttcctccccttcttaaaatgtatcatatattaggccgacctaatactctgaaagcacatttaccctgaaagcaaatgagggaaaaaagcgagctaattgttcaagtggatttttagcatacattgactgtacttttctgacacatgagtgttaatcatggggaaaggagtgctttttttgttctcagtgaggctgacacaaagtactctccacagggtacattattcctgagacaaaccacttcttaccagtaacatagacctgggctgtaagtgctcccagtttccctttttgaaaagctccacctttaaaagctgcctcaattctggcaaactcccacgtgtgtattttgggtaactactctgaaaagaggtggtgttctgaggctgtttctcacacattgtagggccagcccagagaagctgggcataccacttcagaggtatgctgaggccgaaggaacacaggccctaggcctgatctctgagcctccaggaccacagccatctcttccttctcaggtcctctcctgagcaccttccctgcctcagattcccccatggcctcctgctgtcccactgtcggatcaggttctcacccctgcagacctgacctcagcacaggatccctaaccattcagctgagaagcaactaaccagagagatgtttgcttgttatctgttccaggaaagtaactggggcaaagacaatgtgatgattctctagttcagggcacagaatgtttgctggtgactcagagagggcatggagggcacggagggccggcaaacactgtaagtcattttgtttgtgtaagtttaggggaacccatgctcagcctcactctgaagcatgtggtatcacccatatgatctgaataagatgacaggtctcgatatgtggaattgtgcaccaggttgtctcattgctgtttaggaacagtcctgtattgaccaaactatgtgagagagagacagcctgatcatgaacccccgaccctgcagacttcatgtgcagtgccccaaatagtctagaaagtgttgtttagccgatgaacaaatgcccatttgtgagacgggaaggaagcactgggggccagcgtccctgatgctgtcccaggatcccccaggaacacctgcagggcagcctgagatcactcttcccgagacctgggactcccccaactcagcccctcagggccgggccctgcctacctcctggttgcctgcttcagccatgtggagcccgcccttgctgctagaaaagcctgatgtaacgctggcacaggaagttctgatccagagtgtttttgtttgttgtgcttcctcaggatttccttggatctggagaccccaaagaaacaaagatgctaatcaccaaacaggctgactgggccagaaatatcaaggagcccaaagccgccgtggagatgtacatctcagcaggagagcacgtcaaggccatcgagatctgtggtgaccatggctgggttgacatgtaggttttggtccctgccccgagaagcatttggcagcatgtcatcacatgtcacctcttgactgacaagggaaccaatagtgcttttctaattatctaaagctaatgtgatagtggctaggttcttcaggagacacagagattgcacaaggcagtggctgccttccaggagcttgtggagtcactaggggaagggatggtggggaccagggaagaggagacaccgggacatcacagctgccatttgctgagcgctcactacaacccagacgctgtgataaccttccaggcattaggttttccacctatgccatcagggctggtgtctcctcgcccaccttgcagatgatgaaacagaagctaaagggacaagttattcccaaagtccagatagctggaaagttgtagagctgagctttagcctctgatctgctggatgtcgatgccaactacgcgtgtaatggtaggaacaaaaacaaaacaagttccaaatccatcagggaagaattcttatgggaggaaccatggatatcttctcttaggagacactctttccatgaagggaccttaaagaattccaagaggtaaatagagatggcgggaaaggatatgcaggcaggaagtacagcagaaacacagcgagttggctctggttggaataaaagacgtgtgggaatgggagggtgaaggacatgggctgtgggttgggggaagtgggctggccacactggaagggcctccgatgccaaacggaggtgcttagatttgccaatagtgagtgaccacctacagtcagacaccccctcaggcaggcaggtagaatggagaccagataactggctagtgcagtagagcaggagggaacttggtagctgagggcatgagagagaagtagcagtgttagaaccaagtggcccatcccagggtgttggggcagtggtgagtgtcaggctggctttgctctgtggctgctggtgggttacaccattcgtcaaggtggacaacagggagaggagggggttggggtggggcagcactgagacaggatggattcagccttgggactcagcacaccggaccttgagggggaaggctttgtcctcccagtcagtgagcttcaggctcaagcatgtgcacacacacgtgcacatgctgctgcggtaggcaaaggacacgatgggacaagctcctgagggtggctcaggctgggtcctaaaggctgttgattcttctggaaacaacgttgtggtctacaggtagcagtggcccagccaggatttggggatatggaagaggctggttaatgattaaattgtttccttgggtgctgccatatattaataattggtgtgtgggcccctcacaaagggaccttgatggatgtcctaccaccccatctttttcttgtccgatagtaatttttttaaagacagaggcacagattttgttccccacattattctttaaatgaaggggttcatatagaagagagccaggcagatttagggtgctctgttctctcttctggtttttcttgtcactttcatttgtaagtgctatagtatcaggttaccctgagggtacttgagtaattcaagaaacacattaagcatgttctgcttgctttccagatgtggctataaaaggtgtctttcctccagggacgttgggtgtgatgggtgggaaggtttctaaggctgtaagggctgtctatgccacctttccctaaaaacgtgtcctttttctgctgagcagtgttatttttagatgccattattattctaagtgtagactgacaggcctccgtgccttgcctgtctccagacagggattcgttacagctgcttctccttcctttctcaccaagactagcctgggtagaaccctttctcctgggagagttagtttgactccaaattccagcctgaccagagagaacaagcgcattctatccaggcctcatgtccccatgagtgatgggagggctgctcaccatggggaagcagtggtgagccagtgggtccctgcagctcctccctctttggtcagcacgttggccaggaggacagggaagacttcctgcaggcctttgtccagagctcagagcaggccccacactcacctcttcctttagagggcagtcattgaggtattcttatgccttggcatccacttttccgtgagaattcctgcacccgtggtggaaagagtgctgggcccagtcttgggctgggtgcttcaccttccccacagactttattcttctcatctgagagatggaaataatcatgcccacctcttagggtggtgaagattctgatttcacgcatgggaaagctcatggcgtcatctgggtacctggtaggggattaggagataattgtttctataccctgctggatagctcagtgacttccgagaaagacacacaaggtggctgacaggatcctgtaaaggccacctctcccagatcctggtgatgtttctggagtgtgtattcatgcatttaataactacccactgagcaactcccatgggccatggcatagtatcaacactggggaccacagaatgaatggacatacggcttgccgttgacaagacccagagcccaccctcctacctgccccttccctctccaggttgatcgacatcgcccgcaaactggacaaggctgagcgcgagcccctgctgctgtgcgctacctacctcaagaagctggacagccctggctatgctgctgagacctacctgaagatgggtgacctcaagtccctggtgcagctgcacgtggagacccagcgctgggatgaggtgaggggaaagcaggcctcatgggctggggccccacctgagccctgggacacaggcgggtgggtacaggggccctttggggttcagatggagagaagctgccctcgtgatggaaggaacattgggctggcagtcaggtaacttaacctcgaattctctgagccacagaatcgtggagggcctttccacttgtcccttcattcagtcattgagaaaatcgttactgacagccagctctgccagggtggtgacaggcaccggggatgttagtgtgaacacgacagctccagtgcctgctgttgggctgagctgcctctgaccagcaccacaggctcagacacatggctgatgtggagatgcacctgcgtgacatttaaaacctgctgggtagcattttggcagaaagcaccatctgtgctttccagatccagactgtgagagccatttcaggggccagttttttccctcccttctctgcccccaccccacaaccactacttctctctggtgtcaggggctgtaaagaattagccaggtcagcgagaaaggtggccagcctcaggctggcagaagcagctgatgctgccccttctatggctcaacccccaccctccagctcactggctccctgttccctgcagagaaatccatccccgagaggattaggagctgtgccaagatcctcccccgactcacccacccacccatcatggtccattttagagtgaaagcaaagccttcactgagaggagccgtctgactgttgtctgctctctgaacagctccattggtgaggtgatgaggtcagtcatgagaaaaggtggggctagggacagaggcaatggtggcttctcaagagaaatttattagatttcccaagcagcatagattagagcatcttagaatgactcagacctcgctgtgcatcaggcagactttctcaccatggctcatgtccggttctcctggcctgacaggtggttctggggcttaggtgagaagcagtcagtgggtccatacagcacgaagcccacagtcatctttgacaactgataagaagtggtgatgatgataatgtcaattctgtttccttaggtgtcgcccgcaattaaaagaaatctgtttgcagcactacaggagcccacgcaaaccctcaaaataaaatgtttccgattctgtgccgcttctgtggtccagaaacagactgtgttgttactgaatccagtcgcttgcatattgctgttaattgccttttgttttcgaagagctgatttgtttttgcatttctgtgggtagttttttgggggaggcactctccccctctgagttgtcaggctggcaaaatatgatgtccctaatggattcagccaagtacagtgttttcatgggggctgcaggggcagctttattaagacttcatttgctccttcccccaggcctttgctttgggtgagaagcatcctgagtttaaggatgacatctacatgccgtatgctcagtggctagcagagaacgatcgctttgaggaagcccagaaaggtaggcaacacagactgtcaccttctagaaggagcaggagaagttactgccaagacatacatttcaggaaggctaccaagcccttcccatctgtagatcccaagatagatgacttcatcctggggatgtgattgtttggtggtgaaagactgtggagcatggaaagaccattggccttggagtcacaccctcctgggccacactcacttgccacaggcccttaagaggtgctgcctcctctccaagcctctgtggttactgagcaaagtgctgtgcactgcagtgtatcttcccgtttaatcctcgcaacagccctatggtatagctaccatcattatgattcccattttgcagatgagaaaactgaagggtaaagaggtgaagaaatttgcctgaagtttcatagctaggaagtggcagggaggtaatgtgagccagggtaccatgaggacaataagggaggattgccacacagtgtgaggcatggtctctactgagaatagaaactcagcttctatttctggctcagataaacgggtgacttctgctcctcaagaattctgttggtaaaatgggctgcacacagcgtacaacagcatctgaaataggagttaaagcaagtatagaactttcgctgatgttattaatcatattttttaaagttgacttccctctctgtgtcaggccctggctgagcacttaacctatgtaaccttgaatcttgccaacagctgtgcaaggacgaagaggctaaatgtgccatgccaagtcacaaatctagtcagcagcagagccagaattggaccagtacctctctgactggggaacctgatttttctgttttgctgcctatttagccttctaatggaagttgggtgtttgatgttccatagcatctgatttacgcttctatatggtaaccgttgccctctctggacacattgcagaacaaatgtctccctgttggagcccctcaaccgaaagccctcattgaaggttagcgcattctctgctgcttcagcatttccagagcacccagttgctgaagtatctgcatgtttgggcaaaacacatcaacctatccatctgtctgtgtctgcccttccaagaatccatcaccatagtaacttggtactcagacaagaggttgtagatgagaacggaacaaaggccagaccttctccttctctgaaggcggaggattaggatcatttgagtgctctcatatggcaagtgtcatggctacaagtgcttcactggcagccaccaacatctcaaggggctggccacgtagtaggtactcagaaaatatctgttaaacagtataggaacgattgagagtttttttgcttgttttcacaaatggttgtgataactgaggcagatccttcaaagtggtcattgaaaagcagtcatttgaagacaaactgaggacttgagttgggcttggttctgggaccttgggtgtgacactttacctccattttgcaaagcccatttcattgctcataaaaagggggataattttccttcttcataagtctgtggtgaggatccagtgaggtgattagcaacaaaagcattttacctccaagtgcagtaaagtggcaggtcctgtttctatcaccttaggagtcacaaaactttgccctggaatgagcagggggcagaacctcactgaagatgagcaagtttcactcttagactttgccctggaatttggcccctccagtttttcctttctgcatgcttttcaaagtcagtcgccttttcccagccaaaaaggaatttatctcactgtactttttccaggatgtagccttggttatttagagaagcgccatcccagcaacgaagcactgcagatgctccaatgagtgtcctacttccaaagcagccctgtgcaagccccacagagctccatcctgcctcctgtgtgacttcctaaatagcatgtgcttttttcctccctccaccactcctacagcgttccacaaggctgggcgacagagagaagcggtccaggtgctggagcagctcacaaacaatgccgtggcggagagcaggtttaatgatgctgcctattattactggatgctgtccatgcagtgcctcgatatagctcaaggtgtgtaaacatcagccagaccactgttttcccaagccccactctgacaccaagataaacatcagaagagctgggacattttaattaaagccctgggcttgtttattgggtgtattgtccataagcctgccttgcagtggcgtaatctggtgtatcatctttttccagtttgcccatcagaatggtatgaggaccgtcctggggttatggttggcaggtccagccctgcattgctaattcagagcatatctctcccctgctacctgggagcccatagctggacctgggtgagcactgggttttaaatttttttaattaaatgagaagatgaacgagagatggctttacagtaacacactccagattcttactcatcccagccaggaaaacagtttcaatattgctttctttcacaagacttcccatgatgtactgaaggagtagtggaagtggaagagacaaggagatgttcttctccactggacaaggccacatgcaggggtgggaaaaacactggcatggaagctgcaggtgacttgtagcaagtcacaatccttcctgagctctgcatgcccatctgtcctgtgggagtcccttgtcctggtccctttggttgctgggagcctcacagagtcatgcttacagtttgaaaattgtcaagcctaggtgtaaggtcgcatttttctgtttgggccagtgccttatgcttctgataggagcagcagagggaagaggcataagatgagcatgaatacagttggtgtctgcctgcctttgtcccagcaggctcttccgacacatcttgggtcttgctgcagctgtcgctcccccaggggaataatctgggagggtgcagtgagagatctggaaaaaatatcctcaaactccctggccttatgccctgtccacctaagaattcaccatcctggagtggccctactcctaagcagagtggctttcccctcactacactttgtccctcaccctggcacagacactgtgtggtgggagaactgatgctgggaaaagtactgttgcctggcccctcctcctggggccagttggcagccacagacactgtttgacacgtttcccctcccacccgctgcacacagcagatcctgcccagaaggacacaatgcttggcaagttctaccacttccagcgtttggcagagctgtaccatggttaccatgccatccatcgccacacggtaaggtggctgggtcaccagcacctgagggtaccatctcctgagctaggggtcccgggcatatctaaagagcagcagactggatggaatgtaacccactggtcacagtgaactgctgaggaatcttggtctcctctgggaagaaaaagtttgagtttctttgattgactgtttgtctgccatgcatcaagcagtgggctcctgaattgtgatccagagctggaatgggccttgctagttcctcagtgcaggctttgatgactcagggaaactctgcattaaccagcaagaggggtgggagttccatgaggccctctccttcagtagggcgaaggcccagattaaccaaaggctcgagatccctccctggccctgtcagtgatttgtgtgttcttcagcaattcactttccctctctgtccctcagtttccttctctgtgaaactagagtgttggcttggtctccagaaacccaagtagttctttttagtcactccctgattcctttgagaaagccattttaaatctctctggtggcaatggggaacaggtgatgggttgtcaacagcctcttcatccactgtatctcctcaatcacccaacagatgttgagcacttagtacctagtaggcaatgtactgagggcttcattgtatcaagtcatttcctcctttcaaccacactttgagggaaggactgtcacccccatgttacagatgagaatgaagccctagacagagaggtctcagaggttattaggttggtgcaaaagtaattgcggtttcagactgaattttaaatcattataactaggctcaaacacatctttattaattaaaataggaaccattatgatcaacacatttttgccaatgagaaataagtctgtttatttctgtagcataaaaatccatactttgggatttgacgaactcttggaaagcattttctgcatcctgctggttgtggaagcattttccctgcaaaaagttgttgagatggttgaagaagtggtagttggttagcaagaggtcaggtgaatattgcgatgaggcaaaattttgaagtattggttgtgtgatgtgcagtcaggtgggtggagaagaattgggccctttctgtgaaccagtgccagctgcaggtgttgcagttttcggtgcatctcctcgatttgctgagcatacttctcaaatgtaatcatttcaccaggatcagacaactgtagtggatcagaccagcagcagaccaccaaacagtgatcatgacctttttttggtgcaagtttggctttgggaactgctttggagctttttctcagtccagccgtggagctggtcatcacggttgtcatgtaaagtccactttttgtcacacctcacatctgattgagaaatgttttgttgttgttgcatagaataagaaaagacaacacttcaaaacgactatattttcattttctatcagctcatgaggcacccacttatcaagctttttcaccttcccaatttgcttcaaatgccaaacaaccgtagaatggttgacattgagttcttcggcaacttctcctgtagttgtgagaggatcagcttcgatgattgctctcggttgttgtcaacttccagtggccggccactatgctcctcatcttcaagcctctcatctcctttgcaaaacttcttgaaccaccactgcactgtatgtttgttagcagttcctgggccaaatgcgttgtcgatgttacgagttgtctctgttgctttatgacccattttgaactcaaataagaaaactgcttgaatttgttttttgtctaacatcatttgcatagtctaaaataaacagtaagtaataactcattagcaaaaaaacataaagcgagaaatgcccgttgaaatgatgtataacataaccacatttaagaatgtattctactatcaaacagcaaattccagagccaatatgtgagtctcagtagtctggcactggagcctgtgttcctagcctttccctccctgtctccttttagagaaagcaggctagtatgttggtttagtgggtaaactcgagagtcctcacacacaaatgacactgtgttacttatcttctctggccttcagcttctttctctataaaatagggataacagcactatgtacttgatgggattgttttgaggattagacgagttaatattggaagagtacctagcacagagtgaccctaggtggcagctatccttactgctgctccaggcaaggcttcacgccagctttccctgacctgctccctccagctgggcatctagcatttctcttttttcagagatgaggtctctgtcgcccaaggtggagtgcagtgtcatgatcatagctcatggcagcctcaaactgctggactcaagtgatcctcctgcctgagcctcccagagcactgggattacaggcatgagccaccacgcccagccttcccgccgttctttgacctctcaaatgccctgccttccaccttgggcatttctttccctctaatctgtgctgacttctcagcacattttttgcctcttgggaaagtctggcaagaaggactcctgacaggctctgtgcatgccgtcagtctagtgttacatctcttcccacagcagggtcagtggtctcaagggacctcatcttcccttacagtctttggctttcctgaaacgagaccccctcagggtccctcatctttatcaggtgctcacctggagagaaaccaccacaaaaggagcccagactcaacttaggctggaagtcagggcccagctcagcctcactttgcccaagccactccagagcctggctctcagctccttccctcagacttttctctcgctgctccctgtcctcttcctcacctggggcatggggctgagggctcctgtctctaacagctgagctctgctccaggacctacatgggactaggagctaaggggcctcagaccagctggggccctggctcttatcccagctgaatcttattaattgggccattccttcattcaataaatgcctactacgtgacagaccctgtgatgagacctggtgacacggtggtgaacaaaacgttgtccctgcagtcagtcccagtctagcaaacaggacaatccctcaggggaaacgtttagaggcctgtgaagagacttcctggaggaggtgtcctctcagccagaaggagggagagaataaaaatggggcaagtgaagtggaggaggattaggaagggtgtttgtggcaaaggtcacagcctgtgcaaaggcctggaggtgagtggtagtttgtggttcagcatccagggcccagcagagcagcactgattcagggcaagactggaaagggaagttcaggtccttcctggatacatggcatctttcccagaggaaaggactcccctgctacctattctctctgggacgttacttagcttccctacctagtgcagtagaaccacaggcagagttcatcttgttcttaccctggaaaggatgtggtctcaggttttcttgggttcttggagctaacaaaaggtatagaaatttacgtgtgaactaaatagaaaatgctaagctctgaactgaagaagtgtagagcaaagtgagtcctcaggagttcagaccaattaggggttaagctttggtggctcagtgatgagtagggcctcacaagacccttcttaagtgctcacaagaaagaggagttactggcctgctgtaatcctcaccatctaaagctttattagaaatgggcaatctcagtttatatacagtgtgccagatgccttcaaaataaggtattcttaaccttttgtagaccctcacacagaaaattccttatttgtctgctgagcttctggcagcctctaggtacgaagaccaatcactaatctgtgctaactgcctcctgttagtgcctatgccaggagccagggaaatgggtcagcagttgaggaactccgcatgtgtgctcgtttggtggcacatcagtcaagctgctgttggaaagcacagaagaggcatgtgggttcatgctggagagggctaaatgcctctgttgaaagacaggcttatatgaatcagtggttatgtcctaagctgcatagaaggtcttctcttttagagctaattggagacaacttgagtagttcagagaaatggaataattaccaactccagaggcagtacagcttggaagaaagacattcttgggctttggaatcagacctgggtttgaacagcagctcagctctgttctagttggtgacttgggcaaatcatctatctaggtgtcggtttcctcatcagtactgtgaggataaaaatgcataccacaaggttattatgttaaagaccagatgagacagtggctatatggcgctcagcacacagtaggagtaggtgctcaataatcagagccgctcttgttgatgtcactcagaattattggtgtctgccttttggcctggcccagcagcagctcttgaagaactcaatccctgtttgcttttctctcactgcaggaagatccgttcagtgtccatcgtcctgaaactcttttcaacatctccaggttcctgctgcacagcctgcccaaggacaccccctcgggcatctctaaagtgtatcctttctcttatccctcctccgtcccaccaccgttcttgtctaatggccccaagaaattccttccagagcactttcctggcagaaccttcctctctcagcaaccctcagggaagacagagaactcaccctcccgctgctgtttggctatagaggctcagcagggaggcccaggggcccaggccaagagaagatgagttttcagggctctctgagctgaacccagcagtgggtctctggccaacacactgtcccaatccctcctagaacccacagatgagggtgtgactgaaatggaagaagcaccaggccttcaggcttggaaccttgggcacttctccagactggggaggagggagtgtttgttcagcccaggtatacatagcaccttctgtgccccaagccctgggccaggcaccaggtggcaaagctgccatcaaagagggaggtcacaagttagggtctggtttggtggatgtgtgctgtgtctgagggtggaatgaagctgaggtcagggccatggtcagggaagtttacctggaggaggagatgtccatcatgcaagctgaggcagccagggaagatggccaagtggatgttccaggggaggacccagcatatggagaggcaagcaaggcatgtgggagagggtgaggggaccctgggtgggaggggccggagaggcagcaggacccaaggcctgagagcctacctttgggttttcctctcttctgtagccatcgagggccacagtggtaccataagcagagcaggtgcctgaagggcctgtgcagccagatactggatcattaccaggcaatgatccagatttttaaggtcttggatgtcaggagacataattgtccctgttcttttctaaatctcactgtactctcagctccttcccagccgcagccccaccttccctctgtaaggaaaacccactccactggagaagacccagagctccttgttgtaagaattggcctcgctagaggattccaggcccattatgtacatttcaggggaaataccctcaaatcaaggggtgccttcctggagtcagacctctgctgcatgcgtctccgtctttccccgtaggagcagtcagggctatgcctgtgggggctgagcacctgtactcatcctttccagcaagttctgtttgagtcaacagcttgatagaacctctaccctgagccttaccctgtgccatcccctggggacctggaaatggctcctgacagtccctgactttgaggagtcatgctggagacacagaaggaaactctccacagaactgctgaagtggacggggctgcactgcagacggcgggagcaggaacactgggagagatgcgggaggaagggcaggagggcctgggggcagccaacatcggaggtgacctgagaggagagcacaaaggctcgtcagcctctggctgaggagcttcaagggggccccagagcacaggctgccgctcagaaactgcccaccaggccctcggggaagggtgtgcagacagagtggggtacacccaggggcctcagagcagggttgagggtggctccccagggagtctggaccaggccccacctggcagggtgagagcagagtgccctttgtgccaggcatcctaggagggcctggctggcaggtttggtgaggcaggaagagccattttggcctagtcagggtataagatgagccatcagcaggcccagagatgctaagcaaggttaaagtattaatggaaactacgctgtttttatctttggaaaaattcctgggccttgccatccgagaagtacactcacctctcacaagcgcacagagccttcctcacggtctttcctctgccttcccggcaccagcacaagctgtgttccagcctggggctcactccaaggacaggcagtgccagctcctgggcctggtgttgcccctgctgtccttaaccctgttcacggcaggaaaatactcttcaccttggccaagcagagcaaggccctcggtgcctacaggctggcccggcacgcctatgacaagctgcgtggcctgtacatccctgccagattccaaaagtccattgagctgggtaccctgaccatccgcgccaagcccttccacgacagtgaggtgaggatgcagcacccttgggcaggtggcttctcctctcccttgaggccatctcatgccttcttgcctggcctgggttccgtttgaagagagacagctgcagctccctctaggctctgtgccccctgctcaagcctggccatgccagctcccctgtgcttccctgtccacctcctgttctccccgcagtccacctggcgcccgctcacagcccccggccccggcctcagccctcagcctggcctcccttgctccttgccctcccctaggcaagccccacacctctgtgcccaggtggctctgcctttaccccaggcctggccccagagctgactcttactctagaaacctctgccctttctggaaccaggctgtagttctccagcaaatctaccccacactcccaacccacattccttcaacccagccagcttccttctttcacacatcctccctcaagctcagagcaaggacttggttcagacagacctgggttcacatcccggctccaccctctcctagctctgtctccatctttctgcaccttgggttccccctttcccacaggtagttgtgaggctaaatgagccagtatagtccacgtgctccgcacggtgcccggagcatggtaaatggctggctaatggtggcagcggccactgtcattcctgccaggggaaaagtgccgttgagcgctgcctgtgcaggtgtcttgggcacggggacccaagtgacagggcttgggtatttcggcaggcctttatcctgcttccccatggcatggagctcctgggcccggcgccccttccctgcctgcccacccgggtggcctttcctcttggcagccaggccccaggggcctgaagccagagtccagggggaggaggacacgtgcctgccccggcccctcgggagtccgtggctgttttgtaggagttggtgcccttgtgctaccgctgctccaccaacaacccgctgctcaacaacctgggcaacgtctgcatcaactgccgccagcccttcatcttctccgcctcttcctacggtgagtccctgcatcctgagcatgtgggtgggacagcctgtggacagccaggctcactccactgctctctggcctcaggacgttgggcaagggccaaaggcctctgaatgtccctgtttatgaaatgaggacactctgacgcccacctacctgacacaaggagtcactgtcggtgttcccagagataggacccactgctgcccaaagctgaagcacccactctgggaacctggcgcagggctttacataaccaaatgccccagaaagagagtccgatggctttgcattcagaccaggaggctgagataggttatcaaggcccagctcctttgatgttgacagaggatcagaagccccttcccaggagctgagcagaggccacacacacacacagacacacacgcacacacagactgcccctgcacacacacacatacagaaactgcccctgcacacacacacacagactgtccctgaacacacacacagactgctcctgcacacacacacacagactgcccctgcacacacagagactgcccctgcacacacacacagagaccgcccctgcacacacacacacagaaaccgcccctgcacacacacggagactgcctctgcacacacacacagactgcccctgcgtgcacacacagactgcccctacacacacacagattgctcctgcacacacacacacacacacacagagactgcccctgcacacacacagagactgcccctgcacacacacacagagactgcccctgcacacacacacagagactgctcctgcacacacatacagagactgcccctgcacacacacacagactgcccctgcccacacacacagagaccgcccctgcacacacacatggagactgcccctgcacacacacatggagactgcccctgcgtgcacacacagagactgcccctgcacacacacagattgctcctgcacacacacacacacagagagactgcccctgcacacacacagagactgcccctgcacacacacacacacacggagactgcccctacacacacacacagaaactgcccctgcacacacacagattgctcctgcacacacacacacacacacacacacacacacagagagactgcccctgcacacacacacacagactgcccctgcacacagacacacagagaccgctcctgcacacacacagagactgcccctgcacacacacacagagactgcccctgcacacacacacacacagaggctgcccctgcacacacacagaccgctcctgcacacagacacacagagaccgctcctgcacacacacggagactgcccctgcacacacacagagactgcccctacacacacacacacagactgcccctgcacacacacacacacagaaactgcccctgcacacacacagattgctcctgcacacacacacacacacacacagactgcccctgcacacacacacagagactgcccctgcacacagacacacagagaccgctcctgcacacacacatggagactgcccctgcacacacacggagactgcctctgcacacacacagagactgcccctacacacacacacagactgcccctgcacacacacacacacagaaactgcccctgcacacacacacattgctcctgcacacacacacacacacacacacacacacacacagagactgctcctgcacacacatacagagactgcccctgctgcctcttcttgcttttggtgaagctgccagtgggttgagaagcaactctgtggtcaccccacctgcctggcggcaagtcctttgcaaggcctccagccccctcagccctttctctatgccctccagacgtgctacacctggttgagttctacctggaggaagggatcactgatgaagaagccatctccctcatcgacctggaggtgctgagacccaagcgggatgacagacagctagagattgcaaacaacagtatccatgcccttggccagagcctgtgtgtgcggctgtgtgaggggtctggggacaggcgggaagtaggagggcccagtcccaggggatcgcgggccatgctgagcctggccctgtgttcccagagagattggagaggcccacatgggacagggacagggatcagagatgggcagacagctggccagggcctaaggacccagaagtggcaagtggcaccttggtcttcccgtgtgggtctcccaccctcccctgacccctaaaaggcactggctgtgcctctgtctgtgcatagctcctgcatagccaacatgggacatgatgtcatgatgtcggtgttggcccccagctcttccactcaagtcactttcgcatgcaagtgacagagtccaaaactgacaagctgaacaagcaaagggtgtgcaaggaagccccaagcaggagaggaagcttcctggcccagcgctcagtctggtcggtcacaggctggctctgcctctcttggccgcactgtcctctgggcaacttcattctttggcagccccgtggtgcccccataacacagagatgtcaggagcagtgccagccccacatcccctcagccttatagcccccagaaacagccagctttcctctcagctgtggcagtgaaagccccggggcacagctcagcctgccccttggccaggaggatgcaccagggcagttgtccagggcaggccacacttgcaggctggacatgggaggggcttctggcagggaacagcacacacgtggcctgaggcctcgctcccttgcactgactgagtctgcaggcctgggggctgtaagcctgccttccttgcagctcccaggtgctgccacccccaggggccacactgggaggagggaagctcagagagctgcttgctgaaggaaagacggacccatctctgccacccaggctccctcaggtgccacagatgatatgtgctatggtgctggcaggtgggtgctgtgcccactccaacttggtaccagcagtccccatgtcctgggcctccctgcaggacccctgctggcctctgttaccagccccaccactgtgggagaggggcggtttccagggacctccaggtgagtctgacccgccctggggtcagcagggactctcgcccctgtctgctccatcacaagtgcccgcagacccccagcagccactgaatgtttctccaggatccctgggcccatcccctccgtgcctacccgcagtggctcacagggcccgcatgtgcttcccactggccctgggagctatggtgtgtgtggcctgcgaggggaatgggtgagggcagcagggccagcagagtcccttccttctgattccttggcctgagccccctctgttcctccacctggaaaactcttccactggtctggctgcccttgagtcttctcacaggggtgtagggtggaggctagggtctgtctccatctctgcttctgattccatccttgaccagatccctccaggctcccagattctgcggctagtggagaccaaggactccatcggagatgaggacccgttcacagctaagctgagctttgaggtgagggtgcctctctgggtgacctgcaggagggcagcctccatcccttctcctgtgcacatggggaccctcagctagcgcagtggtggaggaggattggccagaacttccagatgtggtggcacgaaggaggggcaggaccccttcctgtggggtgtgggagccatggctgcccccgagggaccatggccaagggcgcaggtctgtggacagggaggcagcttcagctctggtgggaggagcttgccactgttagggtcacctgggtttaggaagcaggtcctctctcaccactgccaaagattccaggatcataatccacacagatgtctcactgtggctgagtgaggacactgtgcctccttcccgcccaccctgcagcaaggtggctcagagttcgtgccagtggtggtgagccggctggtgctgcgctccatgagccgccgggatgtcctcatcaagcgatggcccccacccctgaggtggcaatacttccgctcactgctgcctgacgcctccattaccatgtgcccctcctgcttccaggtaggtggccaccctggtagctcacatgtgcttctcttggccacttttcccttgcccaaatgtccctctgggaggcgtggcccctgggaggaggggcacatccatggctccaagttgggacagaggcttgtctgtcctctcccctgcttgcattccatgtgcatctaaagtggacttcactggcccctgcgctgtccacatcctccccaaatcctgggggcccagcaagcgtgatgtgcccttgaccttcactcagaaaacaagaaaccccacagccccctcccatctccccttccagccctcaaacaaaggtgctgcaggtctgtgtccagccctgaccactgccaagccccctccccttgagaggcagtgcgtcctggccccaggcgtagggctgatgagcactagggcttcagcctggtcttacagctgtcttcccttagatgttccattctgaggactatgagttgctggtgcttcagcatggctgctgcccctactgccgcaggtgcaaggatgaccctggcccatgaccagcatcctggggacggcctgcaccctctgcccgccttggggtctgctgggctgtgaaggagaataaagagttaaactg

SEQ ID NO: 15624 - DNA, 80227 bp, Homo sapiens
attgcttttgctgcttttctggctttccctttcggacatgcgcgctcggagcaaggcgccctcgcactcagcttaccgcgcatgtacgttgccaggggtaacgcaggtagccaaagtggcttgtggagtggcgaccgttagtgaggcggttgctgagacagacgctgaggcgggtaggaggagcccgagccgtaagggaagccgtgatgagggccgtgttgacgtggagagataaagccgagcactggtgaggagcggggcggttcgcgaagagcaggaggtcgagtcctcgcggggagtgcgcgagccgctgcagcgtgtttgaggggggcagcgggcttgctgcctgggccgagggcactgaaccccggcctgggagactgcagggtcgccctcccgccccttggcggttggagaaactcccgagggttggagagcggcaaagggaggtgccgcgcctgaggtggtggcgggtggaggcggctcttccctcacggtctggccctgtcgctgccttggattcatctcacacccacgagacagcacgaagctgctcaagcttcacagttcttgccacatccacatagtacccatactcttgttttcttgacgtttttctctaaattgtctcatttattttaattatgatttcacattttacaaggaaactttattactccatttatgaaaaccagtgtcacttgctctaaatgttaagataaaatcagcgtcgcttgctctaagtgtaaaagtaaaacttaaagtagggagaaacaaaactgaacaagctgtagctagctattgttgctagggagcctttaaacctgagatctcgtttctctaaaactggagatgggcaggtatgatcagaaaggtgctcaaaatgagcaccaaacacaagctctcctaattgggaagtctgaaaaagaactgaaggggaatgactttgtcaccttttgattcagttatttaatgtcctattccattgttatcgcctaaatctataacatagcagtctgttttgtcatattcttacttatgggataggtcttggcctgactttgaaaatcattcagcattgttgtgaagcctctgttctggccactggagcaggttacttgtctttggttctgtcccttctgagatctttctctgtgtaaagcatgccgtctctcctcatctcacacggaaatcctgaacatccttcaaggctcacgttggagacgggtcctctcttttgtgttcggcactagtggtagctgacactatgtgccaggtgctggctaagcacttcatatcctttatctcgttgtgtcttcaccactctctaaggtaggtactataatttcctctattttatgtatgaggaaactgaagcccagagagggtggataatttgccagcgtcacacagtgaggggtggaaccagctttcaagctcaggtcttcctcactccaacgtcaacgctctcagccactacattaatttttccttatgttacagacgtggcaaactcaaatgtctgcaggagacaggcaggtaacataaatgggagatgtttatttgcatcttcaacactaggaattgtatgttttccctaggaatagtcttgtattctgtaccccatttttcttgaaacacagccgtatcagtgaatctttcatttgtacttttaatagagatttgagttttaaaaaatcattttacttttaactttattataaacgtacctatagcacaagctgatgatagctggcaactgaacatttggcttcaatgtcagagtaatagagtgtggcaaactgcagagctcatgctcggcctaaaaggggcagctgctgctcagctcctgccaattaccaccatgcaggaatttggcctagtgtgctcagctcttcctgtttttaccagaagctaggaatctgggtttttatgtgaaatggcctaatttttaaatgttagcatccactctgaaaaaaaaacaaaacaccgtgtgggccaaataaaacatttgctggccgaatgcagcctgatttgctctgttttcaacccctggcacagaattttgttcatttctctcttgtggtacttccagagtctgttgagcataagagttaattttttaaatctgtttaattcagaagtctaataaacccgttaaaggcaatggctatgtcttactcgtttccaaattattctagagacaggtcagtggttgttgttactatggatagtaataaaatactagatatatataaaacgaaatactgtgggtagatgtattcatacgtgaatgaatgatgaataaagattggttttctggtttttggcccattacagatttgagacaacctattaggataagggatgtaggggttctatagaccatcaatcctgatggctgctagatataccagctgatagcccagaatgaaaacaaaacaaaaaactaaacaaaaaaaaaaaagacagtagaactaaaaaaatcctagatgtcaaagattagtcctccacatccaaatcagccattgtctcccggtctgctcctttgcttctattttaaccttcacatagcagcaggaactctgtttttttaagacctgctgctgtgatcctgttactctacttctcataaacctagagtgattcccaattactttccatgtcaagtcgtgcattttgctagagggtcctcctgaccctcctccccatcaggcttgcaacatttaaatttatacttttaggttgagctgaaaactctatttttctacccgaagatccttcccaaatgctcccttattctatgaactccctagttttctcctttaaatgcacagctccaggttcatctcaaccaggatgtcttattaggctagcccactgtattccaatcaggctagcatctgctgtaactctccattcatgccagctagtatttactgagtacttgctataggccacatgtccacatgtctttataggtgttatcatgtttaatctctacaacatgtgaggttggaattttcatctcatttaaagatgaagaaattgagatttaatgaggtgacataagttacctaagattacaaaatgagtaagtggggctgggtcagatgatgcaggaattggagaggcactgtgggacattggtttacagtgaggtgggtgcagggttgtcagaggacaatttgcaggattcctctgtatctctgcaatggaatctgacagtgtgtcttctgacagtgtatctcttttataaaaagaggcaggtggagagagaaccatcctacagtagaatagactgcctgcaaatgagtgagctcccagccctggagtgttcaagcaggggctagatggccatctataaggaattcttgccctgatgggccagatggactgcatgacaaggtctagagtcctttccaattctgagtttctggtgatttcataattatatttattacatgtctaggacagtgccatgcactgtgggtccacaaatatgtagaacatggccattgctttcaaattgtgtatgactataattaaaggggcaaggcaagataatatctaacacaatgtaaagaagactgtataagtcagagctaaactgaaatgtacagattctaagtacattaagagtttagattggggcaaatcagacatatatgatatattttaggaaggcaaatttcaagatattcagagaaaatgaatttttatatctaagaggaagaatgttcaggcttggctcaaatgagacattcagaaatgattttgtgataattcaacccaaaatgacccttatgaagaagaggtcacacaggaatcactttgatgagctcatatgtgtacaaggcagaaaggaagccacataccaaggatgactttagatgagaggtgcagacactgctccaacatctaataatccaccatagcaatccacaagtgtcaggcgctttggatagactggcttgtgcaccccgtgagtaggaggctacctctctatccttgttttgtaggtgagaatgaaagctcagataggagatcagcttttctggccccacgtcccccctactttttattccgccatgctgcttctcaaaatgtgaaatgtgccaaggctcagaggaagaaagcgtaagaaacaaggaaggcccaggtctgttaccacataatggtgaggaagctgaaaaactcagggcttcagtttgcccagctggaaagagtgtgataatcatccttgttccagcttctttatcagccagctctgtgactaggagcaaacaacttgcctctctgtactttagtttcctcattggtaaaatcggggcagtggtgcctgtcctgtctactacattatgttttcgtaaggatcaaataagataatgtaagtttacactcttttttttttttgagacagagtctcgctctgttgccaggctggagtgcagtggcgcaatctcggctcactgcaagctccgcctcccaggttcaagccattctcctgcctcagcctcccgagtaggtgggactacaggtgtgcaccaccacgcccagctaatttctgtatttttagtagagatacagtttcaccatgttggccaggatggtctccatctcttgacctcgtgatctgcctgcctcggcctcccaaaatgctaagattataggcgtgagccaccatgtctggccaagtttacactctttaacaattcttaaatattgaataactgtgaagagtttttattaaaggaagcgtcaggtcaacagagccatattaaaagctttctgaattcttcatgtaatgccttaagtaggtaataatacctttttttgacatatgccaacaatgataatggcagccacatagcataatggttaaaacatgggcttcaggccagattgcctgggtttgaggccggatgcagtggctcacacttaaaatcccagcactttgggaggctgaggcagatggatcacttgaggtcaggagttcgagaccagcctggccaacatggtaaaaccctgtctttaccaaaaatacaaaaatgacctgggtgtggtggcaggcacctgtcatcccagctactcaggaggctaaggcaggagaatcgattgaaactgggaggcagaggttgctgtgagccaagatcctgctactgcactccagcctgggtgacagagcaagactccacctcaaaaaaaacaaaaacaaaaacaaaaaaacagattgccttggtttgaatcctggctccatttccattcagtagcactttattttcaggcaagttatttaacttctctgtaccatagttttctcatctgtgaaacaggtatacagttgttttgaggttaacatgagttaatacatgtaaagcatttaagctgtacctggcatacacaataataaatgtgttcaataaatgttagtcactgttattaaagtatgaaggataacagatttgacatacttggcagtaattcaagggagcagaaggcagcatagcgcgttaattacaagcacagactctagagtcagacctgagttgaaatcctggcccttgcacttgctagttgtgtgacatcaggcaaactacttgacctctctgagccatggtatcctcatctacaaaacagagtaataattcctacctcacagaattattgtggagatgaaataaaataatgcattttaagagctcagcaggtgctgtctggaataagagttcgaagtactgtcattgagagtgtacttccaagttactgacaaaagcttgatttttagattactggtataaaccaaaaataaaattcagaggccccccaaccatctgaatggatttccttctcaaccagggctcttttaaaatttaacctgagagactgtttcaggccatgatgggaaatgggggtcaaacatgcctcagtatacctctctggcattaacatcaacacagactttaagtatgataagaaacattttacaaactctcctctctaaagcctagtacctcaaggcttcctctgcaaacagtaacttgggttgccacaatcctttatcttaacccaggcattcctttctgttgaacctaggttttttgttttttttttttctgagacagagtctcactctgtcgcccaggctggagtgtagtggcgcgatctcagctcactgcaagctccaccttccgggttcacgccattctcctgcctcatcctcccgtgtagctgggactataggtgcccgccatcatgcttggctaattttttgtagagacggggtttcaccgtgttagccaggatggtctcagtctcctgacctcatgatccacccacctcggcctcccaaagtgctgggattacaggcatgagccaccgcgcccggccgaccctaggtccttagataagctcaaccaattgtcagaaaaattttaaatcaacctataagctagaagccccctgcttcaagttgttccatctttctggaccaaaccaatgcatttcttaaatgtatttgattgaagtctcatgtttcactaaaatgtgtcaaaccgagctgcaccctgaccaccttgggcacatgttctcaggaccacctgagggctgtgtcatgggctgtggtcactcatatttggctcagaataaatctcttcagatattttacagagtttgattttttgttgacactggcaagtttatcccatgctaaacttttactatgggttgggttttgtttttttgttgttgttgtttgttttttgtgtgttttgttttgagtaacttcagtagtaaccttaacaatagtctgttttgacaggtttttgacacattcttactatagtcacctgaaccaatgaaatcctctgcctggggcatttgaaaaatctttgtaatatggctctagcccatttttctagcctcatttctccatgttctagcaacatcttgcacatagccagatgtttcagtcaaattaaattattttgattacttgtgttggcaagaagagtcaaactgcaaaatattttaagagatttattctgagcctaatatgagtgaccacagccagtgacacagccctcaggaggtccacagaacatgtgcccacggtggttggggtgcagtttggggaggcatgagacatcaatcagatacatttaagaaatacattggtttgatccagaaaggcaggacaactcaaagtgagggcttccaggctataggtaaatttaaacattttctggctgacaattggctgagtttgtttaaagacctgggatcaacagaaaggaatgtctgggttaagataaaggattgtggagacccatgttcttatttgcagaggaagccttcgggtactaggcttcagaaagaataggttgtaaaatgtttcttctcaccctgcaaaacagagtcttgctgtcacccaggctggagtgcagtggtgcaatctcggctcactgcaacctctgtctcccgggttcaagcaattctcctgcctcagcctccctagtagctgggattacaggcgcccgccaccacacctggctaatttttgtatttttagttgagacagggtttcaccatgttggtcaggctggcctcaaactcctgacctcgtgatccgcccgcctcggcctcccaaaacgctgggattacaggcatgagcaccgcacccagcctaaaatgtttatcatacttaaagtctgtgttgatattaatgccggagaggtacaatgaggcatgtcagaggcccacttcccgtcatggcctgaaacagtctctcaggttaaattttaaaagagccctggttgaggaggaagtccattcagacggttgggggggcttacaattttatttttgttttacacttgttatttctcactttcatgtctttgcttgttttattttctttgcctgaaatgtcctttacccagtgtcctcctccatgtttcaaaagccctacctttttcaaatatcttcttcattaatctttttctgatcctctccttgaattaaaatgctgttgaagcggcgtcattgtctggggtaaatatccgagatttgttgtctcaacagcaatggaaaactaggatacggacacaccagagtgaggttacgagtagaagtttaacaggcgaaagaaagagaagagctcactgcagctgacagcgttctcgaaaaaatgagttgccacctctgtggtgaaatgcaggttttatagataagcttgaggaggtggtgtctgatttacatagggcacaaaagattgattggattggtgtttcatttgcataactttcgaaaaactggttagggctaggtgtgtcatttgcattgggtgcgaaaagctggccacccccaccctaatcttttattatgcagttgggttatttacgtggccagcgccatgttgcccgtttctttactgtacacgtggtgacaaattaaagggaggacagaacctccatgttgaacatacttggcccccaggtagcctttttctattggcacagctgccggcattcaccagtgcaagcttccagcttgcctttttatttatttatttattttttttttttgagacggagtcttcctccgtcgcccagactggagtgcagtggcatgatcttggctcactgcaacctctgcctcccaggttctagtgattctcctgcctcagcctctcgagtagctgggattacaggcgctcaccacccaccaccatgcccagctaatttttgtatttttggtagagacaaggtttcactatgttggccaggctggtctcgaactcctgacctcaagtcttcctcctgccttggcctcccagagtgctgggattacaggcatgagccgctgcgccaggcctcagcttgcctatctatgtttgcagctcgatttttcaggctgctctttgttagaaaaaaataatttcttgggctgctttttattaaaagggaagttctgccgaagactcttttaccttcactatctggctaaataatttctttctagctcctgtatcactgcgtcttcctccttcgaatcctgttttcatgtgtctcttaaagcctttatcagagtactgttctgtatttcatccaatctaataggtcattgattataaaataccattgttttgtgtatcaataagaaagcaaaaaatgctgccagttacactgaaacatcatcaattataagacacaaccttagaggtgagaaaatgtgaaaaaaaaatgtaagctttagaattgatgacatatggtagttctttgtgaaagtgtctgtttcacaccttctcactggatagtaatttccctgaggggagggagggattatgatctgttcatatctgttggtgcctggcacctaagagggactcagtaagtatctgtggatttactggcccttaacacattctctcatgttgtctagcctttatgatattattagaagagttaataccctcaacagttgaccctttgaataatttcttgtgtctggcttctggacaagaggaaatcaggacaaagagctaactactgagtggatcatgattgaatgggctgctgtggtgtggcggttgaatggaatttgcaacaaatgcaattcgtagttattctttttctcctcagtacacacacagtgtttcttaatggcaataaagtttactttcctggccattagcagacttcatcattttggttcctaattgtctttttcccttgtcttctgttcagtataaatgacatcgcatttaagcctgatggaactcaactgattttggctgccggaagcagattactggtaggattttgtcttagtttcctcttaaagtgcttccctaacctccctcttgtgagtactctgaaatttgaccctttttttttttttttgagattaaaaaggcaagggtggaaaaaccttccctattactttttaatagggatggaaatgggctatttaaaacgggcaagtaaactatcagataagaacctgtgaacaataccacctttggggtcattcatctttccctttttactttgagacacccatgaaagagttgaaaacaatcacaatgcctttgaaactggactggtgtcagtttacattttgtcccccagaaaaattcaagcaacaggactgacggtgctgtgtccatgaaaagtcagatagcctgaccccaacttttaggcattggcctatctaaacagttccatatggatgttgtcctatttttcatattttcaaataacataagctccctctggaacctatccaggtatataaaagtaattttcagagaaccccttatgtttgaccaaaaaacctttgtatgatctctctttctgtctaagtctacttcctcttctctgttgtctctagatacgcagactgattaatctccattctttgtatggttaactacataatcttaaaacatggttaaattgttctgcagacttctctccagtgtaaacaatccaaactctattagtttttctacataggttatcttttccaatactctaaccatttcagaaagtttccgcttgatttctcagatggtgtgtgtgtgtgtgttttttttttttttttttttttttggagacagagtctggctctgtcgcccaggctggagtgcagtgacgcgatctcggcttactgcaagctccacctcccgggttcacaccattctcctgcctcagcctcctgagtagctgggactacaggcgcctgccgctacgctcagctaattttttgtatttttagtagagacggggtttctccgtgttagccaggatggtctcgatctcctgacctcgtaatccacccacctcggcctcccaaagtgctgggattacagaggtgagccaccgcgcccggccagatggtgtgtttttaaactctccacatagtgatagatgtcacatggctatcaaatacctaaatccatattacagctgggttttattttatttcttagagacagggttgtgctctgttgcccaagctggtgtgcagtagtgcagtcatagatcactgcagcctcaaactcctgggcttaagggatcttcccacctcagcctcccgagtagctaggactgtggacacacaccacctcgtccacctaatttttatttttttttatttttatttatttttattttttgtagagatggggtttcacttagttgcccaagctggtcttgaactcctggtttcaagcaatcctcccacttcagcctcccagagtgttgggatgacaggagtgagctaccatgcctggcctacagttgggttttataacattccctcctacttgaaagcccagagttctgtgactttcaaattcttggtagcaaatatgaaacatctattatgttgatttagtgcagagctggcattaaaatttaatcatgttgtagctggctctttttatgggctagttttatttaggagggcctgccttgatcaatcatatatccaaattcaggtaaggatgagtataaagaatttccatggagtgagtaattgaacctttggttctcaaggattggtagtatattcctggtcacatagtacatagacctgggtcctctacttcttggttacccaactttaagtcacgttgtttttggttttgcagtgcagtttttattggctacagatttagaatattgacacgtattgttataaaaacaaaaatagcagtagcaaccctgcaggaattctgactaatagatatcacatagataatctgtatttgtctcttttgccaggtttatgacacctctgatggcaccttacttcagcccctcaagggacacaaagacactgtgtactgtgtggcatatgcgaaggatggtaaaaggctgctctgggtttccattctctataatagcctcatcattgttcatttttctctttagtcactttttaattatttctagtaagctggagtacaagttgcaagttcagaagacagtgaagttgctaagacttcagtttggtcattcaatctagcaagtatttattgaggtcatctatgttccaggcactgttcaaggtgcttgagttacttcagagaaaaaaacggtggtccctccccttatggggcttctgttttatggggtggtggtgagaagtgagggaggaagaaagtatgagggaagacatacagtaaacatagtaaaaaggtaaattaagtagtatgctggaaggtgataactgttatggaagaagaaaaagtagagcagaatgagggggattgagagtgctgggcagggcagggggttgggtacagtattgaattagactagtgagggtgggctcattgagatgaggacaggtgaggaaaaagactttgaagtcaggaggcaatgagattgtgccagtgggcatcggggggaagagagctctttgcagaggaagagccattgcagaggccctcaggtgtgggtgtggctgctaggagctggatcaaagagaatcgggaattgtagaggatgaggataaagtggtaacagacatggggtggtcagatcataaagattttgattctcagtcaaaatggaactactgaaaggtcctcagcagaggagggatctgatttgatttgtattttaaaaggatccctctagttgctgagttggaaacaacctgcaagaggtgagggttaggacatctgtgtgaggaagcatcatccagacagggggtgatggtggctcagacctctgtgggggcagaggaggtgatgagaaattatcagactctggatataatgggagggtggagccaactggattgtctgacagattggatatgggctatgaagaaaaaggagtcaagtttttgacctgaggactgaaaggttggagttgccccccccactgagatggaaaagactgcaggtagagaaaagttatggttgaagatcagaaattcagttttatacatgctgaatttgagaaaagttgatgatgtcggagaggggagagaactgctggaacagagttgttgagtaggcaagaggagatgggatctagggcatagacggggtatttgctttagataggggcacagtaggaactgcagaggccagcagatggggacaatgtggtagtaggaatctaatggaaattctcaattccattttttttttcttcagtgaaataggaagcaacagcaactgagagtggcaatggggaagggaggtttcagagagttgaagagaaagggaaaaagtgtaaagtcactgcctcagagaatgggacagcgagtggacccaggaggtgtagtgagatccccggtgacatgaagggccctcttgaagattgtgatcatgaattgaaagtgagattagttggtgtgattgtgtctttttctccagcgattttgagctgcatagttgtagaggcagaagaggtgaatttaaccagaggtggttttgcaagcacatttgaagatgaagtaggagggcaagggagcagaaagtgtatacagataaataattatgtacattaaccttgaattgttggctgaataatgaagggagagaggacagcaatggagaagtagtaggttctggtggtgttgaaggattgttacagttggggtaccaggtgggttgggaaggaagggaagtggtgcatgaaactgagatttaaatttattttaaaataaatccatgttgtcccacagcataggattagtgggaagaaatgggctttggaatgagacagttgtgagttccaaccccaacccaacaccagagttctgtgagtctgagctggttattgagtctgagtcacgatttcttcatgtatcaaatggataacattgagataacattctgtagccactgccaagaagtcacaaaattgtaatgttataattcttgaatgaaccttggagattattccagtcccaggtttttaacttcttttggctgatgggcctctttgataatcagatggaagctttagaccactttctagaaagatgcaaattcttcatgtgtatgcagaatttcatgcatataattttagtctgattagtccagtctcttcactttagtcctgcataaagacataaacaattggccaggcacggtggctcatgcctataatcctactgaaatcctaaagctctgggagcctgagttgggaagattgcttaaggcaggagtttgagaccagcctgggcaacatagtgagactccctaaaatctggcctgggtgacagagctagactctgtctcttaaaaaaaaaaaaaaaagacaagtcatgtgacttgccaaggccatgcagcagattggcccaaagacaaaactaatttcttgcttcatagtcaggtgtgctgtaccatggtagtcatatttgtgtgtgtgtgtgtgtgtgtgtgtgtgtgtgtgtgtgtgtgtgcatgtttgagttcaagttcagaataatgttttagggagacctgtgaggagggagcctggagagctgaactgtttctgtctcatcctagtggctgttgaggaatgtgggtcagtccagggcccagtataaggcccagtaggtacagaagagctattgggcctctggtgcctctggtgtttataagcatagcagggctctttgacctgcaacaccattagggcacttgaggatgtcagagtgtgacccatcagtagtggcatttgcacagcactttgcagagtcctgtcacacacatctcacttgatgcttccaacaactctctgaagcaggcagcaaggggactcttatctccgctcaaagatgagaaaacagacttggagcaattacaggtgatggtggcagaggcaggcctaacccaggttctctgactgcagagtctttgttctttctagtgtatcatgctgcctcttcatgacacctgtataatgattaagaagtcttttagtcctcagaattggttttttcctcttagacctgaagattgagatacactgaattccagctttgctctttaagtctgcttgtttctgatttctcctttaagttcattaagttttttttgtttttttttttgagatgaagtctcgctctgtcgcccaggctggagtgcagtggcgcgatctcggctcatggcaacctctgactccctggttcaagtgattctcctgcctcagcctcctgagtagctgggactacaggcacgcgccaccatgcctagctaatttttgtattttcagtagagacagggtttcaccatgttggtcggcctgatctcaaactcctgacctcgtgatccgcccacctcggcctcccaaagtgctgggattacaggcgtgaaccaccatgcctggcccaagtttaataagtatttaatgagcaaccatgatataaaagtatgtaagacatagtttttttgttcaagaaaaacaatataatatgaagaaataatagaaatagctaatttttttttaattctattccaggcccagttctaagcaacataagggttaggggtgccactgcctgtgcaataaaaaatctgcatgtaatttctgaaccccccaaaactttactattaatagcctactgttgaccagaagccttacctgttacataaacagttaacacatttttaatattatatgtattatatattgtattcttaaaataagctagataaaatgttaattgagaaaaaagaaaaatatatttactcttcattaaatggaagtggatcatcataaaggtcttcatcttcattgtcttcaggttgaataggctgaggaggaggaggaggaggaggaggaggaagagggattggtgatgctgtgccagggagacagaggcaaaagaaaattcacatgtaaaagtggactcatgtagttaaaactcatgttgttcaggggtcaactgtatgtacacatgtacatacactcatttaatcttcacaccaaccatgaggtaaatactaacattgtatccatttttcaaataaggaaatgaaagctcttcagtagcttgtttgggtcatgcagctggtcagtgagatctctaggaattctgacccagagactctgagcccaaagcttatgcttttcatcaccatcacctgctacctaccaggatgagggaggagtgatggaaatagtaagagcagtttctttgtttatttagtatttgcagcaatatcatatggctcaccctaatatctactatttcagctactgtaaaaggtacttggccgggtgtggtggctcatgcttgtgatctcagcactttgggaagccaaggcgggtggatcatgaggtcaggagtttgagacaagcctggccaacacagtgaaacctcgtctgtactaaatatataaaaattagctgggcatggtggtgtgtgcctgtaatcccaactacttgggaggctgaggcaggagaattgcttgaacctgggaggcggagattgcagtgagctgagattatgccactgctctctggcctgggtgacagagctagactccgtctcaaaaagggccagtcgtggtgactcatgcctgtaatcacagcactttggaaggcggatcacctgaggtcaggagtttgagaccagcctgcccaacatggagaaaccccatctctactaaaaatacaaaaaattagccaggtgtggtggtgggcacctgtagtcccagctactcgggaggctgaggcaggataatcgcttgaacccgggagtcggaggttgcggtgagccgagatcgtgccactgcactatagcctgggcaacagagtgagacttagtctcaaaaaaaaggtactttacagatactatcttagttgactcccataaaaagactctgaggaagatactgttcctctgtgtttcagatgaaggcattgaggctcagagaacagtgacttgcccaaggtcaccttccacttgccctgtgaataaagtctaaaagtccttaagatgtacagaatgtggcacatacttacctcttaatcctcgtctctcaccagagtaggtgaagaccccgttatttgctgccatggtaccgtgatcctcttccaaatgcttataaatgtggaacagtgtaattaataacaaattacttgttatatgttgcctctctccagtctgttccttcataaagcccaagtagtatgaaaatgcgaatctgatctatcactctttgcttaaaacctttctttggcttcccattgctttaggataaagagcaaggcctctgctgtgtccctgaggtcccaagagatccttccacaacccacctcacccttccctccgttccatgatgactccgctcattccctcagacatgccaggcttttcctgcttcagggcctttgcacatctgttccatccatgtggatgggtctgtctcctctctacatctggctaagctctgctcatcctttaggtctccactgaaggatctcatccttagagaaatgttccctcatctaaattaggtcccccaggagatgttgaccaaagggtagtttcagtcagacaaaaggagtacatttttgagatctattgcacagcatggtgaccatagttaataatagcgtatatttcaaaactggcacaggaatagtttttttttttttttttttttgagatggagtctcgctctgttgcccaggctggagtgcagtggcgtgatctcggctcactgcaagccccacctcctgggttcactccattttcccacctcagcctccagagtagctgggactacaggcgcccgtcaccaggccggctaattttgtttttgtatttttagtagagacggggtttcaccgtgttggccaggatggtctcgatctcctgacctcgtgatccacccgcctcagccctccaaagtgctgggattacaggtgtgagccactgttcccggccaggaatagattttaaatgttctcactataaaaaaataagtatctgcagtgatggatatgttaattagcttaatcattcttcaatgtgtatgtatataaaataccacattgtacttcataagtagatataattattatttgtcaaaaataaaaatttaagtaaaaaagtaaatcaggttccccagttattctctttcataggatccgtgtcttaccatgttgtatttgtgttagattaatttgatgtgtacttcttacactagactgaactttatgaaagtagggatcatgtgtgttttaatcattacttaatccctagcatagaacatgacagctacatgtagtaggctcccaatacatctttgtttactcagtgtcagacaaagcaggtttggaacccaaatattctgactccaaggtcctgcctcccagtactgataagaactaggaaagaagctaacacttactaggtaccttaaagaactagttttctaaagaattctctctgggaaatgctggtttaagataaatgtaagactttccattttacaaacacttttaggcaagcgctttgcttctggatcagctgacaaaagcgttattatctggacatcaaaactggaaggcattctgaagtacacgtaagtaacttaggtgtacagtattatgagtttgatgcttattgaataattgcagcaaaagcctcttagaaaagatgtaggagaaaacttttttctcttaaattgaacttgaaattaagttgtgggtgtgtgtggttggtataggaaggttgagtagtgaataagttaatgaatatttcttggccacttactggcgtggccagcactgggctaggtgcttttatgtagctcatctcagttcatctgacattgtagactttatcccacccccaacctgtcatcttccagtgtccctgtctcagagaatggccttatatccacccagtgtcaaatgtcagaaacttggggtcagtgtgctccaggcctcctcttactattggggatctgccgtgttcttcccctgttcctctactagttggtccctatttaccctgcagatctcagactcaaatgtcagtttctttgtaaggactttcctgcctctctagactggaacaggtctctttcgaggcatttctcacaattgcagttttaggtttattctggtgactgatcagtattgctcatcggcctgtaagttccataagaacagatactgcatctattttttgttttgttttgttttgttttgagacagagtcttgctctgttgcccaggctggagtgcagtggcacgatctcggctcaccgcaagctccacctcccaggttcacgccattctcctgcctcagcctcccgagtagctgggactataggcgctcaccaccatgccaggctaattttttgtatttttagtagagatggggtttcaccatgttagctaggatggtctcgatctcctgactacatctattttttttttctcactcttgtgtccctgatacaatgcctagcccataattggtactcaccaattttccttccttccttctttccttccttccttccttccttccttccctccctccctcccttcttccttccttccttccctccctccctcccttcttccttccttccttccttccttccttccttccttccttccttccctccctccctcccttcttccttccttccttccttccttccttcctttcttttcagtcttgctctgtctcccaggctacagtgcagtggtaactagctcactgcaactacaaccttccaggctcaaataatcctcttacttcagcttcccaaatagctggaactgcaggtgcacacccccacaccaggccaatttttaaatttttttttttcttggtagagacagggtttcactttgttgcctgtactggtcttgaactcctgggctcaagcagtcctctcaaagtactgggattacagatacgagccactgcacctggcctcttttcaattgtggtaaaatatacatgacataaaatttatcatattaactactttttaagtttacagtttaatgttaaatacatttacattgttgtgcaaccaatctcccaaactcttttatcctgctaaactaaaattctatatccttcaaatacctactcacccttctctcctacccccagcccctgaaaaccagcattctactttctgtctctctgagtttgactgctttacatacctcatataagtagagtcatacaatgtttgttcttttgtggctgagttatttcatttcacgtaatgtcctcaaggctcatctgtgttgtagcatgtgtcagaatttactttctgtgttgtagcatgtgtcagaatttacttccttttttttctttattattatttttttttatgaagacgaggtctcactatgactcctgagctcaagcaatccttctcccttggccgcccaaactgctgggattacaggtgtgagccactgggctcagcttccttcctttttaagtctgaatattattccattgtatatatagaccacattttctttatccattcatctgttgatggacacttgtgttgcttctgcttcttagctattatgaataatgctgctatgaacatgggtgtacaaatcaacaaacaatttttgaaggaatgaatgaatgagtgaagttgtaagtaaagtattacccacaagtgaaggactaaaacgggttgagacgccttgcatggtacatgatttgctcagctttcattgttgtctaaggatttgtcatgtttccagatcttggtctgtgatgtcttcattgcacctccatcttccatttctgggcctccacaaaacagtaagagtaacagccacagataaagcacctaaaggccaaggtgggaggattgattgcttgaggccaagcgttcaaaaccaacctggccaaaagtgagtccccatctctacaaataagaaaacagtgggtgaggagaaggagaattaattctttaggagtaggagaattaatttctgtgctttttgttggtcacttgcagaagagcatgtggtctaaagtcagaggctgtgggctcattattaaaatcttcagttgtagccactgaaatctttgtggtttgctgcatagtaatctacagttgtttacttcccaggcacaatgatgctatacaatgtgtctcctacaatcctattactcatcaactggcatcttgttcctccagtgactttggtacgttctgattcctgatgtcctgtcctggaataactgaaaatctgggctaaaaatgctaaaatgcattcagaatatggtgattttatcctgagagagttaatactacttctctaccttcaatggctgaggggaggctgacagttattctttaaattgtgtggaaaccaagacagtgaatggtgacctttactctggtaagacatcagagactacaggaagggccccagcaaaggaaatggtaacaagattgggagggcacaggcataacttggtgttgctgcctttgggaagccttcccttggtgttgctgcctctgggaagccttccctgactcaccctggcagagacagtgcagttgtcctcacctttgtattgacccacatctatgtttatgtgaaattcttcactgttgcggttctacttcttgtgcaatttgtcgtcattactggtttaggtggctgtagctgtcctccctgaggggctgaacaccttgaggagttcatcctggccacggtcccgtgccagcattacagcactggtgtagtactggcacaaaagaggtgtcagtaaaatgtctgtggagggaggaagggagtgaaattgggcagaggcttgtaggttatttccattaatggttgattctgttttcagctctatcagtctgtgttcgttgctagtggatacaatgaagtcactagatgaggagtcagaggcctaatccctctcagtgttccagttcccttatctaaaaggagcatgctactcactgtgtctcactgatacggttctggttctgaggttcaaaagagagaatggaattgaaagccaattgtataaatacatggagaaaggcctgtcatttgtttaacatattttatagcattttcttcatgtgaagcactggtctgtgtgcttacactggaatattaaaaaggcaaaatagaatccctaccctcaaggagcttgtggtcttaggagaaggtgggattaaaaaaaatataatattaagtactagtatttattgaatgcttgcagtgtgctaggcactgttctaaggattagaaatgaatttctatttgagctttatgacagcccctgaggtgtcaggtattattctcattcccaccctactgatgaaaaagaggtagaggtcccttagctagtaagtggaggaaccagggcttggactttagaccaggtgattgcatacagagcctgctctgctaagcactgctgaaggaggcccaggaggaaggagtttcttccagcttggggctccaggcaggcttagtggaacacagataacatgtgcacacgtcaaaatgtttggaggaagcgttctggaccaggggaaaggcaaaaaataacttgtttgatgttgcacttggccatgtatttgtgcactggagttaccttcttgattgtacttcgcaacttggcaaatagaagaatttgcttatgttgtctagacatacacttgctatgaggcactgagccagggcatctgggacaggggggagcaagccttaggtgaccagtgtgccatgggagaggcacagctcagatagagtcatgtgttgtgattgagacctatgaaagaaaactagattttcagaaagcatcattgttattttaaatgctaggttatactctggttgcagtgtcaaagttataaacaatgaaactgtcatttctttgagagtcaaatccctgaaaagttggctagaactttaccaatctattttatttttcttctgaaagaatgatagattcatagtaagttacaaagatggtaccaagaagtctatgtacttttcatccagtttcccccagtggatccatcttatgtaactattatacaatatcaagaccaggaaactgagactggcacaaagtgtgtatattatatagttctgttgttttatcgcatgtgtagattgccatcagcgtgacacagaactaagccatcaccatgcagttaccacttagtgtcatatctactcaccttacctccagttatctccaaaccctggtaaccacaaatctgttctccatttctataattttgtcattcaagaatgttatataaatggaatcgtacagtatatgaccttttgagattatgttttttcattcagcataaaatcctggagatccatctaagttgttgtatgtttcaattatttgttcctttttattgctgggtagtattccaaccaatccatcttcttttatattattgtgcattgaagggttgtggtctcctgaacagaagtctgtctccaaacacaaatcaagcagcaagatcatctgctgcaggtaagtgcagctctgacgataagatttatgttccttcatcttccacacagactctcaaaatccaattatttcatgcagcagagaaggtcttgtgttaggtagttggtttaggcccctgtatttccttttttcttctttcttcgtctcctcgatgggaaagacttgtgcctttgatcatgaagcaaaagagaactacaagttgccttcatgcagttacttagcaacaagcctcaacatccagctatactgagtggaggcttgttgaaaatgtgaggctgtcattgtccaggcagcatgtgtggggaagaaagctttccctcccacactttgatgctagacctgaattagaatccagaatctctcattgacaggccatgtgacctcaggaaagttactaaatctttctgagctggagctttacgttcctcatctgacagatagggataaaaatactgacttgacgagattgttgtgaaatgcacacaaactcatgagtgtaaagcgtgcaggacagtacctggtgtacagtagacactctaaatggtagctattcttgctgttcagcttctaggagtatatcccttccgttcagcatctgttgagcaccttctacaaagcaagcactgttctaggggttggaagacaccaagtctgttcttaaggtgctctttaagtgggaggggattgagatggagagtgggaagtggtggctggcccagagatgtaggcacaagctaagggctgtcatagaggtatgtacagagggctgggggagctcagaaaaaggcaccaaatggtgccttcacttctcactgtttattacagaactaaatagcattttaagtttgatcctctgactttatgtcaggaccggcaataatgaaaccatatcccagctgttgctgcctcatcagacttttatttcaaaccaaggcatcatcctcactagttttaccttctgtggggtgcttcccctatccccatgccttttgttggttgtgtacacagctggacaaatgatggtcagtacctggcgctggggatgttcaatgggatcatcagcatacggaacaaaaatggcgaggagaaagtaaagatcgagcggccggggggctccctctcgccaatatggtccatctgctggaacccttcaaggtactcttaaagttgtcctccttctagaacaaacaccatcatgaagaagggctttttgtcttcctgaggtctccctacattcaaaggcttctcacctcacttgaatggtctgttttagaacctgtcccatttgtatggattttttttttaatagtcccgctacctgagaatgtatggaatttattaagagcctcctcaaaagttgagtttaggaatgaatcctggacattttagcaaagcagatgagctatttaggacaggccaaagtgtgtgtgtggcgtgtgtgtctgcgcacatgtgcatgcacacatgtgtacgtgtacatgtatatgagtgtgtgtgtgtgtgtgtgtgtgtgtgtgtgtgtgtgtgtgtgtgtggtgtgtgagtgatgcagcaggaccatttccttatgaatcaatagtggagctctttgctgtggctttatttttgcctttccttttttagttcttccctccaagtttgggcagaatatgtgcccacctgttaataaatagctttttcatgagcctttttttgcccttgtcagaaagtcaaaattaagtctacagacgtccctaaagcctagagatacacaaacaattggcacctaccttcttaaattttatacacactttgctttctatgtccatgtgactttgagagtaaactaattatatgctctttttttttttttttttttttttgagatggagtctcgctcggttgcccagcctggagtgcagtggcacaatctcggctcactgcaacctccacctctcgggttcacgcagttctcctgtctcagcctcctgagtagctgggattacaggtgcctgccaccacgcctggctaattttttttttttttttgagacggagtctcgctctgtcgcccaggccggactgcggactgcagtggcgcaatctcggctcactgcaagctccgcttcccgggttcacgccattctcctgcctcagcctcccgagtagctgggactacaggcgcccgccaccgcgcccggctaattttttgtatttttagtagagacggggtttcaccttgttagccaggatggtctcgatctcctgacctcatgatccacccgcctcggcctcccaaagtgctgggattacaggcgtgagccaccgcgcacgcctggctaattttttgttgccaccacacctggctaattttttgtatttttagtagagacagggtttcaccatgttggccaggctggtcttgaacttctgacctcaggttatccacccacctcagcctcccaaagtgctgagattacaggtgtgagccactgtgcctgaccctatatgctctttatatatcctataatattattaaaccatcagtatcctttacagagtcctctgagggtaaacgaaaggtcctacttgtttaccagctcaatgtcattttacagatggttgcctacttgatttagaaggttgtttggaaggttattatgcttcttcctgaataattttttttggcccatgctgtaccatgcatgtctaatgctgtcaaaggccattagcctgccccagagttcctgctgtttgatttgtggctgcagaggacttggtggctctaggctaccatttttaattcatgagaagcaggaggccctgtatacctggtggctgtcctcctccaggtagggttcagaggctccttttattttttatttttattcttttttttttttttttttttttttgagacggggtctcactctgtcacccaggctgcagtgcagtagtgcgatcttggctcactgcaacctccgcctcccaggttcaagcaatcctctcacctcagcctcccaagtagcttggatcacaggcacatgccactacacctgtctaattttttgtatttttggtagagacagggtttcaccatgttggccaggctggtcttgaactcctgatctcgagcgattcacttgcctcggcctcctgaagtgctgggattacaggcgtgagtcactgcacctggcccccaggggctccttgccaggattttaaattatagttttagtgtagttctaggcaatgtaattttgaacaactacttactgtctacagccgatgggagagtttctggatgaacagagagaatgaggatgccgaggatgtcattgtcaacagatatattcaggaaatcccttccactctgaagtcagcagtgtacagtagtcagggtagtgaggcagaggaggaagaaccagaggaagaggacgacagtcccagggacgacaacttgtgagtgtgtcccagtgagtgggaacccttctggtaagggcccaggccccacacagacttgccaggacagatgttaaactctttggccaagggagtgcagggactagggggaactgtgggtgaaagcgccttcaaaaaaaggagacatacccttaaaacttgtgtgtgggtataaagtgatcctgtgagaaactataggaaatactgaaaagactaaaggagaaagttcaacttttctgataaaaccccatcccctgaggaaatcactgttagcaatctagtgtatttctcctcagtcttttcgtgtgttcatataattaactaagtcatattctgctttttttttcacttaacattatagtgtgaaccctttccagtaacattacaaatccttcgaagaacatgatttttaatgtctgaaaagtgtgcccttttgtggatgccccatcactcgacacttcctctattactggacacgtttcttagcctgttcccacactatcccttaccttaccttgcattttctaggatgtatatcagagaggaagcccttaccttagccacagtcttcactcccaaatcctggctgtctagtcattcttctcttcagttgagattgcctgtagggaaaacatgggcaggccagagtggggaaagctggggtagccaggatatctcagtttggcagtagagatctagcttgagactttccaaactgttttacatagtacctgagtttccttggaagaatcccaccctgaggtcatgggggctgggaagtggggaccagtaaaggaggaaggtatggctttgggtccccatctcagtgcctttgattgtttcaacatgagtttttgtttcataaagaatcctactgccccaggaggtaaaagggggttgaaaatcactgatccatctcacagggactgagcccagcccagagccatatgtggcctccccaagagggctcactggtgggctgggctcctggattgtgtttggactttggacatcagtgccagtcacacaaaggtcatctgcaggctccctcattaacatccctctcggtctttgtctcttttcccttagttttgggttagtgcctatgacatttgccactcttggctgggttttacaaacaaggctttaccttgcctgcctacatatccagtggtgctaccaggttaccacaagacactgggatcagaaaagctggaattaataaacaaagaggcaacattaggtggattaagacccagcctcaagggctaggaatgcttttcttttttttttttgtgacagagtctggctctgtcacctgggctggagtgcagtggcacgatctcggctcactgcaacttccgcctcccgggttctaagcgattcttgtgcctcagcctctggaatagctgggattacagacacgcgacaccacgccgaactaattttgcattttcagtaaagatagggtttccccatgttggccaggctggtctagaactcctgacctcaggtgatccacctgcctcaacctcccaaagtgctggaattacaagcgtgagccatcacgggctgccgcttttctcttgaactagattcccaggtagcttgctctccagcctcaggcaagggagtttctcctgtgtgctggtcctacagtcccagccccacagcactgatccccataggttctcagtttcaaagacagttgtttgttttcagagcccattgctcttttttgaaaattagattcagtcagaaaccatttcacctgtgcaaggacccccgcctgcaggagaacctatttttaggtgttaattttctttcttcaggaagagcaagcaagtttcccttctattaaaaaatgtctttgtgctgcaagagatgtttctctgccatctccccacattttctagtatgtaagagaaaagcagtctcaatattgcagccttgcctatcttagtgttgctccccagtaagctctgaaatgagaggtttatcttcttcagctgcagcagtgtccccagcaccataaggtcatagcaggggactcagtgaaacagcagatcccaggaaggctgaacctcaactctgcttcatcccgtaagactgattgatgggttgggccaaattataacttttggcttcagtaaagctgtacaacatttggcaacctgaggccaggacttccttgttcctgttgtttaagcccttagagctatactcatcagcaggctgtggcccttcataacctcttttatcttctgttgattagagaggaacgtaatgacatcctggctgtggctgactggggacagaaagtttccttctaccagctgagtggaaaacaggtatgtagccctgtacaaatccaattgcagtcatgcctgttatattttcattttctgagattctgttactattaattatacattatcattgttagttcctgcttattgagcatttgctgtggtaccagatactgtgctcactgctttgcatactttatcctattttattcttataaaacccaatgaagtgggtactactttccttatcaactttttagaaatgagtaaaccagaactcagagcagtgaaattatatgcccaagatctcacacagctagtaaatggtggagcctaggagttaaacccaggttggtttgactttaaaatctagctcttaattttgaccttactttcctctattcgctttctttcattcaaccagtatttatgagtacccactcaggaaagccctttcataaaggagctgctgacatagagctgggaaagtgatagcctctacctgcaagagctcacaggctggcggagacacacttgatagcaaagagcccctgtgtggtgtggtatgtgacacaatagaaagctgtacagatagacagctttttgggacacaaaagagggtaacatcactacttggtagagatgggaggtcttgttagaggttatctttgagcaggccatctttgagttaggctaaggacattgggaatggtgtttcaggcagaaaaaaaaatagcatgtatcaaggcaggaaggaatgaaaatatatgacagttcagagaatggtgagttgtacagggtgactgcatctcagagtttgtgacctgaaaacagagctgaagaggaacatgggggtatgattttttatttatttatttatttatttatttatttttaatttttttcgagatggagtctcactctgtggcccaggctggagtgcagtggctcagtcttggctcactgcaagctccgcctcctgggttcacgccattctcctacctcagcctcctgagtagctgggactacaggcgcccaccaccacgcctggctaatattttttgtatttttagtagagacggggtttcactgtgttagccaggatggtctcaatctcctgacctcgtgatccgcccgcctcagcctcccaaagtgctgggattacaggcatgagccaccacgcccggcctatgattttttgtttgtttgttttgagacagagtctcactctgtcgcctaggctggagtgtaatggctcaatctcggttcactgcgacctctgcctcacgggttcaagagattctcctgcctcagcctcctgggtagctgggattacaggcatgtgccaccatgtccggctaattttgtatttttagtagagacggggtttctccatgttggtcaggctggtctcaagctcctgacctcaggtgatccacctgcctcagtctcccaaagtgctgggattacaggcatgagctgccaccacgcctggctggagatgtgattataaaggacctgagtagtgtgaataagaagtttgaacatcatatactgtaagtattcaggagccataggtggcaggaagtggcatcacagattcttgcttcagaagaataacttgtttccatggagggtggattaaaatatagagagcatggtagtaggatgacttattagtaggcaggaaatgccaaggattagagtaaaggtgctgggtacagatttcacaccacagccaagcaagtgagaaatgcaacctgtgcagtgaagcctttaattgcgtagcatccttattcctcaaaacatgtcatgtaagagggaagagttttagatgtgtgtagcccagcttttgggccatttcttctacccctgccttaccattggtcatttcttttgtattcgagtaaagaaaagataaagggagcagataatgaagtattttctcagtttcccatggctgatttcctaaaactctcattttaattaactatcatctagtttccctggccctctctattcatctgcttaatgtgtgtacatcatcattcaacagatacttattggcacacctactgtgtacgaggcactggatgtgggtactgaagactcttgggaacaaataaccacactgcagtgggagggaatggggtcttgttgctatggccacagaagaaaagagctcaacatggccgagggccacaggaaatatcttgcatgtatgcagccccagagctcatgttgtggcccaaagtttctgcacgatgagcaaccttaacctgctgagatggtaaccccaacttgtttgggacagtaaaattgttttcttgctgggtgtcttcccttcccaatctaggaagatttagaattcaatataggatgatgaagtaaatcaaacccatacttttgtgttagtctgaggtataatttgtgtatttttgtcatttgaagtgttagtaatacttaaggggatctggcttaataataataatagctaacatttattgaattccaggcattatataaactctttacaaggattaactcttttaatccttataacaaccctatgaggtaaatactgttatcatcaccattttacatgtacgaaaattgaagcacagagaggctcaataatttgcccaaaggcacacatttagtctgtggtccaccctgctgaaacccaggcatactggtgccagaatccatattagaatgtctatcagattagtcttgcaatgaccattcaaaagttgtattgagtaatttcatatgtctgattttatttactttttgagaaaaggcctcaccctgttacccaggctggagtgcagtggtatgatcatggttcactgcagccttgatccccctgggctcaaggaatcttcccactttggccttccaagtagctgggactacaggcacatgccaccacatcctgctaattaaaaaaaaaaattttttttttttggtagagatagggtctcctatgttgtccaggctggtctcaaactcctgggctcaaatgattcttctgccttggcttcccaaactgctgggaatacaggtgtgagccaccatatctggcctacttctgattttaagtggaaagataagaattatatttaaagtgtatattatttaaggttcctaagcaatattggaatgcttaagcaatttgttacatttttcttcttggtgttcactgagctttttgaatctacacattgatatcgttctgtctttcaccaaatgtgaaaacattttggccatgatttcttgaaatatttcttcttctccattctttcctttcctctggaactctaattacacttacattagaccttttgttactgttctccaagtcatcgaggccctgttattatttttttaaatcccttcttttccctctgatcttcagattagaggatttctgttgttcagtattaaatttcattgactcttctgcaacttccaatatttttcttaagctcattcagtgtgtatttgtttcagttattattgcatttttccttttctagaatttccatttggttcttttttcctttttattcattacaagcgtatttttctttatagccttaatcatagttataataactgttttaaaattctcatctgcagctgggcatggtggctcatgcctgtaatcttagtacttctggaggccaaggagggacgattgcttgaggccaggagttcaagactagcctgggctacatagagagactccatccctaaaaacgaacaaacaaattggccagggaggtggcaggcacccattgtcctaacaactctgtaggctgaggtgggagtattctcaagctgaggagttcaaggctgcagtgaactcttaccactgcactccagtgtgggtgacagagcaagacctgtgcccaaaaagcaaacaaaaattcttatctgctatttctaacatttgggtcgtcatggttcagtctccattgatttttttcccttgaatatggttcacattttcctgctttggggaattttgaattgtactcaatattgtgagtaatatgtcataaagactcatatccatcatgttcctctgaagattattgtgtatgtttgtgtgtatatatgtttaagcaggcagtttactttgctgggctcaaaatcaaaactccatgttttcagtggtgtcagcagctgacatctctgtgcagttctttagctgtagctaggctgcttggcatcttgtcacagtttatagttcaagggtttccagatattcagtggagtttatgtgcagaatttaagctcttactttgcttctcttttctgggatttcccacttcactttccgggtgctgtggtcctcccaaattctatactcacccagcatgatggtgaagagggctgccctcaggcaaaaacccttaaaaaaatgagaagttcacctagtgtttgttcccttcttctaaatgtgcatgtgtcttcagtttctgcctgcttttggtcgccctgaaatggttgttgtttatagttggtccagagtttattgttgttactttgtgggaagattggtccgatgggaactagtgagccatttccagaagctgctagccttccatgtcgtgattcataagaatttttagttttcttgttaggttttctagcatcagataagtgctagggaaagttttcgttgctaggcatttgaaattcctatacaggaaaggaaatttgaatgtattaaacttataattgcagtttaaattggtgtaagggaattaatttaactaagttttaaatgggactggatatttaagggattttataatctgttcaaaattggatgccttaaacagtcaaagtcaattggctgttcactttaactagatttataaataggaaaatatttgtaaattgaacttaagaacttaaggagaaaccagttccctaaagttatttcttttataaattgaatattagtttaataatgttaatcacaaatcgtctttttattcacaaaagacacccttggggcagcaaaaaactccagtggtaataaggaacttgggctttagtggggcagacctgattaaccctgtgtctacagacaacgagagaagtgcaatgggataggcgagcacaagtgctgtgggaggatgaggggatggggattggagatgttcctggaggagatgacacctggcagacaaagtgagggaaagagcattcctggctgggtctaggaatggtgtggagtgtagcacctgtgaggatgtggaggcctgaaaaagcattgcccgcttaggaaacttacaagttcattttggctgagagaatgaccttgggggctgagctcgggagtttgacctgcatcctagaagctgaggaagcaccatcaagaaagagaaaagacaacccacagaatgagagaagttttacaactcatatatctgataaaggacttgtatctggaatatataaagagctataaagacagggctgggcatggtggttcacacgtgtaatcccagtgctttgggaggcagagacagggagatcacttgagaacaggagttcaggaccaacctgggtaacagtgggaccccacctctaaaaaaatatatttttaattagctgagtgtggtggtatatgcctctagtcccagctactgggggtggtgaggggctgaggcagaggaattgagcccagaagttcaaggttgcattgagttatgatcatacgactgcattccagcctaagccacagagtgtgacatttctctgtggccaataagcacatgaaatgatgctccatatcattagccatcaggaaaatgcaaattgaaaccacaatgagataattcgcactcactaaaatggagaaattggaatcctcatacactgctaatgcaaatataaagtggtgcattcacttgaaaagtgtagcagttcctaaaaaaggttcaacgtagagtttaaaaataaaaaaatataggccaggagctatgactcactcctgtaatcccagcactttgggaggccaaggtgggtggatcatctgagctcaggagtttgagactagccgggacaacaaggagaaacaccgtctctgcaaaaaatacaaaaattagccaggcgtgttctcacacatctgtagtcccagctacttgggaggctgaggtaggaggatcacgtgaagctgggaagtggaggttgcagtaagccaagatggcgccactgcactccagcctgggcaacagagtcagaccctttttcaaaaaaaaaattttttgccaggcatggtggcactcacctatggtcccagctacttaggaggctgaggcaggaagatcgcttgagtccaggagttgaaggctgcagtgagccgtaattgcaccactgcactccagcctgggtgacagagtgagaccccatcttgaaataaacaagaattaaaaaatgaagagaagtagtatgggtgtagttgcagaataaaggacagtctttaaactgaataaactcagctttataaaatacttttttaaaaaggcggagaaaagaagctgagggaacccattgaactataggaagaactatatttgcagagggaggggggcctttgggaacaaaaccacccacagtctccatcttggcggaggagccctgacacactcctgcactcctggagcacttgggtgggactaggggaggtgccactgactccaggagctgaggtttgggctgtgtagaggatgagtagggagatgcagaggcagagaggcctgtgttcaccatgggatgacacaggagaaaaggctggccagctctccctgtcttcccaactccctctaaagttggcgagaaaaagcccttaattgtattgcaatggttatggattcggaaatggtttttcccttgctgtgtgttctttttcctcagattggaaaggatcgggcactgaactttgacccctgctgcatcagctactttactaaaggcgagtacattttgctggggggttcagacaagcaagtatctcttttcaccaaggatggagtgcggcttgggactgttggggagcagaactcctgggtgtggacgtgtcaagcgaaaccggattccaactatgtggtaagaagagaaagtttgttctgtggggccatggcttgaagaggcactgagcagccgccgtgtctcgagtcacatcactggggtttgtgtctgacaaatgggggaatgcagactttctccagagagctgggaattgacagttctctcaccccgcaggtggtcggctgccaggacggcaccatttccttctaccagcttattttcagcacagtccatgggctttacaaggaccgctatgcctacagggatagcatgactgacgtcattgtgcagcacctgatcactgagcagaaaggtaagaggcaggtccagaccttgggaagagggacaggtggaagcaggtggaaagggctggtgacagggcacttgaaatgacaggaaaaggtttctctttggcgttttgcaaacctgttagccactgggtctgtgtcttgttttcttttttttttttttttggtgggggaagtagggatgccagtctccttgaggatctcatgaaagcaataaatcctctctgaaaaatgtaccaactcagaattttgcacataatttcaaggagtacatgaatttccttagtgagggaggatgatttatgacaggttggagccaggtggttgacctgcatgggtcttcgtggacctttatcctttctggtcagagtcactctggggtgcttctccctcagccctgtctccacttgcctcctggtgggtccttctgccagagatgagcagtggaattggattggcacaggctaggtcagaagatcagagttcccggcctcgcatagtcattctaagccctaagactgcagtctctccctctgtccacttaagttgctgtgctggttaaatagactcaatccacttacttcaggtgtattcatatctggatgtgctggccttagtgcactgctaggtgcctttgcaagggatccaggttgggggttgtcttgtagattcagatgagtgtcctttggtccccctgggggaccctatctttttgaagattctggctgtggtggttggggcaaagccccttgggcagcttcacagtgtcccccttagggacattttctccacctggtctgtagtgggagtgtagagcctggtgtgtaccagaaattacatgtcttccccgtttgtcaaggaggtgggcagggagcggccagaggtgaggtcagttacttaggcaggcttctgatcaccgggggccactagtgctgtgcagaggagtttatatttgtatccagcaagtgatggtaacagtgagtagtttatttccatactcagttgtcagccttggaccatgaagattgtgtcctataggactttggatcccagggttcagcagagttgattgtatgtattagatactctaaagatttttcaatgagagtatctcactttaattgccagtagcgctaagtaaatgatggcttttaatttctctgccttgcaccttacataacaacctcttgctagaactagatatttttttctttgacagttcggattaaatgcaaagagcttgtcaagaagattgccatctacagaaatcgattggctatccaactgccagagaaaatcctcatctatgagttgtattcagaggacttatcagacatgcattaccgggtaaaggagaagattatcaagaagtttgagtgcaacctcctggtggtgtgtgccaatcacatcatcctgtgccaggtgggcagcagcatgttgaaggagttgggctgaattccatttgtgctccccccccagtgatagggtgcccacctcatggttttaaaactggtcactagaaaacaagtctgttccatcaaactaagtggtgcttattggctttcattttcctggcatctggatgaaccagactctatcagcaagtcatgagccataaactggagaatgtttttttgttttattttattattttttaaaaaatatttttcttgagacagacagggtcttgctctgttgcccaggctggaatgcagtggcacaattatggctcactgcagctttgacctcccaagctcaagcggtcttcctcctgagtagctggcaccacaggcacatgccaccacacccaactaattttttatttttagtagagacgcgaggctgtactttgggaggctaaggcgggaggaatgcttgaacccaggagtttgagacctgtccagcttcctaaagtactgggattataggtgtgagccactgtgtctagccaagaataccttgttctattgcagaacatcttgtcatactgggattagatatactttaatgacttaaaacataaattggtgtacagaatgaagatagtttttattgataagcatatacacataaaatttgtatcaactcagtaattgtcaaggaagttttaattcctgaaagattttttttcatagaaaaatatttctcaagattcttagagagtgtctaagtcaatgccaagagaagtttggaaagactttgagagaaggctagcccagcatcttggaagtagaggtggatttagttttacatagttctgttggaggtgataaaagagaagaattccttaggaatcactgtagtgtaaaatactattaaaatctctcaaaagcctagaactgggctgggtgcagtggctcatgcctgtaaatcccagcactttgggaggccaaggcaggatgattgcttgaggctagtagttcgaaagcagtctagaaaacagagaccccatctccaccaaaaaaaaaaaaaaaaaaaaaaaattatttaattagctgggtgtggtggcgcttgcctgtagtcccagctacttgggaggctgaggcaggagaattgctttagccagaaattggaggcagcagtgagctatgatagcgccactacactccagcctgggtgacagagtgagactctgtctcaaaaacaaataataaataaataatcaaagttagaactccaagcggtttagggttgctacaaattacaggatagatgtggcaagtatgtgtacttttgagtgctgcctctggcctaggctgcctgggtgggggtttgcattgaagatctgaggctgaattgggctccgtggggaagccttgcatggagtcttggattaacgatgccaatcgtggggtctacattgggttagatagatggatactgaatgtgtaggtattttctccccttagggacagaaagatctccttggggaggtctgggggcacttattctgttgaatttccatgcagagctgggtttgcttcctaggagaaacggctgcagtgcctgtccttcagcggagtgaaggagcgggagtggcagatggagtctctcattcgttacatcaaggtgatcggtggccctcctggaagagaaggcctcttagtggggctgaagaatggacaggtgagtgctccctcacgtctcctgtcaggctgataatctgcatgcacacgtgggtgacccgtctagcaatgactctgagctgggttctcagggcaggaaaagggcttctctcctccatgggtgaattgtggggcagcctgagttcagttttttgaggacagcctcaggccaaaggtgctgtggccctcacactcctagcaggcccacgttttggcagagttgagctataacctttggctacatgtagagtgtattagtggcttaaggtctccagaaggtgggagatttgttagagatgttgcttctgtggatttctagagggaggcagagatcgttacctaggtcagctcctgattagggcagcgagtggattaaggcagtgcgttccagcatgtgtcctaaagaatgctgggtcctcaagatactgatagatgtcataagcaaaatgggccctttggccagttagatgtgggatatccaggttacacaaaattctgtgtgtgtgtatacatgtgtacacgtgtgttctttgctcagcataagaaaagttctaagtaggctgctacatggaactttgaaagtgacaatgtagctgcattagcctgacagccaagctgtgcagcagatggcttatggctgaggcttgtcaggtctttgctggggatggaagtcacagggcatgagagcagtgggtgaagtcaagcagcaatgccaaggggaggaagggccgcttatttctcaggcagctctcacttccaatgggagcatggactatggggtcaggtgggccggaggtcgtgttcttacttagctactcactggctttgtcatcctgggcaggtcactttacctctgtgaggctggttttacatgaggataataccacatatttcatagggctgtcaaaaacagatatcatcagggttgggagttaaagccaatgttaaaaacaaaacaaaacaaaaaaaacaccaggggtattaaaacaggcatggtggagggtacctgttttcccagctactcaggaggctgagataggaggatcactttgagcccaggagtttgaggctgcagtgtgatatgattatacctgtgaatagccactgcgatcagcctgggcaacatagcaagaccttatctctaaaaaaaattttttttaaaccagggatatcagtaaatgatagctatcatgatcactatcatcattattataattttctaccacatgtcttgtcagtgttcatagtagctttttcctgtgttagttcgtgactcagatctctgctaggtggcatctcctaaagctgcagtttgggtaatgtcatcaacaaatccccagtccgaacagacactgaagtgagctcggcctgtctcagggctgtcattacttctgcagcctctgatgaacctcgcttctggcctcctaaggataagccattgccccccacccccctctttcttttgatgagtccttttccctgcacagagcttctggtgaaggtggtgggagttgttcttgcagagcacatgggattccaacggcctggcagtgggccaggatcttgttgccatggtgactgacactgttttcgctgaaattttgccagatcctgaagatcttcgtggacaatctctttgctatcgtcctgctgaagcaggccacagctgtgcgctgcttggacatgagtgcctcccgtaagaagctggccgtggtagatgaaaatgacacttgcctggtgtatgacatcgacaccaaggagctgctttttcaggtgaagtccctgagggggcccagggacatcatcctttgattagagactctcctctagcttcccagtccctgcaggaggctctcctgctctggcccaggcaggtctctgggaggggcaggggccaagcacatgcacagagtcccagaggccctgggccacaacctgctcctcccacacaggcacaagccgcagggcctggaccggcctctttaactttggtttccttgccaatggaaaccgaaggctctgagccagcagagcctttcttaagcgtttaccatgaacaagaaatggggcaatgactctgagaggggtgtgacgttggcactcagtgaatggggcgatggatgcacttcctttgcagaagtctgtgtctcacctgctgcaggcctgcctgtgtctatgcgcacctacagcgtgggaaggaaacaggatgttttgtcatctgaaagggggaaggggatgggcaagcctggccttctacttaattcacaagaatgctagaagagccagcagaatgcgaagtgcttggatctttggggttgtaggcgttgttcagtggagtcatccagccctgtggcctgaggaagtgtgtcaccagagaagacagcccggcagctctgtgccccgggcctggttggctttctgctgggctcgcgccattctttctctctttaggtctttgtaggtggtcaggactggttttccagagtgaagttccccccaaagctggagcccctcctgactggtttcctcggccactgcagggtttcctgatgttatgggcagattcagtccccttaccaggctcctccttgttctcagcagcagaatcgatgggggaggggtctggagtggggagcagcctcagtcaattagaaggagttacctggccacctctagcccagaggtaactccatgtcagtctcaactcactcatgtccttgagagagtagaatggtttcggggaaagagagggcatagccttcaagctgacctgggcttgggtcctgcctgcatcccttactgtgtgatcttaagttagtgagcctctctgagccttaattacttttctctaaaatgaaattagtaattgccccttacagaattgctacaggaatacactagatactacagtgcctagctcagtgttgagcacaaaatggggcctgaaatgttacttcccttctccccagcctcacctcccacctatagggggcatagctggccccaaatgtgaatcttgtgtctgagcctagaatcatacaagtgtggaagggcgtctgtgctgccccatccccactgctggctctatggcaggctaggggaggtgattctcagccctgccaggagacatcagcattcccagctgtaacattgcctgctggcttttcctcttctccactgcccctccctctacacataaaacagctatattgattttttctcattataaaaaacaatccatgctgattataaaagatttagtcattataaaagatcctaggcagaaaggtatgagcatatttcaggagaataattttttttcaaaagtaatacttgcttactcaaaaattccaacaacacgcaggtgcatggaggggcttgcctctgttcatttctcttgcctctgttcatttctttgtggtcccctttcatccttttccctccatcccactgtaagcaatttagtgggattcagtctttaagagggtattgggctgaaatgtgtgagcgctgaccaagcccagggtggttctcacaggatccccactgtccctgttccccaggaaccaaacgccaacagtgtagcttggaacacccagtgtgaggacatgctctgcttctcgggaggaggctacctcaacatcaaagccagcaccttccctgtgcaccggcagaagctgcagggctttgtggtcggctacaatggctccaagatcttctgcctccatgtcttctccatttctgccgtggaggtgccgcaggtaactgggggtgcctgtccactcttagcactggcaaggctgacaagaccagggaagctgggccctttgctggtgctttggggagagagtagcaaggagagaagaatggcagctgtgaggtcgtgggaggcagtctgggcctggaacctgccgccctgtctccactccttgcaacctgtgtgactgggggcaaacagctcaacctccctgagtatcagtttcttccttgtcccctttctgtagggatgggaggggtatgcagtgttgtcagcagcgtgtgttttgcagagagcccagcgtggggccgaatggagtgagcagcaaagccgggagtccggcagggtgtgtgtgtgagtacgtgtgtgatggtggtgatgtgtgtgtgagagagaggggagagagagaatgagtgggtggggggtgtgggctgaggtctgtgagccaataagggagcatgggactctgcacaagctctctgaaccaggaggtggccagaacagaaatggggcactgaagggtggagccacagaatgggggagggcagaaccacagacaggcgcctgagattgacctcccgaatgcaggatggtctcccctccaccttctgcaccccaggcagatggtgctcactgtagaattgccataaaacagagacgtgcatagcgagaaactgtagccttcagcatcccatcctcaggacagaatcactcttaaacatgttgaaatacatctgcttagcgcttttctacgtgtatatataatatatgcataatatacaattaggagcatgtggttttataagaacatttttaaacaaaagtggaatcacactgcaaatacttttcatgacttttatgtgtatacgtattgctacctatagatggaacctcagatttactgtattccctgagcctggcctgtaaacaagacttctcatcccttcctttatggctatcttctcatttcacctcacattcggttatggcagccccatcactgtctatgaagtgctggctgtacactagtcatctggccttttcactcaacaatctcctaaagcatcgttctgtgtcagtaaatggtaaatgttcttattctgcatggcaaaatttagggtaattgtagactcacataaattgtaggaaataatacagagatcccttaaaccctttgcctagtttcccccaacggtaacagtgtgcatagctctagagtgatcttcccacccatgttggcatgtgtaatctcccaccacagtcatggcactgaacactgccaccaccacaaggtccctggtgttgtgctttttacagccagcacccctccctcctgcctggtccccacctgccttgtatttacagctgcattttattgtgtcttgtggatgttccacagctttctttaccagtcctactggacatgtttgctgcttatagcttttttgtattattgtaaatagcaggcatctttctagctaggtccttgcacctgtcccaacttggcgccttggcataaattcctagaaatgaaattgctgggtcaaagcacgtgtacctttgaaagacttttagggaaatttccaggtttcccttccgctaggctctgtcagtctgttttccccatacaactcagcttcaggctagagcccacttcttctaagttgatgataccctcgaaactcatgactgcaagacttactggggaaatgcccatcatccatgcctgacacagatcagctattcaagaaatgttagtggaattcagatctgaggaaaaagaccagaaagcaagaggaagaagggaatgaggtgggtggaagtggcagcaggacgaggggcacgaacagcttctcctggactgtgtcctcgtcatccttgtctgccccattacaaacccacgcaccacatccaccaggaactcatctccctcaattgccccaaactagctctgcttattttattaaaaggttttctcccaagattgccatcctgacctcaaaaataaatgcagtttgctgctctctgactgtggccggccaagaggagccagaggggcagcctggggcttcctctgccaggactttaagattcagcagcaaagtcttgctgactgcaccaaggccatcctgctgacgcagcgggtcaggactgccaagggttaggaaacacattctcaagacaaaggctgttcatctgtcgcctctgcctccggccatcctgtggttttggcccagagaggagggagaaagcatcagacccagtcttggaatttttggttgcctttcgaaatttacattgtcttgtgcaagaactggtttgtcagggctgccaagtaggacaacgagccctaggagggcttctcaaggcggtggtgacttcatgtttgaaatccaacagcaagataaagtatagctcagagagtatttgttcagtggggtctatttttaaaactccactcaaattgtgcctcccaagtaagtccaagtgttagccatccatcatatgctcagctgtgatatgcctgcctgagtgcctgtcccactcacggggcagtcagcatggcaagcagttggtgtggttcggggaaggagcaccagctttcagtcctgactctgccatctcaagcagctgtaactagagcaactcatttcactctttggggcctcatttcttttctgtgaaatggggttaattatacccatctttcaggtttcgtcaagccaaatttctattattatttctccttattactgactcataaaatagcaaaaaccacaaaacacaactaaattgcaacaggctgtacttactgacggactttagaaaggaaagctcattgtgtgctttaagaaaagctttcaggagtttgagaaagcttccaggagatggtgaaacttgatctgagccctgagaggtctggaaaggaagagtggagcagggaagcttttcaaacaaagggaaaggtgggggtaggaacaagactggagagcctgggagatggtgaggagctggtgctgagaaaatacagtgaaggtaatgatcatgcctgcattttgcccagtgcttcattatttttggagcacatctctcctttgcccatggtagcctgagctgggcaggacatctaaacagaagttaatggatttacccaaaaagtcaccagcctaggatgtggctgagcctggcctgggttctaggtcacctgctccgtagcctatgcctgctgccccgctaaagggagcatttaatgtgccaatgaggagagatggcatggtggaaaagataagcacttggaagcagccatgttttgctctgagagtagacagactcaaaataaaaaaaattccttcaattctaaagctaaaaaatgggactggaaatttcaaagacagacaaaagccccaaatggagaaaacaatacttcaagctccacatttgggaaccattagcacagaggtcctggctgatttctcttccctgcccaggaagccaggagagatgcaggccactgaagcacactggctggcctaaaacaagggcaaggcctttccttgttaaagatgtcatggcccaactcaagactcattctcaggcctgcacgcacatatgcacatatacacgcgtgcatacatgtggcaggaaggggcacagaacctggagtccagtcacctctggctattgccagctatttgctgggacaggtcatttgtcctctctgagtctcggtctcctgggctgtagccagggagaaataatacctactgcacaggactgtggggacagccaaaagccttttataaacctaagaaagagaagtcgttaggaactattcatgggcactcacagcaaggcaaccccatcttgtaggagggcatctgtccccagggcagggatcaggagagctgtttccagaggcttccagggtaacttggagcaaatcacttacctttcttggactcagtccctggaagaagaggccattccagaccgcttcctcccacgaactcattcattgtgtcagcaaacgtagactggggttctgctgagggaggccgatacaacccaccactgcccacggctgtgcacggctttgctgtgggaacaggcctgtaactgcggcacaacctgcgatctggacaaagggcagaggaagctgagactctttcccctggggtgggggcttgaggggcttgggaggactctgcagaagaggtgacatttcaacagggccttgaaagccaaataggtattttccagaggcagagtggggaggggcaaaggcattccaggtgagggtgacatcctatggcgaggcaggcctgtaggtgggaaggaggggaggatgggcagagagtttgtgctgtggagcacagtagcccagtcatgagagaggtgcaggatggagcacacagggtgggctgggcaggctgggcagggtgctgattggcggctgcagggctgctccccaggcatgggtaatcatcccacgcatctggaggcaggctctgtatgcatctggttctttccatggctctgaaaacagtcttctttttttcccttgatgaaatcctgcagtccgctcccatgtaccagtacctggataggaaactgttcaaggaagcctaccagattgcttgcttgggtgtcacagacactgattggcgtgaactggccatggaagcgctagaaggtttagattttgaaacagcaaagaaggtaagcatctagccagcaggagctggagtttggtccttgtggggtcccttaagaaggcagatggggacccaggtggcacggagaggccatagactgcagcagtctctggagttaggctgacctgggcttgtatcttagccacttcctcactgtgggcctgggtaggtgacaccctttctaagattgcttctctatagacgtaggatgatgacaggccccatcctcacaaagctgtgaggatcaaatgggaggatgcctgtaaagcctgacccaggagcagcatgtcagattctggctgtcactcttattagctgttctctgtgggaagcacctgactagtagcctggcacatcacaggcactccgtaaatggcggcttttattatcggtgtagtcactggccatgatgctgcacacaatgctgcttttcttagcatctgccaactaaggtgggagagatggtcaaggtctctgattctgacagcaatgtgggcacttcccacgtaccttcatggcgggattcatggacttgattcgttgtgtcctttcctggcctagtctatgaaagctagagagatggctgaaaacatctgacccctctctgcacataaggaaaagcccaggtatgttcctgagctgtgtttccatctagaacctcagatggaggaaggaatggcttccaacctccactcccctaccccttccctctttatctccccacagtcaattaatgagctgctcattttgtccatattcccgggctgacattgaaggagtggcaaagagggacgtgatgcccgccttgggttagatcaagacttgtaggcatgaagagaggagactggaccagaccaggactaagaagcctggctgagaacgagctgtgtcacataaggggctctgggacctcaggccagccactttccttggagccccagtcctcccagttctgaaatgggggtggtgagaatgcccgctgcagtcatgaggcttaactgagatgttgtaaaggggaatttaaatcagggatggttgtgcagatgctagccattactaaacaagggaagtgatcgttgtgtaacaatgatctagattatatttttagatgtcctcagtgtaggaaagtggagatggaggaggctgtaagaattcagaggaggggccaggcgcggtggctcacgcctgtaaatcctagcactttgggaggccgaggtgtgcggatcacaaggtcaggagatcgagaccatcctggctaacacggtgaaaccccgtctctactaaaaatacaaaaaattagccgggcatggtggcaggcgcctgtagtcccagctactccggaggctgaggcaggagaatggcgtgaacctgggaggcggagcgtgcagtgagccgagatggtgccactgcactccagcctgggccatagagcaagactctgacttaaaaaaaaaaaaaaaaaagaattcagaggagggaggaggcatctctatggagggagcttccctctcctgccccacccagaaatgccagcagggagggagacgacaaatccctagaatagaaaggattgtaaaaagccacaaggtttaatatgagtgtttactgatatttttataaatatatatatttttatatatttgtttaaatattgagacggggactcactgtgttgcccaggcaggtcttgaactcctgggctcaagcagtcttcttgcctcagcctcccaaagtgctgggattacaggtataaaccaccacacccagccagatttactatagttgaaaagtaagtgtatgtggtatatatctattgtgtacaacatgctgttttgaaaaagccacatgatattgaagataggctggatgttactatttcatctaaatcccgagtaccccacctctttactctgtgccaggcactcaggctcaccagcttggatatagtggttcctagagatggacagccatccccactagatggcagagaagagctgctgagctcccgccagaccctgagcagagctgcaggttcctccctattcccaggcttccctctgctgagctcattcaggggccttgtgactctgaccaggcaccctgacgctgcaaaatgtgtcaggttgaaggaactcggaaacagatttattaatgggcaaatcctagacactagcacagctgagctacagctagaaagacccttgagagggtgtcagtagcaggcccctttccacaaagaagatggttggagcccagaagcagagaagtaggctcagagcgaggactcagacctcgaatgctcctttccctcttggccactgtgctgggctttgcagggttgccctctcaaggcgctttaaggaaacccagatctagagggtgatgtgtaagacctacagcttgggacacaggtagtcttagccctgtgttccttggcccatgtgatgcccgcattgcccttttctacgaattcctcttcacaaacacttgtttgccaggttctgactctgatgcctcccttaacgctgcctcccacccctgctcatgctcagaccattcatccgtgttctccaggcatgtggttcgtagttggagagctcttagctctgggaggtgtcatgatctgtttaattgaccagctttccctgttagaatgtggacctctgaattgtggagggggacaggggccgagacatgtttctccctgggtcctcagtctcttgacaggaagcctggtcctgtgggatgaaaagataaagttgcattgtggtcacctgcaaggcaggccggggacttgctcatctcccgaggtcttttcaggagggaggatgccatgctgctgagcagaggctgcaagtggtcaggattgctctgcgtgttcagttcaaagggctctggagctgctgcctcctctaggcacaggtcagcccattttgaatggggcaataaatggtgacagcaaagccacctgaaagcagcctgacctggtggcttgtgctcctccaaaccctgggcagaatctgaaagcagcaaaactagcttagctaacaccagtctgcttgttcctcagaaacttctagaggtccatgagttaaagtctctggctttactgtgagttcaaggcaagggctgcaattttagggtttacataaagagtttgccttccacagacttggtgggattcattccctacccctccaccttcttccagaatctgtctttataccctctcagctttcccctcctctgctccctctgtggtaccaggggctctgggtcccctgtgtctgtggcaccactgggtaggcatagctgtcccctgcattctacccatgttgccaagatgtataggcagtctctcatcagtccatgcatctcatcctctcctgctgtgatgctgcgtgaccccccagagggtcagaccggcttgttcttctttgggtctagagtctcccaaggaggcaccgccacagactgtggcatcacggttttgttttacctgatctcaaaatgactgatgcaactgggatgtctttgctgttctttacatggtccaatcccatggataaagccatgcctcgctgggtggtataacctcctgcacgcacgatgattaatctgtgcttgctcccttcctctcctctgtggctcactgtctagatagagcttgacttcccacccctagccaatcacccacttttgaagccaagaagacagcttattttattctttatttcttcgccacaggccttcatcagagtacaagacctccgatatttagagctcatcagcagcattgaggtaaaagatgaagcatttttccttctcaagaaggcatacttggggttcctgttttaggggcagcccttctaacaggcaagagccttgaggacatgggaacagagctcactggcgtctgggcatctgggccacagccttgctccgggggcagagtggccacactgggggagacaacagcaggtagtgtgagctgttgtgtgatagctgggtgaggcacatgggttccggatctctccagggttgggtttctagtctgtgaaaagggattggacctacctcacaggctgctgtgaggattcagtaggttctcaggaactggtttgcatcctcctggtggcggatagctggtcaccatcctctcagactccagtaatctgatagtgttggaggagtttcccaaatgcacatgagctgagctccattccccagaaatggacctggggagcaaggcccacagtctgaactgagcgccccagagttctggagcaacccctagccctactgtttctggctgagaatattgaccttgtcatccaaacccaataggcctgcagtgtgctaaggaagctggttgtaggtatgccatttgctgggtggtggtcaacactatgctttttttttcttttttttttttttttttctgaaacaaggtctcactctgttccccaggctcaagcgcagtggcacgatcacagcttactgcagcatagacctcccaggctcaaatgatcctcccacctagcctcccaagtagctgggaccacatgcatgtgccaccccgcctgattaattttttgtatattttttagagcagggttttcccatgttgcccaggctggtttcaaattcgtgggctcaagctattagcccaccttagcctcccaaagtgctagcattatagacttgagctaccatgcccggcccttagacactattcttaatttctgtgtatctcagtgctgtctggctgtctgttaaaaggcatatacattttttctcctgaacatatttattgtgaaggtatgggaatgtgagatacatttgaattcccagttggaaacagtgaggaaatagcaaatgtcttgtccctctcattcatttccccataataaacacctgtcatgggccagcccttgtgccgagctcagtgggcacagagctgaggaggagagaggctgacaggagctcacagcctgctaagcctcataacgtaatctgctctgtgccacatgcgtgatttatgtgaatgctgttctagatcctcacattaactgaatgaggcaggtactgttgctctccctattccatgcaggaggaaattaaggctcagcaagacgatgccacatccccatgggtccatagccaaaaacttggtggaattcaagcccagtctatttcctaagctcatgctctctcggccacataccctccctacccgcgtgttgtaaggggcatctgtatattctggggtttacctacccgcgtggtaaagggcttgttcggagctattgctcaaaatgcccagtgctgctgactttcacttgtaaatccactggcctggatctgggggtcttcacctgaagccaaggagcataattttcctctctacaaaagtaactgctgtggggtccaactattacttgtcacatcttactggggtcaaaatgtagtcctctcctcgtatgctatgagctgggaagtgcgttaaagtaaactcctaagattgtctcttgaaaaaaagtaaagtgcctttgagtgtgctctatatcgactgcctgcagacttatttgcacacatctgggtgctcagcataattccagagaactgcagatccttagtgggtgccttttggataggggagatgttcttgtcctgctgacggggggaaagaacctgcccatgttgacatgcacctgctgagtgccatagatcgtttttattggtcatggtgatatcctggggcctagaatggatatggcctgaatttcatgtctagtaaaaccttttttgtttgtttgtttgttttttttttgcagagatagagtctggctatattgaccaggctggcctacaactcctgggctcaagtgatcctcctcttttgacctcccaaagtgtagggatcacaggtgtaagccaccatgtccagccaaaatcaatcttttatctcacggcaagatttcaattcatttccaactattaggagttagtttgtttgatgagcctgagctgtgtgcaggtttttagaatgataatttctgtcagtatggaagcatgttgcctccagctgttaaaactttcaccagcttgtctaagagtttgattcaatgtcttatcgtcctccaatatgctgctctttctagaaaacaagcaaaaggaaactgctagggctcagggtttgggtgctactgagtgtttacaaatactcgagctgtagacaagcgaatgttccctgacacagaaggaagaagctttatcctagctgtgctaagtgtgtgtgtgtgtgtgtgtgtgttgttggggacatcacttgcttcaaaagactacattgtgtgatacaaggaatatctggagtcagacagaactgcgtccaaattccagctctgtctgaccctgacctgttcctcttcttgagtctcagcgtccttcactctaacacttgggtagtgagacctaccctgagggtcactgagaggaataaaggggccatgtgtgtataaagtatatacccagaacctagtggatgttcagcatgcgggatttcttaccttctctttagaagtagggatatcgtaagacttgtcatcctattttattggtctccctcttgggcagaaaccctaaacattctcctgctctgtcatccccatgagccacaactctgccaaacggggcctgcggatttgggagatcttgggagcttaggggtcatggatgagtcagagcacacactattcaaactattccgtcatagccttggaatacacaggaaagcaaccctgaggaatttccattaaacaaacaaaggtttgcatctttttttgatctttgcttgtctggtaaaagcctgcttttgttgtcaagccttcccagcgggaacctaggggagagagacaacagccaggagccaagcccaggttccagtaggaaggcccaggggcctcacttgaaatagccacatctaacctttgtaaaggctgcttcctgcccatggctgcagaggccatttcctttgcttctaatttttccaggagaggaagaagcggggagagaccaacaatgacctgtttctggcagatgtgttttcctaccaggggaagttccatgaggccgccaaactgtacaagaggagtgggcacgagaacctcgcgcttgaaatgtacaccgacctctgcatgtttgagtatgccaaggtaacctaccctgtcccaggcccaagctccagcttggagcccactggtattctcacgtgcggtgtccaagttattttccccaagagtgctgcggacaaaaactagcaatggtctcagaaaggatgtggggaaactggtaaacaaaggacccatctacagccactggttgaaactcacctaaaactgacctttaaggctgacaccaagggggcagactatggcagttcagaccttcatcagtgacagggctggatggctgtgggtctacaccagcacaatcccttcattgagttgagggctcagggcttcagggctgtcccccacaaatcctctcaatccttgtcaggagccgccaagaatcggtgtcttcaggcaggagccggtcctgccgatcatgcaggacgacatggtgcctgccagccaagtttcccatagcacctgctgattgtcctggacttctcactgggcttctgggaagtcaggcagagcctccgccctcccatgttagcgcagcatgcctcacgcctgccggctgcagagtggctaccatgtggttgcagtgggtgatggcagagattcccttttgcattgggacggcccccatgaaccttactccccagcagagctgggccttttaaggcaggtgtaggagaggagcttcctggaccaggctcctgatggcttctgtgggaaggagttgcactaaggagcccagagcagtcaagacatttgcagttcagtctaagcaaggttcaaagaggcttcggtacactgggcaatgagggtcttccttccatcaaggggctttgttaacctgccttttctggaagtgtcaaaagtggctctcagtatgttatgaagtgactcatcagccataacctattggtgggctactaatggtagttctccagctcacaagttcaagatggaaaatcttccccacttttttctgcttttctattcctgaagatggctgtgctcttccaccacctgttcgaccctggggctgaaggtgtgtttggtggcctgtgatgttgcccaggacctattgttcatcaggacttggacgagctcctgggccccagcctgtcttttcaccttagtgatttcttcactccgtacctgagacccagggtgttcaggctccctctactttttcctcgtcacctttcctaccctccctcaggccccaccaaagacacctagaagatttcataacacattcatactgagatcaccagagtcagtgcatctctgcttccggggataacaaaattttaactcaggatgaacccttaagggatcaagaccctagaggtagaatttagggttgggaacccctgaggcctcctcaaggaggcagctgtgctgcagtagaaaatgcctgaccaggctgggcatggtggctcaaacctgtaatactagcactttgggaggctgaagtgggtggattgcttgagctcaggaggtcgagaccagcctgggcaatatggtgaaaccctctctctaccaaaaatgcaaaaaattagctggtgcctgtagtcccagctactgggaggctaaggtggaaagattgcttgagccccagaggtggaagttgcagtgagccaagatcacgccactgcattccagcctgggtgacagagcaagacccatgtcaaaaaaaaataataaaatgcctggccttggtgccccagagctggtgtgagtgcagtttctttctgtgggatgacctggggaaaggctcttcggtttgccaaacctcccttcccttctcagatggtaatagcgacagctcagtttagtcatgagatttgcacagaataatgtataggaaagcgcattagaaatgccaacctgtagaaagattaggaagatgagaggggccacacgtgaccacagagtggattttcatacctctctccctggctggccccactcctgcccctgctctgaggcccctccttacactgtggtggacttcgtgtgcccacagcctcccaccagaactgcagcccatttacacactccatttgctccgtctctctatgaaggtaaatactctgggacttgtttttggttttagtttttgatcactattccaaggaggttggttccttttcaatcccccctgcccccacctggtagtctgaatttgagaaatatgtacctacacattatgtggggggtgggggagatctagtcctgattaacgtggcatatttttgtttacttgaaaattgcttcccaagattcaatctggttttcagaaaattttaaaattacattcccacgtacaaataaattgtatgctttctggataagtgacatgtttatatggtgataaagggaattataatgctcttaactcttatgtagtatgttcttatcaaaatcaccaagcatgagaacactgtttagtctcattcatcactcagcacagcctctttctgtccacttcagggccaagtctttgccatggccccagataatgtgtaacttagcttcaggaaagcaaaaagcctttgaatttccagtttgctgagccttgaaggaagcttttagacccagcttcaatgaagtcacagctccctgagtgaccagctggcctaggcttatggctccctctcagcctctcacccttgccgtggtcacccctggtcccctgagcactcactgaagtccctttgaaggacatttctagtctcctaagatgcctgttttcctccagctgccaccctcatttcaccagccaggtaggcagggtttccagcttcgtgctggcatagagaatccgcgccatagcagctgccagaaggaaaggtgtgtctgtaaaggcccaaactaggcggggacagcggctgctttccaagccccttccctttgtcagctccagggagaaccaaaggccagccagggggcctgtcttctattgggtcccagcatcagggtatacaatgcgctttcctccccttcttaaaatgtatcatatattaggccgacctaatactctgaaagcacatttaccctgaaagcaaatgagggaaaaaagcgagctaattgttcaagtggatttttagcatacattgactgtacttttctgacacatgagtgttaatcatggggaaaggagtgctttttttgttctcagtgaggctgacacaaagtactctccacagggtacattattcctgagacaaaccacttcttaccagtaacatagacctgggctgtaagtgctcccagtttccctttttgaaaagctccacctttaaaagctgcctcaattctggcaaactcccacgtgtgtattttgggtaactactctgaaaagaggtggtgttctgaggctgtttctcacacattgtagggccagcccagagaagctgggcataccacttcagaggtatgctgaggccgaaggaacacaggccctaggcctgatctctgagcctccaggaccacagccatctcttccttctcaggtcctctcctgagcaccttccctgcctcagattcccccatggcctcctgctgtcccactgtcggatcaggttctcacccctgcagacctgacctcagcacaggatccctaaccattcagctgagaagcaactaaccagagagatgtttgcttgttatctgttccaggaaagtaactggggcaaagacaatgtgatgattctctagttcagggcacagaatgtttgctggtgactcagagagggcatggagggcacggagggccggcaaacactgtaagtcattttgtttgtgtaagtttaggggaacccatgctcagcctcactctgaagcatgtggtatcacccatatgatctgaataagatgacaggtctcgatatgtggaattgtgcaccaggttgtctcattgctgtttaggaacagtcctgtattgaccaaactatgtgagagagagacagcctgatcatgaacccccgaccctgcagacttcatgtgcagtgccccaaatagtctagaaagtgttgtttagccgatgaacaaatgcccatttgtgagacgggaaggaagcactgggggccagcgtccctgatgctgtcccaggatcccccaggaacacctgcagggcagcctgagatcactcttcccgagacctgggactcccccaactcagcccctcagggccgggccctgcctacctcctggttgcctgcttcagccatgtggagcccgcccttgctgctagaaaagcctgatgtaacgctggcacaggaagttctgatccagagtgtttttgtttgttgtgcttcctcaggatttccttggatctggagaccccaaagaaacaaagatgctaatcaccaaacaggctgactgggccagaaatatcaaggagcccaaagccgccgtggagatgtacatctcagcaggagagcacgtcaaggccatcgagatctgtggtgaccatggctgggttgacatgtaggttttggtccctgccccgagaagcatttggcagcatgtcatcacatgtcacctcttgactgacaagggaaccaatagtgcttttctaattatctaaagctaatgtgatagtggctaggttcttcaggagacacagagattgcacaaggcagtggctgccttccaggagcttgtggagtcactaggggaagggatggtggggaccagggaagaggagacaccgggacatcacagctgccatttgctgagcgctcactacaacccagacgctgtgataaccttccaggcattaggttttccacctatgccatcagggctggtgtctcctcgcccaccttgcagatgatgaaacagaagctaaagggacaagttattcccaaagtccagatagctggaaagttgtagagctgagctttagcctctgatctgctggatgtcgatgccaactacgcgtgtaatggtaggaacaaaaacaaaacaagttccaaatccatcagggaagaattcttatgggaggaaccatggatatcttctcttaggagacactctttccatgaagggaccttaaagaattccaagaggtaaatagagatggcgggaaaggatatgcaggcaggaagtacagcagaaacacagcgagttggctctggttggaataaaagacgtgtgggaatgggagggtgaaggacatgggctgtgggttgggggaagtgggctggccacactggaagggcctccgatgccaaacggaggtgcttagatttgccaatagtgagtgaccacctacagtcagacaccccctcaggcaggcaggtagaatggagaccagataactggctagtgcagtagagcaggagggaacttggtagctgagggcatgagagagaagtagcagtgttagaaccaagtggcccatcccagggtgttggggcagtggtgagtgtcaggctggctttgctctgtggctgctggtgggttacaccattcgtcaaggtggacaacagggagaggagggggttggggtggggcagcactgagacaggatggattcagccttgggactcagcacaccggaccttgagggggaaggctttgtcctcccagtcagtgagcttcaggctcaagcatgtgcacacacacgtgcacatgctgctgcggtaggcaaaggacacgatgggacaagctcctgagggtggctcaggctgggtcctaaaggctgttgattcttctggaaacaacgttgtggtctacaggtagcagtggcccagccaggatttggggatatggaagaggctggttaatgattaaattgtttccttgggtgctgccatatattaataattggtgtgtgggcccctcacaaagggaccttgatggatgtcctaccaccccatctttttcttgtccgatagtaatttttttaaagacagaggcacagattttgttccccacattattctttaaatgaaggggttcatatagaagagagccaggcagatttagggtgctctgttctctcttctggtttttcttgtcactttcatttgtaagtgctatagtatcaggttaccctgagggtacttgagtaattcaagaaacacattaagcatgttctgcttgctttccagatgtggctataaaaggtgtctttcctccagggacgttgggtgtgatgggtgggaaggtttctaaggctgtaagggctgtctatgccacctttccctaaaaacgtgtcctttttctgctgagcagtgttatttttagatgccattattattctaagtgtagactgacaggcctccgtgccttgcctgtctccagacagggattcgttacagctgcttctccttcctttctcaccaagactagcctgggtagaaccctttctcctgggagagttagtttgactccaaattccagcctgaccagagagaacaagcgcattctatccaggcctcatgtccccatgagtgatgggagggctgctcaccatggggaagcagtggtgagccagtgggtccctgcagctcctccctctttggtcagcacgttggccaggaggacagggaagacttcctgcaggcctttgtccagagctcagagcaggccccacactcacctcttcctttagagggcagtcattgaggtattcttatgccttggcatccacttttccgtgagaattcctgcacccgtggtggaaagagtgctgggcccagtcttgggctgggtgcttcaccttccccacagactttattcttctcatctgagagatggaaataatcatgcccacctcttagggtggtgaagattctgatttcacgcatgggaaagctcatggcgtcatctgggtacctggtaggggattaggagataattgtttctataccctgctggatagctcagtgacttccgagaaagacacacaaggtggctgacaggatcctgtaaaggccacctctcccagatcctggtgatgtttctggagtgtgtattcatgcatttaataactacccactgagcaactcccatgggccatggcatagtatcaacactggggaccacagaatgaatggacatacggcttgccgttgacaagacccagagcccaccctcctacctgccccttccctctccaggttgatcgacatcgcccgcaaactggacaaggctgagcgcgagcccctgctgctgtgcgctacctacctcaagaagctggacagccctggctatgctgctgagacctacctgaagatgggtgacctcaagtccctggtgcagctgcacgtggagacccagcgctgggatgaggtgaggggaaagcaggcctcatgggctggggccccacctgagccctgggacacaggcgggtgggtacaggggccctttggggttcagatggagagaagctgccctcgtgatggaaggaacattgggctggcagtcaggtaacttaacctcgaattctctgagccacagaatcgtggagggcctttccacttgtcccttcattcagtcattgagaaaatcgttactgacagccagctctgccagggtggtgacaggcaccggggatgttagtgtgaacacgacagctccagtgcctgctgttgggctgagctgcctctgaccagcaccacaggctcagacacatggctgatgtggagatgcacctgcgtgacatttaaaacctgctgggtagcattttggcagaaagcaccatctgtgctttccagatccagactgtgagagccatttcaggggccagttttttccctcccttctctgcccccaccccacaaccactacttctctctggtgtcaggggctgtaaagaattagccaggtcagcgagaaaggtggccagcctcaggctggcagaagcagctgatgctgccccttctatggctcaacccccaccctccagctcactggctccctgttccctgcagagaaatccatccccgagaggattaggagctgtgccaagatcctcccccgactcacccacccacccatcatggtccattttagagtgaaagcaaagccttcactgagaggagccgtctgactgttgtctgctctctgaacagctccattggtgaggtgatgaggtcagtcatgagaaaaggtggggctagggacagaggcaatggtggcttctcaagagaaatttattagatttcccaagcagcatagattagagcatcttagaatgactcagacctcgctgtgcatcaggcagactttctcaccatggctcatgtccggttctcctggcctgacaggtggttctggggcttaggtgagaagcagtcagtgggtccatacagcacgaagcccacagtcatctttgacaactgataagaagtggtgatgatgataatgtcaattctgtttccttaggtgtcgcccgcaattaaaagaaatctgtttgcagcactacaggagcccacgcaaaccctcaaaataaaatgtttccgattctgtgccgcttctgtggtccagaaacagactgtgttgttactgaatccagtcgcttgcatattgctgttaattgccttttgttttcgaagagctgatttgtttttgcatttctgtgggtagttttttgggggaggcactctccccctctgagttgtcaggctggcaaaatatgatgtccctaatggattcagccaagtacagtgttttcatgggggctgcaggggcagctttattaagacttcatttgctccttcccccaggcctttgctttgggtgagaagcatcctgagtttaaggatgacatctacatgccgtatgctcagtggctagcagagaacgatcgctttgaggaagcccagaaaggtaggcaacacagactgtcaccttctagaaggagcaggagaagttactgccaagacatacatttcaggaaggctaccaagcccttcccatctgtagatcccaagatagatgacttcatcctggggatgtgattgtttggtggtgaaagactgtggagcatggaaagaccattggccttggagtcacaccctcctgggccacactcacttgccacaggcccttaagaggtgctgcctcctctccaagcctctgtggttactgagcaaagtgctgtgcactgcagtgtatcttcccgtttaatcctcgcaacagccctatggtatagctaccatcattatgattcccattttgcagatgagaaaactgaagggtaaagaggtgaagaaatttgcctgaagtttcatagctaggaagtggcagggaggtaatgtgagccagggtaccatgaggacaataagggaggattgccacacagtgtgaggcatggtctctactgagaatagaaactcagcttctatttctggctcagataaacgggtgacttctgctcctcaagaattctgttggtaaaatgggctgcacacagcgtacaacagcatctgaaataggagttaaagcaagtatagaactttcgctgatgttattaatcatattttttaaagttgacttccctctctgtgtcaggccctggctgagcacttaacctatgtaaccttgaatcttgccaacagctgtgcaaggacgaagaggctaaatgtgccatgccaagtcacaaatctagtcagcagcagagccagaattggaccagtacctctctgactggggaacctgatttttctgttttgctgcctatttagccttctaatggaagttgggtgtttgatgttccatagcatctgatttacgcttctatatggtaaccgttgccctctctggacacattgcagaacaaatgtctccctgttggagcccctcaaccgaaagccctcattgaaggttagcgcattctctgctgcttcagcatttccagagcacccagttgctgaagtatctgcatgtttgggcaaaacacatcaacctatccatctgtctgtgtctgcccttccaagaatccatcaccatagtaacttggtactcagacaagaggttgtagatgagaacggaacaaaggccagaccttctccttctctgaaggcggaggattaggatcatttgagtgctctcatatggcaagtgtcatggctacaagtgcttcactggcagccaccaacatctcaaggggctggccacgtagtaggtactcagaaaatatctgttaaacagtataggaacgattgagagtttttttgcttgttttcacaaatggttgtgataactgaggcagatccttcaaagtggtcattgaaaagcagtcatttgaagacaaactgaggacttgagttgggcttggttctgggaccttgggtgtgacactttacctccattttgcaaagcccatttcattgctcataaaaagggggataattttccttcttcataagtctgtggtgaggatccagtgaggtgattagcaacaaaagcattttacctccaagtgcagtaaagtggcaggtcctgtttctatcaccttaggagtcacaaaactttgccctggaatgagcagggggcagaacctcactgaagatgagcaagtttcactcttagactttgccctggaatttggcccctccagtttttcctttctgcatgcttttcaaagtcagtcgccttttcccagccaaaaaggaatttatctcactgtactttttccaggatgtagccttggttatttagagaagcgccatcccagcaacgaagcactgcagatgctccaatgagtgtcctacttccaaagcagccctgtgcaagccccacagagctccatcctgcctcctgtgtgacttcctaaatagcatgtgcttttttcctccctccaccactcctacagcgttccacaaggctgggcgacagagagaagcggtccaggtgctggagcagctcacaaacaatgccgtggcggagagcaggtttaatgatgctgcctattattactggatgctgtccatgcagtgcctcgatatagctcaaggtgtgtaaacatcagccagaccactgttttcccaagccccactctgacaccaagataaacatcagaagagctgggacattttaattaaagccctgggcttgtttattgggtgtattgtccataagcctgccttgcagtggcgtaatctggtgtatcatctttttccagtttgcccatcagaatggtatgaggaccgtcctggggttatggttggcaggtccagccctgcattgctaattcagagcatatctctcccctgctacctgggagcccatagctggacctgggtgagcactgggttttaaatttttttaattaaatgagaagatgaacgagagatggctttacagtaacacactccagattcttactcatcccagccaggaaaacagtttcaatattgctttctttcacaagacttcccatgatgtactgaaggagtagtggaagtggaagagacaaggagatgttcttctccactggacaaggccacatgcaggggtgggaaaaacactggcatggaagctgcaggtgacttgtagcaagtcacaatccttcctgagctctgcatgcccatctgtcctgtgggagtcccttgtcctggtccctttggttgctgggagcctcacagagtcatgcttacagtttgaaaattgtcaagcctaggtgtaaggtcgcatttttctgtttgggccagtgccttatgcttctgataggagcagcagagggaagaggcataagatgagcatgaatacagttggtgtctgcctgcctttgtcccagcaggctcttccgacacatcttgggtcttgctgcagctgtcgctcccccaggggaataatctgggagggtgcagtgagagatctggaaaaaatatcctcaaactccctggccttatgccctgtccacctaagaattcaccatcctggagtggccctactcctaagcagagtggctttcccctcactacactttgtccctcaccctggcacagacactgtgtggtgggagaactgatgctgggaaaagtactgttgcctggcccctcctcctggggccagttggcagccacagacactgtttgacacgtttcccctcccacccgctgcacacagcagatcctgcccagaaggacacaatgcttggcaagttctaccacttccagcgtttggcagagctgtaccatggttaccatgccatccatcgccacacggtaaggtggctgggtcaccagcacctgagggtaccatctcctgagctaggggtcccgggcatatctaaagagcagcagactggatggaatgtaacccactggtcacagtgaactgctgaggaatcttggtctcctctgggaagaaaaagtttgagtttctttgattgactgtttgtctgccatgcatcaagcagtgggctcctgaattgtgatccagagctggaatgggccttgctagttcctcagtgcaggctttgatgactcagggaaactctgcattaaccagcaagaggggtgggagttccatgaggccctctccttcagtagggcgaaggcccagattaaccaaaggctcgagatccctccctggccctgtcagtgatttgtgtgttcttcagcaattcactttccctctctgtccctcagtttccttctctgtgaaactagagtgttggcttggtctccagaaacccaagtagttctttttagtcactccctgattcctttgagaaagccattttaaatctctctggtggcaatggggaacaggtgatgggttgtcaacagcctcttcatccactgtatctcctcaatcacccaacagatgttgagcacttagtacctagtaggcaatgtactgagggcttcattgtatcaagtcatttcctcctttcaaccacactttgagggaaggactgtcacccccatgttacagatgagaatgaagccctagacagagaggtctcagaggttattaggttggtgcaaaagtaattgcggtttcagactgaattttaaatcattataactaggctcaaacacatctttattaattaaaataggaaccattatgatcaacacatttttgccaatgagaaataagtctgtttatttctgtagcataaaaatccatactttgggatttgacgaactcttggaaagcattttctgcatcctgctggttgtggaagcattttccctgcaaaaagttgttgagatggttgaagaagtggtagttggttagcaagaggtcaggtgaatattgcgatgaggcaaaattttgaagtattggttgtgtgatgtgcagtcaggtgggtggagaagaattgggccctttctgtgaaccagtgccagctgcaggtgttgcagttttcggtgcatctcctcgatttgctgagcatacttctcaaatgtaatcatttcaccaggatcagacaactgtagtggatcagaccagcagcagaccaccaaacagtgatcatgacctttttttggtgcaagtttggctttgggaactgctttggagctttttctcagtccagccgtggagctggtcatcacggttgtcatgtaaagtccactttttgtcacacctcacatctgattgagaaatgttttgttgttgttgcatagaataagaaaagacaacacttcaaaacgactatattttcattttctatcagctcatgaggcacccacttatcaagctttttcaccttcccaatttgcttcaaatgccaaacaaccgtagaatggttgacattgagttcttcggcaacttctcctgtagttgtgagaggatcagcttcgatgattgctctcggttgttgtcaacttccagtggccggccactatgctcctcatcttcaagcctctcatctcctttgcaaaacttcttgaaccaccactgcactgtatgtttgttagcagttcctgggccaaatgcgttgtcgatgttacgagttgtctctgttgctttatgacccattttgaactcaaataagaaaactgcttgaatttgttttttgtctaacatcatttgcatagtctaaaataaacagtaagtaataactcattagcaaaaaaacataaagcgagaaatgcccgttgaaatgatgtataacataaccacatttaagaatgtattctactatcaaacagcaaattccagagccaatatgtgagtctcagtagtctggcactggagcctgtgttcctagcctttccctccctgtctccttttagagaaagcaggctagtatgttggtttagtgggtaaactcgagagtcctcacacacaaatgacactgtgttacttatcttctctggccttcagcttctttctctataaaatagggataacagcactatgtacttgatgggattgttttgaggattagacgagttaatattggaagagtacctagcacagagtgaccctaggtggcagctatccttactgctgctccaggcaaggcttcacgccagctttccctgacctgctccctccagctgggcatctagcatttctcttttttcagagatgaggtctctgtcgcccaaggtggagtgcagtgtcatgatcatagctcatggcagcctcaaactgctggactcaagtgatcctcctgcctgagcctcccagagcactgggattacaggcatgagccaccacgcccagccttcccgccgttctttgacctctcaaatgccctgccttccaccttgggcatttctttccctctaatctgtgctgacttctcagcacattttttgcctcttgggaaagtctggcaagaaggactcctgacaggctctgtgcatgccgtcagtctagtgttacatctcttcccacagcagggtcagtggtctcaagggacctcatcttcccttacagtctttggctttcctgaaacgagaccccctcagggtccctcatctttatcaggtgctcacctggagagaaaccaccacaaaaggagcccagactcaacttaggctggaagtcagggcccagctcagcctcactttgcccaagccactccagagcctggctctcagctccttccctcagacttttctctcgctgctccctgtcctcttcctcacctggggcatggggctgagggctcctgtctctaacagctgagctctgctccaggacctacatgggactaggagctaaggggcctcagaccagctggggccctggctcttatcccagctgaatcttattaattgggccattccttcattcaataaatgcctactacgtgacagaccctgtgatgagacctggtgacacggtggtgaacaaaacgttgtccctgcagtcagtcccagtctagcaaacaggacaatccctcaggggaaacgtttagaggcctgtgaagagacttcctggaggaggtgtcctctcagccagaaggagggagagaataaaaatggggcaagtgaagtggaggaggattaggaagggtgtttgtggcaaaggtcacagcctgtgcaaaggcctggaggtgagtggtagtttgtggttcagcatccagggcccagcagagcagcactgattcagggcaagactggaaagggaagttcaggtccttcctggatacatggcatctttcccagaggaaaggactcccctgctacctattctctctgggacgttacttagcttccctacctagtgcagtagaaccacaggcagagttcatcttgttcttaccctggaaaggatgtggtctcaggttttcttgggttcttggagctaacaaaaggtatagaaatttacgtgtgaactaaatagaaaatgctaagctctgaactgaagaagtgtagagcaaagtgagtcctcaggagttcagaccaattaggggttaagctttggtggctcagtgatgagtagggcctcacaagacccttcttaagtgctcacaagaaagaggagttactggcctgctgtaatcctcaccatctaaagctttattagaaatgggcaatctcagtttatatacagtgtgccagatgccttcaaaataaggtattcttaaccttttgtagaccctcacacagaaaattccttatttgtctgctgagcttctggcagcctctaggtacgaagaccaatcactaatctgtgctaactgcctcctgttagtgcctatgccaggagccagggaaatgggtcagcagttgaggaactccgcatgtgtgctcgtttggtggcacatcagtcaagctgctgttggaaagcacagaagaggcatgtgggttcatgctggagagggctaaatgcctctgttgaaagacaggcttatatgaatcagtggttatgtcctaagctgcatagaaggtcttctcttttagagctaattggagacaacttgagtagttcagagaaatggaataattaccaactccagaggcagtacagcttggaagaaagacattcttgggctttggaatcagacctgggtttgaacagcagctcagctctgttctagttggtgacttgggcaaatcatctatctaggtgtcggtttcctcatcagtactgtgaggataaaaatgcataccacaaggttattatgttaaagaccagatgagacagtggctatatggcgctcagcacacagtaggagtaggtgctcaataatcagagccgctcttgttgatgtcactcagaattattggtgtctgccttttggcctggcccagcagcagctcttgaagaactcaatccctgtttgcttttctctcactgcaggaagatccgttcagtgtccatcgtcctgaaactcttttcaacatctccaggttcctgctgcacagcctgcccaaggacaccccctcgggcatctctaaagtgtatcctttctcttatccctcctccgtcccaccaccgttcttgtctaatggccccaagaaattccttccagagcactttcctggcagaaccttcctctctcagcaaccctcagggaagacagagaactcaccctcccgctgctgtttggctatagaggctcagcagggaggcccaggggcccaggccaagagaagatgagttttcagggctctctgagctgaacccagcagtgggtctctggccaacacactgtcccaatccctcctagaacccacagatgagggtgtgactgaaatggaagaagcaccaggccttcaggcttggaaccttgggcacttctccagactggggaggagggagtgtttgttcagcccaggtatacatagcaccttctgtgccccaagccctgggccaggcaccaggtggcaaagctgccatcaaagagggaggtcacaagttagggtctggtttggtggatgtgtgctgtgtctgagggtggaatgaagctgaggtcagggccatggtcagggaagtttacctggaggaggagatgtccatcatgcaagctgaggcagccagggaagatggccaagtggatgttccaggggaggacccagcatatggagaggcaagcaaggcatgtgggagagggtgaggggaccctgggtgggaggggccggagaggcagcaggacccaaggcctgagagcctacctttgggttttcctctcttctgtagccatcgagggccacagtggtaccataagcagagcaggtgcctgaagggcctgtgcagccagatactggatcattaccaggcaatgatccagatttttaaggtcttggatgtcaggagacataattgtccctgttcttttctaaatctcactgtactctcagctccttcccagccgcagccccaccttccctctgtaaggaaaacccactccactggagaagacccagagctccttgttgtaagaattggcctcgctagaggattccaggcccattatgtacatttcaggggaaataccctcaaatcaaggggtgccttcctggagtcagacctctgctgcatgcgtctccgtctttccccgtaggagcagtcagggctatgcctgtgggggctgagcacctgtactcatcctttccagcaagttctgtttgagtcaacagcttgatagaacctctaccctgagccttaccctgtgccatcccctggggacctggaaatggctcctgacagtccctgactttgaggagtcatgctggagacacagaaggaaactctccacagaactgctgaagtggacggggctgcactgcagacggcgggagcaggaacactgggagagatgcgggaggaagggcaggagggcctgggggcagccaacatcggaggtgacctgagaggagagcacaaaggctcgtcagcctctggctgaggagcttcaagggggccccagagcacaggctgccgctcagaaactgcccaccaggccctcggggaagggtgtgcagacagagtggggtacacccaggggcctcagagcagggttgagggtggctccccagggagtctggaccaggccccacctggcagggtgagagcagagtgccctttgtgccaggcatcctaggagggcctggctggcaggtttggtgaggcaggaagagccattttggcctagtcagggtataagatgagccatcagcaggcccagagatgctaagcaaggttaaagtattaatggaaactacgctgtttttatctttggaaaaattcctgggccttgccatccgagaagtacactcacctctcacaagcgcacagagccttcctcacggtctttcctctgccttcccggcaccagcacaagctgtgttccagcctggggctcactccaaggacaggcagtgccagctcctgggcctggtgttgcccctgctgtccttaaccctgttcacggcaggaaaatactcttcaccttggccaagcagagcaaggccctcggtgcctacaggctggcccggcacgcctatgacaagctgcgtggcctgtacatccctgccagattccaaaagtccattgagctgggtaccctgaccatccgcgccaagcccttccacgacagtgaggtgaggatgcagcacccttgggcaggtggcttctcctctcccttgaggccatctcatgccttcttgcctggcctgggttccgtttgaagagagacagctgcagctccctctaggctctgtgccccctgctcaagcctggccatgccagctcccctgtgcttccctgtccacctcctgttctccccgcagtccacctggcgcccgctcacagcccccggccccggcctcagccctcagcctggcctcccttgctccttgccctcccctaggcaagccccacacctctgtgcccaggtggctctgcctttaccccaggcctggccccagagctgactcttactctagaaacctctgccctttctggaaccaggctgtagttctccagcaaatctaccccacactcccaacccacattccttcaacccagccagcttccttctttcacacatcctccctcaagctcagagcaaggacttggttcagacagacctgggttcacatcccggctccaccctctcctagctctgtctccatctttctgcaccttgggttccccctttcccacaggtagttgtgaggctaaatgagccagtatagtccacgtgctccgcacggtgcccggagcatggtaaatggctggctaatggtggcagcggccactgtcattcctgccaggggaaaagtgccgttgagcgctgcctgtgcaggtgtcttgggcacggggacccaagtgacagggcttgggtatttcggcaggcctttatcctgcttccccatggcatggagctcctgggcccggcgccccttccctgcctgcccacccgggtggcctttcctcttggcagccaggccccaggggcctgaagccagagtccagggggaggaggacacgtgcctgccccggcccctcgggagtccgtggctgttttgtaggagttggtgcccttgtgctaccgctgctccaccaacaacccgctgctcaacaacctgggcaacgtctgcatcaactgccgccagcccttcatcttctccgcctcttcctacggtgagtccctgcatcctgagcatgtgggtgggacagcctgtggacagccaggctcactccactgctctctggcctcaggacgttgggcaagggccaaaggcctctgaatgtccctgtttatgaaatgaggacactctgacgcccacctacctgacacaaggagtcactgtcggtgttcccagagataggacccactgctgcccaaagctgaagcacccactctgggaacctggcgcagggctttacataaccaaatgccccagaaagagagtccgatggctttgcattcagaccaggaggctgagataggttatcaaggcccagctcctttgatgttgacagaggatcagaagccccttcccaggagctgagcagaggccacacacacacacagacacacacgcacacacagactgcccctgcacacacacacatacagaaactgcccctgcacacacacacacagactgtccctgaacacacacacagactgctcctgcacacacacacacagactgcccctgcacacacagagactgcccctgcacacacacacagagaccgcccctgcacacacacacacagaaaccgcccctgcacacacacggagactgcctctgcacacacacacagactgcccctgcgtgcacacacagactgcccctacacacacacagattgctcctgcacacacacacacacacacacagagactgcccctgcacacacacagagactgcccctgcacacacacacagagactgcccctgcacacacacacagagactgctcctgcacacacatacagagactgcccctgcacacacacacagactgcccctgcccacacacacagagaccgcccctgcacacacacatggagactgcccctgcacacacacatggagactgcccctgcgtgcacacacagagactgcccctgcacacacacagattgctcctgcacacacacacacacagagagactgcccctgcacacacacagagactgcccctgcacacacacacacacacggagactgcccctacacacacacacagaaactgcccctgcacacacacagattgctcctgcacacacacacacacacacacacacacacacagagagactgcccctgcacacacacacacagactgcccctgcacacagacacacagagaccgctcctgcacacacacagagactgcccctgcacacacacacagagactgcccctgcacacacacacacacagaggctgcccctgcacacacacagaccgctcctgcacacagacacacagagaccgctcctgcacacacacggagactgcccctgcacacacacagagactgcccctacacacacacacacagactgcccctgcacacacacacacacagaaactgcccctgcacacacacagattgctcctgcacacacacacacacacacacagactgcccctgcacacacacacagagactgcccctgcacacagacacacagagaccgctcctgcacacacacatggagactgcccctgcacacacacggagactgcctctgcacacacacagagactgcccctacacacacacacagactgcccctgcacacacacacacacagaaactgcccctgcacacacacacattgctcctgcacacacacacacacacacacacacacacacacagagactgctcctgcacacacatacagagactgcccctgctgcctcttcttgcttttggtgaagctgccagtgggttgagaagcaactctgtggtcaccccacctgcctggcggcaagtcctttgcaaggcctccagccccctcagccctttctctatgccctccagacgtgctacacctggttgagttctacctggaggaagggatcactgatgaagaagccatctccctcatcgacctggaggtgctgagacccaagcgggatgacagacagctagagattgcaaacaacagtatccatgcccttggccagagcctgtgtgtgcggctgtgtgaggggtctggggacaggcgggaagtaggagggcccagtcccaggggatcgcgggccatgctgagcctggccctgtgttcccagagagattggagaggcccacatgggacagggacagggatcagagatgggcagacagctggccagggcctaaggacccagaagtggcaagtggcaccttggtcttcccgtgtgggtctcccaccctcccctgacccctaaaaggcactggctgtgcctctgtctgtgcatagctcctgcatagccaacatgggacatgatgtcatgatgtcggtgttggcccccagctcttccactcaagtcactttcgcatgcaagtgacagagtccaaaactgacaagctgaacaagcaaagggtgtgcaaggaagccccaagcaggagaggaagcttcctggcccagcgctcagtctggtcggtcacaggctggctctgcctctcttggccgcactgtcctctgggcaacttcattctttggcagccccgtggtgcccccataacacagagatgtcaggagcagtgccagccccacatcccctcagccttatagcccccagaaacagccagctttcctctcagctgtggcagtgaaagccccggggcacagctcagcctgccccttggccaggaggatgcaccagggcagttgtccagggcaggccacacttgcaggctggacatgggaggggcttctggcagggaacagcacacacgtggcctgaggcctcgctcccttgcactgactgagtctgcaggcctgggggctgtaagcctgccttccttgcagctcccaggtgctgccacccccaggggccacactgggaggagggaagctcagagagctgcttgctgaaggaaagacggacccatctctgccacccaggctccctcaggtgccacagatgatatgtgctatggtgctggcaggtgggtgctgtgcccactccaacttggtaccagcagtccccatgtcctgggcctccctgcaggacccctgctggcctctgttaccagccccaccactgtgggagaggggcggtttccagggacctccaggtgagtctgacccgccctggggtcagcagggactctcgcccctgtctgctccatcacaagtgcccgcagacccccagcagccactgaatgtttctccaggatccctgggcccatcccctccgtgcctacccgcagtggctcacagggcccgcatgtgcttcccactggccctgggagctatggtgtgtgtggcctgcgaggggaatgggtgagggcagcagggccagcagagtcccttccttctgattccttggcctgagccccctctgttcctccacctggaaaactcttccactggtctggctgcccttgagtcttctcacaggggtgtagggtggaggctagggtctgtctccatctctgcttctgattccatccttgaccagatccctccaggctcccagattctgcggctagtggagaccaaggactccatcggagatgaggacccgttcacagctaagctgagctttgaggtgagggtgcctctctgggtgacctgcaggagggcagcctccatcccttctcctgtgcacatggggaccctcagctagcgcagtggtggaggaggattggccagaacttccagatgtggtggcacgaaggaggggcaggaccccttcctgtggggtgtgggagccatggctgcccccgagggaccatggccaagggcgcaggtctgtggacagggaggcagcttcagctctggtgggaggagcttgccactgttagggtcacctgggtttaggaagcaggtcctctctcaccactgccaaagattccaggatcataatccacacagatgtctcactgtggctgagtgaggacactgtgcctccttcccgcccaccctgcagcaaggtggctcagagttcgtgccagtggtggtgagccggctggtgctgcgctccatgagccgccgggatgtcctcatcaagcgatggcccccacccctgaggtggcaatacttccgctcactgctgcctgacgcctccattaccatgtgcccctcctgcttccaggtaggtggccaccctggtagctcacatgtgcttctcttggccacttttcccttgcccaaatgtccctctgggaggcgtggcccctgggaggaggggcacatccatggctccaagttgggacagaggcttgtctgtcctctcccctgcttgcattccatgtgcatctaaagtggacttcactggcccctgcgctgtccacatcctccccaaatcctgggggcccagcaagcgtgatgtgcccttgaccttcactcagaaaacaagaaaccccacagccccctcccatctccccttccagccctcaaacaaaggtgctgcaggtctgtgtccagccctgaccactgccaagccccctccccttgagaggcagtgcgtcctggccccaggcgtagggctgatgagcactagggcttcagcctggtcttacagctgtcttcccttagatgttccattctgaggactatgagttgctggtgcttcagcatggctgctgcccctactgccgcaggtgcaaggatgaccctggcccatgaccagcatcctggggacggcctgcaccctctgcccgccttggggtctgctgggctgtgaaggagaataaagagttaaactgtcagaa

SEQ ID NO: 15625 - DNA, 80086 bp, Homo sapiens
ggcgaccgttagtgaggcggttgctgagacagacgctgaggcgggtaggaggagcccgagccgtaagggaagccgtgatgagggccgtgttgacgtggagagataaagccgagcactggtgaggagcggggcggttcgcgaagagcaggaggtcgagtcctcgcggggagtgcgcgagccgctgcagcgtgtttgaggggggcagcgggcttgctgcctgggccgagggcactgaaccccggcctgggagactgcagggtcgccctcccgccccttggcggttggagaaactcccgagggttggagagcggcaaagggaggtgccgcgcctgaggtggtggcgggtggaggcggctcttccctcacggtctggccctgtcgctgccttggattcatctcacacccacgagacagcacgaagctgctcaagcttcacagttcttgccacatccacatagtacccatactcttgttttcttgacgtttttctctaaattgtctcatttattttaattatgatttcacattttacaaggaaactttattactccatttatgaaaaccagtgtcacttgctctaaatgttaagataaaatcagcgtcgcttgctctaagtgtaaaagtaaaacttaaagtagggagaaacaaaactgaacaagctgtagctagctattgttgctagggagcctttaaacctgagatctcgtttctctaaaactggagatgggcaggtatgatcagaaaggtgctcaaaatgagcaccaaacacaagctctcctaattgggaagtctgaaaaagaactgaaggggaatgactttgtcaccttttgattcagttatttaatgtcctattccattgttatcgcctaaatctataacatagcagtctgttttgtcatattcttacttatgggataggtcttggcctgactttgaaaatcattcagcattgttgtgaagcctctgttctggccactggagcaggttacttgtctttggttctgtcccttctgagatctttctctgtgtaaagcatgccgtctctcctcatctcacacggaaatcctgaacatccttcaaggctcacgttggagacgggtcctctcttttgtgttcggcactagtggtagctgacactatgtgccaggtgctggctaagcacttcatatcctttatctcgttgtgtcttcaccactctctaaggtaggtactataatttcctctattttatgtatgaggaaactgaagcccagagagggtggataatttgccagcgtcacacagtgaggggtggaaccagctttcaagctcaggtcttcctcactccaacgtcaacgctctcagccactacattaatttttccttatgttacagacgtggcaaactcaaatgtctgcaggagacaggcaggtaacataaatgggagatgtttatttgcatcttcaacactaggaattgtatgttttccctaggaatagtcttgtattctgtaccccatttttcttgaaacacagccgtatcagtgaatctttcatttgtacttttaatagagatttgagttttaaaaaatcattttacttttaactttattataaacgtacctatagcacaagctgatgatagctggcaactgaacatttggcttcaatgtcagagtaatagagtgtggcaaactgcagagctcatgctcggcctaaaaggggcagctgctgctcagctcctgccaattaccaccatgcaggaatttggcctagtgtgctcagctcttcctgtttttaccagaagctaggaatctgggtttttatgtgaaatggcctaatttttaaatgttagcatccactctgaaaaaaaaacaaaacaccgtgtgggccaaataaaacatttgctggccgaatgcagcctgatttgctctgttttcaacccctggcacagaattttgttcatttctctcttgtggtacttccagagtctgttgagcataagagttaattttttaaatctgtttaattcagaagtctaataaacccgttaaaggcaatggctatgtcttactcgtttccaaattattctagagacaggtcagtggttgttgttactatggatagtaataaaatactagatatatataaaacgaaatactgtgggtagatgtattcatacgtgaatgaatgatgaataaagattggttttctggtttttggcccattacagatttgagacaacctattaggataagggatgtaggggttctatagaccatcaatcctgatggctgctagatataccagctgatagcccagaatgaaaacaaaacaaaaaactaaacaaaaaaaaaaaagacagtagaactaaaaaaatcctagatgtcaaagattagtcctccacatccaaatcagccattgtctcccggtctgctcctttgcttctattttaaccttcacatagcagcaggaactctgtttttttaagacctgctgctgtgatcctgttactctacttctcataaacctagagtgattcccaattactttccatgtcaagtcgtgcattttgctagagggtcctcctgaccctcctccccatcaggcttgcaacatttaaatttatacttttaggttgagctgaaaactctatttttctacccgaagatccttcccaaatgctcccttattctatgaactccctagttttctcctttaaatgcacagctccaggttcatctcaaccaggatgtcttattaggctagcccactgtattccaatcaggctagcatctgctgtaactctccattcatgccagctagtatttactgagtacttgctataggccacatgtccacatgtctttataggtgttatcatgtttaatctctacaacatgtgaggttggaattttcatctcatttaaagatgaagaaattgagatttaatgaggtgacataagttacctaagattacaaaatgagtaagtggggctgggtcagatgatgcaggaattggagaggcactgtgggacattggtttacagtgaggtgggtgcagggttgtcagaggacaatttgcaggattcctctgtatctctgcaatggaatctgacagtgtgtcttctgacagtgtatctcttttataaaaagaggcaggtggagagagaaccatcctacagtagaatagactgcctgcaaatgagtgagctcccagccctggagtgttcaagcaggggctagatggccatctataaggaattcttgccctgatgggccagatggactgcatgacaaggtctagagtcctttccaattctgagtttctggtgatttcataattatatttattacatgtctaggacagtgccatgcactgtgggtccacaaatatgtagaacatggccattgctttcaaattgtgtatgactataattaaaggggcaaggcaagataatatctaacacaatgtaaagaagactgtataagtcagagctaaactgaaatgtacagattctaagtacattaagagtttagattggggcaaatcagacatatatgatatattttaggaaggcaaatttcaagatattcagagaaaatgaatttttatatctaagaggaagaatgttcaggcttggctcaaatgagacattcagaaatgattttgtgataattcaacccaaaatgacccttatgaagaagaggtcacacaggaatcactttgatgagctcatatgtgtacaaggcagaaaggaagccacataccaaggatgactttagatgagaggtgcagacactgctccaacatctaataatccaccatagcaatccacaagtgtcaggcgctttggatagactggcttgtgcaccccgtgagtaggaggctacctctctatccttgttttgtaggtgagaatgaaagctcagataggagatcagcttttctggccccacgtcccccctactttttattccgccatgctgcttctcaaaatgtgaaatgtgccaaggctcagaggaagaaagcgtaagaaacaaggaaggcccaggtctgttaccacataatggtgaggaagctgaaaaactcagggcttcagtttgcccagctggaaagagtgtgataatcatccttgttccagcttctttatcagccagctctgtgactaggagcaaacaacttgcctctctgtactttagtttcctcattggtaaaatcggggcagtggtgcctgtcctgtctactacattatgttttcgtaaggatcaaataagataatgtaagtttacactcttttttttttttgagacagagtctcgctctgttgccaggctggagtgcagtggcgcaatctcggctcactgcaagctccgcctcccaggttcaagccattctcctgcctcagcctcccgagtaggtgggactacaggtgtgcaccaccacgcccagctaatttctgtatttttagtagagatacagtttcaccatgttggccaggatggtctccatctcttgacctcgtgatctgcctgcctcggcctcccaaaatgctaagattataggcgtgagccaccatgtctggccaagtttacactctttaacaattcttaaatattgaataactgtgaagagtttttattaaaggaagcgtcaggtcaacagagccatattaaaagctttctgaattcttcatgtaatgccttaagtaggtaataatacctttttttgacatatgccaacaatgataatggcagccacatagcataatggttaaaacatgggcttcaggccagattgcctgggtttgaggccggatgcagtggctcacacttaaaatcccagcactttgggaggctgaggcagatggatcacttgaggtcaggagttcgagaccagcctggccaacatggtaaaaccctgtctttaccaaaaatacaaaaatgacctgggtgtggtggcaggcacctgtcatcccagctactcaggaggctaaggcaggagaatcgattgaaactgggaggcagaggttgctgtgagccaagatcctgctactgcactccagcctgggtgacagagcaagactccacctcaaaaaaaacaaaaacaaaaacaaaaaaacagattgccttggtttgaatcctggctccatttccattcagtagcactttattttcaggcaagttatttaacttctctgtaccatagttttctcatctgtgaaacaggtatacagttgttttgaggttaacatgagttaatacatgtaaagcatttaagctgtacctggcatacacaataataaatgtgttcaataaatgttagtcactgttattaaagtatgaaggataacagatttgacatacttggcagtaattcaagggagcagaaggcagcatagcgcgttaattacaagcacagactctagagtcagacctgagttgaaatcctggcccttgcacttgctagttgtgtgacatcaggcaaactacttgacctctctgagccatggtatcctcatctacaaaacagagtaataattcctacctcacagaattattgtggagatgaaataaaataatgcattttaagagctcagcaggtgctgtctggaataagagttcgaagtactgtcattgagagtgtacttccaagttactgacaaaagcttgatttttagattactggtataaaccaaaaataaaattcagaggccccccaaccatctgaatggatttccttctcaaccagggctcttttaaaatttaacctgagagactgtttcaggccatgatgggaaatgggggtcaaacatgcctcagtatacctctctggcattaacatcaacacagactttaagtatgataagaaacattttacaaactctcctctctaaagcctagtacctcaaggcttcctctgcaaacagtaacttgggttgccacaatcctttatcttaacccaggcattcctttctgttgaacctaggttttttgttttttttttttctgagacagagtctcactctgtcgcccaggctggagtgtagtggcgcgatctcagctcactgcaagctccaccttccgggttcacgccattctcctgcctcatcctcccgtgtagctgggactataggtgcccgccatcatgcttggctaattttttgtagagacggggtttcaccgtgttagccaggatggtctcagtctcctgacctcatgatccacccacctcggcctcccaaagtgctgggattacaggcatgagccaccgcgcccggccgaccctaggtccttagataagctcaaccaattgtcagaaaaattttaaatcaacctataagctagaagccccctgcttcaagttgttccatctttctggaccaaaccaatgcatttcttaaatgtatttgattgaagtctcatgtttcactaaaatgtgtcaaaccgagctgcaccctgaccaccttgggcacatgttctcaggaccacctgagggctgtgtcatgggctgtggtcactcatatttggctcagaataaatctcttcagatattttacagagtttgattttttgttgacactggcaagtttatcccatgctaaacttttactatgggttgggttttgtttttttgttgttgttgtttgttttttgtgtgttttgttttgagtaacttcagtagtaaccttaacaatagtctgttttgacaggtttttgacacattcttactatagtcacctgaaccaatgaaatcctctgcctggggcatttgaaaaatctttgtaatatggctctagcccatttttctagcctcatttctccatgttctagcaacatcttgcacatagccagatgtttcagtcaaattaaattattttgattacttgtgttggcaagaagagtcaaactgcaaaatattttaagagatttattctgagcctaatatgagtgaccacagccagtgacacagccctcaggaggtccacagaacatgtgcccacggtggttggggtgcagtttggggaggcatgagacatcaatcagatacatttaagaaatacattggtttgatccagaaaggcaggacaactcaaagtgagggcttccaggctataggtaaatttaaacattttctggctgacaattggctgagtttgtttaaagacctgggatcaacagaaaggaatgtctgggttaagataaaggattgtggagacccatgttcttatttgcagaggaagccttcgggtactaggcttcagaaagaataggttgtaaaatgtttcttctcaccctgcaaaacagagtcttgctgtcacccaggctggagtgcagtggtgcaatctcggctcactgcaacctctgtctcccgggttcaagcaattctcctgcctcagcctccctagtagctgggattacaggcgcccgccaccacacctggctaatttttgtatttttagttgagacagggtttcaccatgttggtcaggctggcctcaaactcctgacctcgtgatccgcccgcctcggcctcccaaaacgctgggattacaggcatgagcaccgcacccagcctaaaatgtttatcatacttaaagtctgtgttgatattaatgccggagaggtacaatgaggcatgtcagaggcccacttcccgtcatggcctgaaacagtctctcaggttaaattttaaaagagccctggttgaggaggaagtccattcagacggttgggggggcttacaattttatttttgttttacacttgttatttctcactttcatgtctttgcttgttttattttctttgcctgaaatgtcctttacccagtgtcctcctccatgtttcaaaagccctacctttttcaaatatcttcttcattaatctttttctgatcctctccttgaattaaaatgctgttgaagcggcgtcattgtctggggtaaatatccgagatttgttgtctcaacagcaatggaaaactaggatacggacacaccagagtgaggttacgagtagaagtttaacaggcgaaagaaagagaagagctcactgcagctgacagcgttctcgaaaaaatgagttgccacctctgtggtgaaatgcaggttttatagataagcttgaggaggtggtgtctgatttacatagggcacaaaagattgattggattggtgtttcatttgcataactttcgaaaaactggttagggctaggtgtgtcatttgcattgggtgcgaaaagctggccacccccaccctaatcttttattatgcagttgggttatttacgtggccagcgccatgttgcccgtttctttactgtacacgtggtgacaaattaaagggaggacagaacctccatgttgaacatacttggcccccaggtagcctttttctattggcacagctgccggcattcaccagtgcaagcttccagcttgcctttttatttatttatttattttttttttttgagacggagtcttcctccgtcgcccagactggagtgcagtggcatgatcttggctcactgcaacctctgcctcccaggttctagtgattctcctgcctcagcctctcgagtagctgggattacaggcgctcaccacccaccaccatgcccagctaatttttgtatttttggtagagacaaggtttcactatgttggccaggctggtctcgaactcctgacctcaagtcttcctcctgccttggcctcccagagtgctgggattacaggcatgagccgctgcgccaggcctcagcttgcctatctatgtttgcagctcgatttttcaggctgctctttgttagaaaaaaataatttcttgggctgctttttattaaaagggaagttctgccgaagactcttttaccttcactatctggctaaataatttctttctagctcctgtatcactgcgtcttcctccttcgaatcctgttttcatgtgtctcttaaagcctttatcagagtactgttctgtatttcatccaatctaataggtcattgattataaaataccattgttttgtgtatcaataagaaagcaaaaaatgctgccagttacactgaaacatcatcaattataagacacaaccttagaggtgagaaaatgtgaaaaaaaaatgtaagctttagaattgatgacatatggtagttctttgtgaaagtgtctgtttcacaccttctcactggatagtaatttccctgaggggagggagggattatgatctgttcatatctgttggtgcctggcacctaagagggactcagtaagtatctgtggatttactggcccttaacacattctctcatgttgtctagcctttatgatattattagaagagttaataccctcaacagttgaccctttgaataatttcttgtgtctggcttctggacaagaggaaatcaggacaaagagctaactactgagtggatcatgattgaatgggctgctgtggtgtggcggttgaatggaatttgcaacaaatgcaattcgtagttattctttttctcctcagtacacacacagtgtttcttaatggcaataaagtttactttcctggccattagcagacttcatcattttggttcctaattgtctttttcccttgtcttctgttcagtataaatgacatcgcatttaagcctgatggaactcaactgattttggctgccggaagcagattactggtaggattttgtcttagtttcctcttaaagtgcttccctaacctccctcttgtgagtactctgaaatttgaccctttttttttttttttgagattaaaaaggcaagggtggaaaaaccttccctattactttttaatagggatggaaatgggctatttaaaacgggcaagtaaactatcagataagaacctgtgaacaataccacctttggggtcattcatctttccctttttactttgagacacccatgaaagagttgaaaacaatcacaatgcctttgaaactggactggtgtcagtttacattttgtcccccagaaaaattcaagcaacaggactgacggtgctgtgtccatgaaaagtcagatagcctgaccccaacttttaggcattggcctatctaaacagttccatatggatgttgtcctatttttcatattttcaaataacataagctccctctggaacctatccaggtatataaaagtaattttcagagaaccccttatgtttgaccaaaaaacctttgtatgatctctctttctgtctaagtctacttcctcttctctgttgtctctagatacgcagactgattaatctccattctttgtatggttaactacataatcttaaaacatggttaaattgttctgcagacttctctccagtgtaaacaatccaaactctattagtttttctacataggttatcttttccaatactctaaccatttcagaaagtttccgcttgatttctcagatggtgtgtgtgtgtgtgttttttttttttttttttttttttggagacagagtctggctctgtcgcccaggctggagtgcagtgacgcgatctcggcttactgcaagctccacctcccgggttcacaccattctcctgcctcagcctcctgagtagctgggactacaggcgcctgccgctacgctcagctaattttttgtatttttagtagagacggggtttctccgtgttagccaggatggtctcgatctcctgacctcgtaatccacccacctcggcctcccaaagtgctgggattacagaggtgagccaccgcgcccggccagatggtgtgtttttaaactctccacatagtgatagatgtcacatggctatcaaatacctaaatccatattacagctgggttttattttatttcttagagacagggttgtgctctgttgcccaagctggtgtgcagtagtgcagtcatagatcactgcagcctcaaactcctgggcttaagggatcttcccacctcagcctcccgagtagctaggactgtggacacacaccacctcgtccacctaatttttatttttttttatttttatttatttttattttttgtagagatggggtttcacttagttgcccaagctggtcttgaactcctggtttcaagcaatcctcccacttcagcctcccagagtgttgggatgacaggagtgagctaccatgcctggcctacagttgggttttataacattccctcctacttgaaagcccagagttctgtgactttcaaattcttggtagcaaatatgaaacatctattatgttgatttagtgcagagctggcattaaaatttaatcatgttgtagctggctctttttatgggctagttttatttaggagggcctgccttgatcaatcatatatccaaattcaggtaaggatgagtataaagaatttccatggagtgagtaattgaacctttggttctcaaggattggtagtatattcctggtcacatagtacatagacctgggtcctctacttcttggttacccaactttaagtcacgttgtttttggttttgcagtgcagtttttattggctacagatttagaatattgacacgtattgttataaaaacaaaaatagcagtagcaaccctgcaggaattctgactaatagatatcacatagataatctgtatttgtctcttttgccaggtttatgacacctctgatggcaccttacttcagcccctcaagggacacaaagacactgtgtactgtgtggcatatgcgaaggatggtaaaaggctgctctgggtttccattctctataatagcctcatcattgttcatttttctctttagtcactttttaattatttctagtaagctggagtacaagttgcaagttcagaagacagtgaagttgctaagacttcagtttggtcattcaatctagcaagtatttattgaggtcatctatgttccaggcactgttcaaggtgcttgagttacttcagagaaaaaaacggtggtccctccccttatggggcttctgttttatggggtggtggtgagaagtgagggaggaagaaagtatgagggaagacatacagtaaacatagtaaaaaggtaaattaagtagtatgctggaaggtgataactgttatggaagaagaaaaagtagagcagaatgagggggattgagagtgctgggcagggcagggggttgggtacagtattgaattagactagtgagggtgggctcattgagatgaggacaggtgaggaaaaagactttgaagtcaggaggcaatgagattgtgccagtgggcatcggggggaagagagctctttgcagaggaagagccattgcagaggccctcaggtgtgggtgtggctgctaggagctggatcaaagagaatcgggaattgtagaggatgaggataaagtggtaacagacatggggtggtcagatcataaagattttgattctcagtcaaaatggaactactgaaaggtcctcagcagaggagggatctgatttgatttgtattttaaaaggatccctctagttgctgagttggaaacaacctgcaagaggtgagggttaggacatctgtgtgaggaagcatcatccagacagggggtgatggtggctcagacctctgtgggggcagaggaggtgatgagaaattatcagactctggatataatgggagggtggagccaactggattgtctgacagattggatatgggctatgaagaaaaaggagtcaagtttttgacctgaggactgaaaggttggagttgccccccccactgagatggaaaagactgcaggtagagaaaagttatggttgaagatcagaaattcagttttatacatgctgaatttgagaaaagttgatgatgtcggagaggggagagaactgctggaacagagttgttgagtaggcaagaggagatgggatctagggcatagacggggtatttgctttagataggggcacagtaggaactgcagaggccagcagatggggacaatgtggtagtaggaatctaatggaaattctcaattccattttttttttcttcagtgaaataggaagcaacagcaactgagagtggcaatggggaagggaggtttcagagagttgaagagaaagggaaaaagtgtaaagtcactgcctcagagaatgggacagcgagtggacccaggaggtgtagtgagatccccggtgacatgaagggccctcttgaagattgtgatcatgaattgaaagtgagattagttggtgtgattgtgtctttttctccagcgattttgagctgcatagttgtagaggcagaagaggtgaatttaaccagaggtggttttgcaagcacatttgaagatgaagtaggagggcaagggagcagaaagtgtatacagataaataattatgtacattaaccttgaattgttggctgaataatgaagggagagaggacagcaatggagaagtagtaggttctggtggtgttgaaggattgttacagttggggtaccaggtgggttgggaaggaagggaagtggtgcatgaaactgagatttaaatttattttaaaataaatccatgttgtcccacagcataggattagtgggaagaaatgggctttggaatgagacagttgtgagttccaaccccaacccaacaccagagttctgtgagtctgagctggttattgagtctgagtcacgatttcttcatgtatcaaatggataacattgagataacattctgtagccactgccaagaagtcacaaaattgtaatgttataattcttgaatgaaccttggagattattccagtcccaggtttttaacttcttttggctgatgggcctctttgataatcagatggaagctttagaccactttctagaaagatgcaaattcttcatgtgtatgcagaatttcatgcatataattttagtctgattagtccagtctcttcactttagtcctgcataaagacataaacaattggccaggcacggtggctcatgcctataatcctactgaaatcctaaagctctgggagcctgagttgggaagattgcttaaggcaggagtttgagaccagcctgggcaacatagtgagactccctaaaatctggcctgggtgacagagctagactctgtctcttaaaaaaaaaaaaaaaagacaagtcatgtgacttgccaaggccatgcagcagattggcccaaagacaaaactaatttcttgcttcatagtcaggtgtgctgtaccatggtagtcatatttgtgtgtgtgtgtgtgtgtgtgtgtgtgtgtgtgtgtgtgtgtgcatgtttgagttcaagttcagaataatgttttagggagacctgtgaggagggagcctggagagctgaactgtttctgtctcatcctagtggctgttgaggaatgtgggtcagtccagggcccagtataaggcccagtaggtacagaagagctattgggcctctggtgcctctggtgtttataagcatagcagggctctttgacctgcaacaccattagggcacttgaggatgtcagagtgtgacccatcagtagtggcatttgcacagcactttgcagagtcctgtcacacacatctcacttgatgcttccaacaactctctgaagcaggcagcaaggggactcttatctccgctcaaagatgagaaaacagacttggagcaattacaggtgatggtggcagaggcaggcctaacccaggttctctgactgcagagtctttgttctttctagtgtatcatgctgcctcttcatgacacctgtataatgattaagaagtcttttagtcctcagaattggttttttcctcttagacctgaagattgagatacactgaattccagctttgctctttaagtctgcttgtttctgatttctcctttaagttcattaagttttttttgtttttttttttgagatgaagtctcgctctgtcgcccaggctggagtgcagtggcgcgatctcggctcatggcaacctctgactccctggttcaagtgattctcctgcctcagcctcctgagtagctgggactacaggcacgcgccaccatgcctagctaatttttgtattttcagtagagacagggtttcaccatgttggtcggcctgatctcaaactcctgacctcgtgatccgcccacctcggcctcccaaagtgctgggattacaggcgtgaaccaccatgcctggcccaagtttaataagtatttaatgagcaaccatgatataaaagtatgtaagacatagtttttttgttcaagaaaaacaatataatatgaagaaataatagaaatagctaatttttttttaattctattccaggcccagttctaagcaacataagggttaggggtgccactgcctgtgcaataaaaaatctgcatgtaatttctgaaccccccaaaactttactattaatagcctactgttgaccagaagccttacctgttacataaacagttaacacatttttaatattatatgtattatatattgtattcttaaaataagctagataaaatgttaattgagaaaaaagaaaaatatatttactcttcattaaatggaagtggatcatcataaaggtcttcatcttcattgtcttcaggttgaataggctgaggaggaggaggaggaggaggaggaggaagagggattggtgatgctgtgccagggagacagaggcaaaagaaaattcacatgtaaaagtggactcatgtagttaaaactcatgttgttcaggggtcaactgtatgtacacatgtacatacactcatttaatcttcacaccaaccatgaggtaaatactaacattgtatccatttttcaaataaggaaatgaaagctcttcagtagcttgtttgggtcatgcagctggtcagtgagatctctaggaattctgacccagagactctgagcccaaagcttatgcttttcatcaccatcacctgctacctaccaggatgagggaggagtgatggaaatagtaagagcagtttctttgtttatttagtatttgcagcaatatcatatggctcaccctaatatctactatttcagctactgtaaaaggtacttggccgggtgtggtggctcatgcttgtgatctcagcactttgggaagccaaggcgggtggatcatgaggtcaggagtttgagacaagcctggccaacacagtgaaacctcgtctgtactaaatatataaaaattagctgggcatggtggtgtgtgcctgtaatcccaactacttgggaggctgaggcaggagaattgcttgaacctgggaggcggagattgcagtgagctgagattatgccactgctctctggcctgggtgacagagctagactccgtctcaaaaagggccagtcgtggtgactcatgcctgtaatcacagcactttggaaggcggatcacctgaggtcaggagtttgagaccagcctgcccaacatggagaaaccccatctctactaaaaatacaaaaaattagccaggtgtggtggtgggcacctgtagtcccagctactcgggaggctgaggcaggataatcgcttgaacccgggagtcggaggttgcggtgagccgagatcgtgccactgcactatagcctgggcaacagagtgagacttagtctcaaaaaaaaggtactttacagatactatcttagttgactcccataaaaagactctgaggaagatactgttcctctgtgtttcagatgaaggcattgaggctcagagaacagtgacttgcccaaggtcaccttccacttgccctgtgaataaagtctaaaagtccttaagatgtacagaatgtggcacatacttacctcttaatcctcgtctctcaccagagtaggtgaagaccccgttatttgctgccatggtaccgtgatcctcttccaaatgcttataaatgtggaacagtgtaattaataacaaattacttgttatatgttgcctctctccagtctgttccttcataaagcccaagtagtatgaaaatgcgaatctgatctatcactctttgcttaaaacctttctttggcttcccattgctttaggataaagagcaaggcctctgctgtgtccctgaggtcccaagagatccttccacaacccacctcacccttccctccgttccatgatgactccgctcattccctcagacatgccaggcttttcctgcttcagggcctttgcacatctgttccatccatgtggatgggtctgtctcctctctacatctggctaagctctgctcatcctttaggtctccactgaaggatctcatccttagagaaatgttccctcatctaaattaggtcccccaggagatgttgaccaaagggtagtttcagtcagacaaaaggagtacatttttgagatctattgcacagcatggtgaccatagttaataatagcgtatatttcaaaactggcacaggaatagtttttttttttttttttttttgagatggagtctcgctctgttgcccaggctggagtgcagtggcgtgatctcggctcactgcaagccccacctcctgggttcactccattttcccacctcagcctccagagtagctgggactacaggcgcccgtcaccaggccggctaattttgtttttgtatttttagtagagacggggtttcaccgtgttggccaggatggtctcgatctcctgacctcgtgatccacccgcctcagccctccaaagtgctgggattacaggtgtgagccactgttcccggccaggaatagattttaaatgttctcactataaaaaaataagtatctgcagtgatggatatgttaattagcttaatcattcttcaatgtgtatgtatataaaataccacattgtacttcataagtagatataattattatttgtcaaaaataaaaatttaagtaaaaaagtaaatcaggttccccagttattctctttcataggatccgtgtcttaccatgttgtatttgtgttagattaatttgatgtgtacttcttacactagactgaactttatgaaagtagggatcatgtgtgttttaatcattacttaatccctagcatagaacatgacagctacatgtagtaggctcccaatacatctttgtttactcagtgtcagacaaagcaggtttggaacccaaatattctgactccaaggtcctgcctcccagtactgataagaactaggaaagaagctaacacttactaggtaccttaaagaactagttttctaaagaattctctctgggaaatgctggtttaagataaatgtaagactttccattttacaaacacttttaggcaagcgctttgcttctggatcagctgacaaaagcgttattatctggacatcaaaactggaaggcattctgaagtacacgtaagtaacttaggtgtacagtattatgagtttgatgcttattgaataattgcagcaaaagcctcttagaaaagatgtaggagaaaacttttttctcttaaattgaacttgaaattaagttgtgggtgtgtgtggttggtataggaaggttgagtagtgaataagttaatgaatatttcttggccacttactggcgtggccagcactgggctaggtgcttttatgtagctcatctcagttcatctgacattgtagactttatcccacccccaacctgtcatcttccagtgtccctgtctcagagaatggccttatatccacccagtgtcaaatgtcagaaacttggggtcagtgtgctccaggcctcctcttactattggggatctgccgtgttcttcccctgttcctctactagttggtccctatttaccctgcagatctcagactcaaatgtcagtttctttgtaaggactttcctgcctctctagactggaacaggtctctttcgaggcatttctcacaattgcagttttaggtttattctggtgactgatcagtattgctcatcggcctgtaagttccataagaacagatactgcatctattttttgttttgttttgttttgttttgagacagagtcttgctctgttgcccaggctggagtgcagtggcacgatctcggctcaccgcaagctccacctcccaggttcacgccattctcctgcctcagcctcccgagtagctgggactataggcgctcaccaccatgccaggctaattttttgtatttttagtagagatggggtttcaccatgttagctaggatggtctcgatctcctgactacatctattttttttttctcactcttgtgtccctgatacaatgcctagcccataattggtactcaccaattttccttccttccttctttccttccttccttccttccttccttccctccctccctcccttcttccttccttccttccctccctccctcccttcttccttccttccttccttccttccttccttccttccttccttccctccctccctcccttcttccttccttccttccttccttccttcctttcttttcagtcttgctctgtctcccaggctacagtgcagtggtaactagctcactgcaactacaaccttccaggctcaaataatcctcttacttcagcttcccaaatagctggaactgcaggtgcacacccccacaccaggccaatttttaaatttttttttttcttggtagagacagggtttcactttgttgcctgtactggtcttgaactcctgggctcaagcagtcctctcaaagtactgggattacagatacgagccactgcacctggcctcttttcaattgtggtaaaatatacatgacataaaatttatcatattaactactttttaagtttacagtttaatgttaaatacatttacattgttgtgcaaccaatctcccaaactcttttatcctgctaaactaaaattctatatccttcaaatacctactcacccttctctcctacccccagcccctgaaaaccagcattctactttctgtctctctgagtttgactgctttacatacctcatataagtagagtcatacaatgtttgttcttttgtggctgagttatttcatttcacgtaatgtcctcaaggctcatctgtgttgtagcatgtgtcagaatttactttctgtgttgtagcatgtgtcagaatttacttccttttttttctttattattatttttttttatgaagacgaggtctcactatgactcctgagctcaagcaatccttctcccttggccgcccaaactgctgggattacaggtgtgagccactgggctcagcttccttcctttttaagtctgaatattattccattgtatatatagaccacattttctttatccattcatctgttgatggacacttgtgttgcttctgcttcttagctattatgaataatgctgctatgaacatgggtgtacaaatcaacaaacaatttttgaaggaatgaatgaatgagtgaagttgtaagtaaagtattacccacaagtgaaggactaaaacgggttgagacgccttgcatggtacatgatttgctcagctttcattgttgtctaaggatttgtcatgtttccagatcttggtctgtgatgtcttcattgcacctccatcttccatttctgggcctccacaaaacagtaagagtaacagccacagataaagcacctaaaggccaaggtgggaggattgattgcttgaggccaagcgttcaaaaccaacctggccaaaagtgagtccccatctctacaaataagaaaacagtgggtgaggagaaggagaattaattctttaggagtaggagaattaatttctgtgctttttgttggtcacttgcagaagagcatgtggtctaaagtcagaggctgtgggctcattattaaaatcttcagttgtagccactgaaatctttgtggtttgctgcatagtaatctacagttgtttacttcccaggcacaatgatgctatacaatgtgtctcctacaatcctattactcatcaactggcatcttgttcctccagtgactttggtacgttctgattcctgatgtcctgtcctggaataactgaaaatctgggctaaaaatgctaaaatgcattcagaatatggtgattttatcctgagagagttaatactacttctctaccttcaatggctgaggggaggctgacagttattctttaaattgtgtggaaaccaagacagtgaatggtgacctttactctggtaagacatcagagactacaggaagggccccagcaaaggaaatggtaacaagattgggagggcacaggcataacttggtgttgctgcctttgggaagccttcccttggtgttgctgcctctgggaagccttccctgactcaccctggcagagacagtgcagttgtcctcacctttgtattgacccacatctatgtttatgtgaaattcttcactgttgcggttctacttcttgtgcaatttgtcgtcattactggtttaggtggctgtagctgtcctccctgaggggctgaacaccttgaggagttcatcctggccacggtcccgtgccagcattacagcactggtgtagtactggcacaaaagaggtgtcagtaaaatgtctgtggagggaggaagggagtgaaattgggcagaggcttgtaggttatttccattaatggttgattctgttttcagctctatcagtctgtgttcgttgctagtggatacaatgaagtcactagatgaggagtcagaggcctaatccctctcagtgttccagttcccttatctaaaaggagcatgctactcactgtgtctcactgatacggttctggttctgaggttcaaaagagagaatggaattgaaagccaattgtataaatacatggagaaaggcctgtcatttgtttaacatattttatagcattttcttcatgtgaagcactggtctgtgtgcttacactggaatattaaaaaggcaaaatagaatccctaccctcaaggagcttgtggtcttaggagaaggtgggattaaaaaaaatataatattaagtactagtatttattgaatgcttgcagtgtgctaggcactgttctaaggattagaaatgaatttctatttgagctttatgacagcccctgaggtgtcaggtattattctcattcccaccctactgatgaaaaagaggtagaggtcccttagctagtaagtggaggaaccagggcttggactttagaccaggtgattgcatacagagcctgctctgctaagcactgctgaaggaggcccaggaggaaggagtttcttccagcttggggctccaggcaggcttagtggaacacagataacatgtgcacacgtcaaaatgtttggaggaagcgttctggaccaggggaaaggcaaaaaataacttgtttgatgttgcacttggccatgtatttgtgcactggagttaccttcttgattgtacttcgcaacttggcaaatagaagaatttgcttatgttgtctagacatacacttgctatgaggcactgagccagggcatctgggacaggggggagcaagccttaggtgaccagtgtgccatgggagaggcacagctcagatagagtcatgtgttgtgattgagacctatgaaagaaaactagattttcagaaagcatcattgttattttaaatgctaggttatactctggttgcagtgtcaaagttataaacaatgaaactgtcatttctttgagagtcaaatccctgaaaagttggctagaactttaccaatctattttatttttcttctgaaagaatgatagattcatagtaagttacaaagatggtaccaagaagtctatgtacttttcatccagtttcccccagtggatccatcttatgtaactattatacaatatcaagaccaggaaactgagactggcacaaagtgtgtatattatatagttctgttgttttatcgcatgtgtagattgccatcagcgtgacacagaactaagccatcaccatgcagttaccacttagtgtcatatctactcaccttacctccagttatctccaaaccctggtaaccacaaatctgttctccatttctataattttgtcattcaagaatgttatataaatggaatcgtacagtatatgaccttttgagattatgttttttcattcagcataaaatcctggagatccatctaagttgttgtatgtttcaattatttgttcctttttattgctgggtagtattccaaccaatccatcttcttttatattattgtgcattgaagggttgtggtctcctgaacagaagtctgtctccaaacacaaatcaagcagcaagatcatctgctgcaggtaagtgcagctctgacgataagatttatgttccttcatcttccacacagactctcaaaatccaattatttcatgcagcagagaaggtcttgtgttaggtagttggtttaggcccctgtatttccttttttcttctttcttcgtctcctcgatgggaaagacttgtgcctttgatcatgaagcaaaagagaactacaagttgccttcatgcagttacttagcaacaagcctcaacatccagctatactgagtggaggcttgttgaaaatgtgaggctgtcattgtccaggcagcatgtgtggggaagaaagctttccctcccacactttgatgctagacctgaattagaatccagaatctctcattgacaggccatgtgacctcaggaaagttactaaatctttctgagctggagctttacgttcctcatctgacagatagggataaaaatactgacttgacgagattgttgtgaaatgcacacaaactcatgagtgtaaagcgtgcaggacagtacctggtgtacagtagacactctaaatggtagctattcttgctgttcagcttctaggagtatatcccttccgttcagcatctgttgagcaccttctacaaagcaagcactgttctaggggttggaagacaccaagtctgttcttaaggtgctctttaagtgggaggggattgagatggagagtgggaagtggtggctggcccagagatgtaggcacaagctaagggctgtcatagaggtatgtacagagggctgggggagctcagaaaaaggcaccaaatggtgccttcacttctcactgtttattacagaactaaatagcattttaagtttgatcctctgactttatgtcaggaccggcaataatgaaaccatatcccagctgttgctgcctcatcagacttttatttcaaaccaaggcatcatcctcactagttttaccttctgtggggtgcttcccctatccccatgccttttgttggttgtgtacacagctggacaaatgatggtcagtacctggcgctggggatgttcaatgggatcatcagcatacggaacaaaaatggcgaggagaaagtaaagatcgagcggccggggggctccctctcgccaatatggtccatctgctggaacccttcaaggtactcttaaagttgtcctccttctagaacaaacaccatcatgaagaagggctttttgtcttcctgaggtctccctacattcaaaggcttctcacctcacttgaatggtctgttttagaacctgtcccatttgtatggattttttttttaatagtcccgctacctgagaatgtatggaatttattaagagcctcctcaaaagttgagtttaggaatgaatcctggacattttagcaaagcagatgagctatttaggacaggccaaagtgtgtgtgtggcgtgtgtgtctgcgcacatgtgcatgcacacatgtgtacgtgtacatgtatatgagtgtgtgtgtgtgtgtgtgtgtgtgtgtgtgtgtgtgtgtgtgtgtggtgtgtgagtgatgcagcaggaccatttccttatgaatcaatagtggagctctttgctgtggctttatttttgcctttccttttttagttcttccctccaagtttgggcagaatatgtgcccacctgttaataaatagctttttcatgagcctttttttgcccttgtcagaaagtcaaaattaagtctacagacgtccctaaagcctagagatacacaaacaattggcacctaccttcttaaattttatacacactttgctttctatgtccatgtgactttgagagtaaactaattatatgctctttttttttttttttttttttttgagatggagtctcgctcggttgcccagcctggagtgcagtggcacaatctcggctcactgcaacctccacctctcgggttcacgcagttctcctgtctcagcctcctgagtagctgggattacaggtgcctgccaccacgcctggctaattttttttttttttttgagacggagtctcgctctgtcgcccaggccggactgcggactgcagtggcgcaatctcggctcactgcaagctccgcttcccgggttcacgccattctcctgcctcagcctcccgagtagctgggactacaggcgcccgccaccgcgcccggctaattttttgtatttttagtagagacggggtttcaccttgttagccaggatggtctcgatctcctgacctcatgatccacccgcctcggcctcccaaagtgctgggattacaggcgtgagccaccgcgcacgcctggctaattttttgttgccaccacacctggctaattttttgtatttttagtagagacagggtttcaccatgttggccaggctggtcttgaacttctgacctcaggttatccacccacctcagcctcccaaagtgctgagattacaggtgtgagccactgtgcctgaccctatatgctctttatatatcctataatattattaaaccatcagtatcctttacagagtcctctgagggtaaacgaaaggtcctacttgtttaccagctcaatgtcattttacagatggttgcctacttgatttagaaggttgtttggaaggttattatgcttcttcctgaataattttttttggcccatgctgtaccatgcatgtctaatgctgtcaaaggccattagcctgccccagagttcctgctgtttgatttgtggctgcagaggacttggtggctctaggctaccatttttaattcatgagaagcaggaggccctgtatacctggtggctgtcctcctccaggtagggttcagaggctccttttattttttatttttattcttttttttttttttttttttttttgagacggggtctcactctgtcacccaggctgcagtgcagtagtgcgatcttggctcactgcaacctccgcctcccaggttcaagcaatcctctcacctcagcctcccaagtagcttggatcacaggcacatgccactacacctgtctaattttttgtatttttggtagagacagggtttcaccatgttggccaggctggtcttgaactcctgatctcgagcgattcacttgcctcggcctcctgaagtgctgggattacaggcgtgagtcactgcacctggcccccaggggctccttgccaggattttaaattatagttttagtgtagttctaggcaatgtaattttgaacaactacttactgtctacagccgatgggagagtttctggatgaacagagagaatgaggatgccgaggatgtcattgtcaacagatatattcaggaaatcccttccactctgaagtcagcagtgtacagtagtcagggtagtgaggcagaggaggaagaaccagaggaagaggacgacagtcccagggacgacaacttgtgagtgtgtcccagtgagtgggaacccttctggtaagggcccaggccccacacagacttgccaggacagatgttaaactctttggccaagggagtgcagggactagggggaactgtgggtgaaagcgccttcaaaaaaaggagacatacccttaaaacttgtgtgtgggtataaagtgatcctgtgagaaactataggaaatactgaaaagactaaaggagaaagttcaacttttctgataaaaccccatcccctgaggaaatcactgttagcaatctagtgtatttctcctcagtcttttcgtgtgttcatataattaactaagtcatattctgctttttttttcacttaacattatagtgtgaaccctttccagtaacattacaaatccttcgaagaacatgatttttaatgtctgaaaagtgtgcccttttgtggatgccccatcactcgacacttcctctattactggacacgtttcttagcctgttcccacactatcccttaccttaccttgcattttctaggatgtatatcagagaggaagcccttaccttagccacagtcttcactcccaaatcctggctgtctagtcattcttctcttcagttgagattgcctgtagggaaaacatgggcaggccagagtggggaaagctggggtagccaggatatctcagtttggcagtagagatctagcttgagactttccaaactgttttacatagtacctgagtttccttggaagaatcccaccctgaggtcatgggggctgggaagtggggaccagtaaaggaggaaggtatggctttgggtccccatctcagtgcctttgattgtttcaacatgagtttttgtttcataaagaatcctactgccccaggaggtaaaagggggttgaaaatcactgatccatctcacagggactgagcccagcccagagccatatgtggcctccccaagagggctcactggtgggctgggctcctggattgtgtttggactttggacatcagtgccagtcacacaaaggtcatctgcaggctccctcattaacatccctctcggtctttgtctcttttcccttagttttgggttagtgcctatgacatttgccactcttggctgggttttacaaacaaggctttaccttgcctgcctacatatccagtggtgctaccaggttaccacaagacactgggatcagaaaagctggaattaataaacaaagaggcaacattaggtggattaagacccagcctcaagggctaggaatgcttttcttttttttttttgtgacagagtctggctctgtcacctgggctggagtgcagtggcacgatctcggctcactgcaacttccgcctcccgggttctaagcgattcttgtgcctcagcctctggaatagctgggattacagacacgcgacaccacgccgaactaattttgcattttcagtaaagatagggtttccccatgttggccaggctggtctagaactcctgacctcaggtgatccacctgcctcaacctcccaaagtgctggaattacaagcgtgagccatcacgggctgccgcttttctcttgaactagattcccaggtagcttgctctccagcctcaggcaagggagtttctcctgtgtgctggtcctacagtcccagccccacagcactgatccccataggttctcagtttcaaagacagttgtttgttttcagagcccattgctcttttttgaaaattagattcagtcagaaaccatttcacctgtgcaaggacccccgcctgcaggagaacctatttttaggtgttaattttctttcttcaggaagagcaagcaagtttcccttctattaaaaaatgtctttgtgctgcaagagatgtttctctgccatctccccacattttctagtatgtaagagaaaagcagtctcaatattgcagccttgcctatcttagtgttgctccccagtaagctctgaaatgagaggtttatcttcttcagctgcagcagtgtccccagcaccataaggtcatagcaggggactcagtgaaacagcagatcccaggaaggctgaacctcaactctgcttcatcccgtaagactgattgatgggttgggccaaattataacttttggcttcagtaaagctgtacaacatttggcaacctgaggccaggacttccttgttcctgttgtttaagcccttagagctatactcatcagcaggctgtggcccttcataacctcttttatcttctgttgattagagaggaacgtaatgacatcctggctgtggctgactggggacagaaagtttccttctaccagctgagtggaaaacaggtatgtagccctgtacaaatccaattgcagtcatgcctgttatattttcattttctgagattctgttactattaattatacattatcattgttagttcctgcttattgagcatttgctgtggtaccagatactgtgctcactgctttgcatactttatcctattttattcttataaaacccaatgaagtgggtactactttccttatcaactttttagaaatgagtaaaccagaactcagagcagtgaaattatatgcccaagatctcacacagctagtaaatggtggagcctaggagttaaacccaggttggtttgactttaaaatctagctcttaattttgaccttactttcctctattcgctttctttcattcaaccagtatttatgagtacccactcaggaaagccctttcataaaggagctgctgacatagagctgggaaagtgatagcctctacctgcaagagctcacaggctggcggagacacacttgatagcaaagagcccctgtgtggtgtggtatgtgacacaatagaaagctgtacagatagacagctttttgggacacaaaagagggtaacatcactacttggtagagatgggaggtcttgttagaggttatctttgagcaggccatctttgagttaggctaaggacattgggaatggtgtttcaggcagaaaaaaaaatagcatgtatcaaggcaggaaggaatgaaaatatatgacagttcagagaatggtgagttgtacagggtgactgcatctcagagtttgtgacctgaaaacagagctgaagaggaacatgggggtatgattttttatttatttatttatttatttatttatttttaatttttttcgagatggagtctcactctgtggcccaggctggagtgcagtggctcagtcttggctcactgcaagctccgcctcctgggttcacgccattctcctacctcagcctcctgagtagctgggactacaggcgcccaccaccacgcctggctaatattttttgtatttttagtagagacggggtttcactgtgttagccaggatggtctcaatctcctgacctcgtgatccgcccgcctcagcctcccaaagtgctgggattacaggcatgagccaccacgcccggcctatgattttttgtttgtttgttttgagacagagtctcactctgtcgcctaggctggagtgtaatggctcaatctcggttcactgcgacctctgcctcacgggttcaagagattctcctgcctcagcctcctgggtagctgggattacaggcatgtgccaccatgtccggctaattttgtatttttagtagagacggggtttctccatgttggtcaggctggtctcaagctcctgacctcaggtgatccacctgcctcagtctcccaaagtgctgggattacaggcatgagctgccaccacgcctggctggagatgtgattataaaggacctgagtagtgtgaataagaagtttgaacatcatatactgtaagtattcaggagccataggtggcaggaagtggcatcacagattcttgcttcagaagaataacttgtttccatggagggtggattaaaatatagagagcatggtagtaggatgacttattagtaggcaggaaatgccaaggattagagtaaaggtgctgggtacagatttcacaccacagccaagcaagtgagaaatgcaacctgtgcagtgaagcctttaattgcgtagcatccttattcctcaaaacatgtcatgtaagagggaagagttttagatgtgtgtagcccagcttttgggccatttcttctacccctgccttaccattggtcatttcttttgtattcgagtaaagaaaagataaagggagcagataatgaagtattttctcagtttcccatggctgatttcctaaaactctcattttaattaactatcatctagtttccctggccctctctattcatctgcttaatgtgtgtacatcatcattcaacagatacttattggcacacctactgtgtacgaggcactggatgtgggtactgaagactcttgggaacaaataaccacactgcagtgggagggaatggggtcttgttgctatggccacagaagaaaagagctcaacatggccgagggccacaggaaatatcttgcatgtatgcagccccagagctcatgttgtggcccaaagtttctgcacgatgagcaaccttaacctgctgagatggtaaccccaacttgtttgggacagtaaaattgttttcttgctgggtgtcttcccttcccaatctaggaagatttagaattcaatataggatgatgaagtaaatcaaacccatacttttgtgttagtctgaggtataatttgtgtatttttgtcatttgaagtgttagtaatacttaaggggatctggcttaataataataatagctaacatttattgaattccaggcattatataaactctttacaaggattaactcttttaatccttataacaaccctatgaggtaaatactgttatcatcaccattttacatgtacgaaaattgaagcacagagaggctcaataatttgcccaaaggcacacatttagtctgtggtccaccctgctgaaacccaggcatactggtgccagaatccatattagaatgtctatcagattagtcttgcaatgaccattcaaaagttgtattgagtaatttcatatgtctgattttatttactttttgagaaaaggcctcaccctgttacccaggctggagtgcagtggtatgatcatggttcactgcagccttgatccccctgggctcaaggaatcttcccactttggccttccaagtagctgggactacaggcacatgccaccacatcctgctaattaaaaaaaaaaattttttttttttggtagagatagggtctcctatgttgtccaggctggtctcaaactcctgggctcaaatgattcttctgccttggcttcccaaactgctgggaatacaggtgtgagccaccatatctggcctacttctgattttaagtggaaagataagaattatatttaaagtgtatattatttaaggttcctaagcaatattggaatgcttaagcaatttgttacatttttcttcttggtgttcactgagctttttgaatctacacattgatatcgttctgtctttcaccaaatgtgaaaacattttggccatgatttcttgaaatatttcttcttctccattctttcctttcctctggaactctaattacacttacattagaccttttgttactgttctccaagtcatcgaggccctgttattatttttttaaatcccttcttttccctctgatcttcagattagaggatttctgttgttcagtattaaatttcattgactcttctgcaacttccaatatttttcttaagctcattcagtgtgtatttgtttcagttattattgcatttttccttttctagaatttccatttggttcttttttcctttttattcattacaagcgtatttttctttatagccttaatcatagttataataactgttttaaaattctcatctgcagctgggcatggtggctcatgcctgtaatcttagtacttctggaggccaaggagggacgattgcttgaggccaggagttcaagactagcctgggctacatagagagactccatccctaaaaacgaacaaacaaattggccagggaggtggcaggcacccattgtcctaacaactctgtaggctgaggtgggagtattctcaagctgaggagttcaaggctgcagtgaactcttaccactgcactccagtgtgggtgacagagcaagacctgtgcccaaaaagcaaacaaaaattcttatctgctatttctaacatttgggtcgtcatggttcagtctccattgatttttttcccttgaatatggttcacattttcctgctttggggaattttgaattgtactcaatattgtgagtaatatgtcataaagactcatatccatcatgttcctctgaagattattgtgtatgtttgtgtgtatatatgtttaagcaggcagtttactttgctgggctcaaaatcaaaactccatgttttcagtggtgtcagcagctgacatctctgtgcagttctttagctgtagctaggctgcttggcatcttgtcacagtttatagttcaagggtttccagatattcagtggagtttatgtgcagaatttaagctcttactttgcttctcttttctgggatttcccacttcactttccgggtgctgtggtcctcccaaattctatactcacccagcatgatggtgaagagggctgccctcaggcaaaaacccttaaaaaaatgagaagttcacctagtgtttgttcccttcttctaaatgtgcatgtgtcttcagtttctgcctgcttttggtcgccctgaaatggttgttgtttatagttggtccagagtttattgttgttactttgtgggaagattggtccgatgggaactagtgagccatttccagaagctgctagccttccatgtcgtgattcataagaatttttagttttcttgttaggttttctagcatcagataagtgctagggaaagttttcgttgctaggcatttgaaattcctatacaggaaaggaaatttgaatgtattaaacttataattgcagtttaaattggtgtaagggaattaatttaactaagttttaaatgggactggatatttaagggattttataatctgttcaaaattggatgccttaaacagtcaaagtcaattggctgttcactttaactagatttataaataggaaaatatttgtaaattgaacttaagaacttaaggagaaaccagttccctaaagttatttcttttataaattgaatattagtttaataatgttaatcacaaatcgtctttttattcacaaaagacacccttggggcagcaaaaaactccagtggtaataaggaacttgggctttagtggggcagacctgattaaccctgtgtctacagacaacgagagaagtgcaatgggataggcgagcacaagtgctgtgggaggatgaggggatggggattggagatgttcctggaggagatgacacctggcagacaaagtgagggaaagagcattcctggctgggtctaggaatggtgtggagtgtagcacctgtgaggatgtggaggcctgaaaaagcattgcccgcttaggaaacttacaagttcattttggctgagagaatgaccttgggggctgagctcgggagtttgacctgcatcctagaagctgaggaagcaccatcaagaaagagaaaagacaacccacagaatgagagaagttttacaactcatatatctgataaaggacttgtatctggaatatataaagagctataaagacagggctgggcatggtggttcacacgtgtaatcccagtgctttgggaggcagagacagggagatcacttgagaacaggagttcaggaccaacctgggtaacagtgggaccccacctctaaaaaaatatatttttaattagctgagtgtggtggtatatgcctctagtcccagctactgggggtggtgaggggctgaggcagaggaattgagcccagaagttcaaggttgcattgagttatgatcatacgactgcattccagcctaagccacagagtgtgacatttctctgtggccaataagcacatgaaatgatgctccatatcattagccatcaggaaaatgcaaattgaaaccacaatgagataattcgcactcactaaaatggagaaattggaatcctcatacactgctaatgcaaatataaagtggtgcattcacttgaaaagtgtagcagttcctaaaaaaggttcaacgtagagtttaaaaataaaaaaatataggccaggagctatgactcactcctgtaatcccagcactttgggaggccaaggtgggtggatcatctgagctcaggagtttgagactagccgggacaacaaggagaaacaccgtctctgcaaaaaatacaaaaattagccaggcgtgttctcacacatctgtagtcccagctacttgggaggctgaggtaggaggatcacgtgaagctgggaagtggaggttgcagtaagccaagatggcgccactgcactccagcctgggcaacagagtcagaccctttttcaaaaaaaaaattttttgccaggcatggtggcactcacctatggtcccagctacttaggaggctgaggcaggaagatcgcttgagtccaggagttgaaggctgcagtgagccgtaattgcaccactgcactccagcctgggtgacagagtgagaccccatcttgaaataaacaagaattaaaaaatgaagagaagtagtatgggtgtagttgcagaataaaggacagtctttaaactgaataaactcagctttataaaatacttttttaaaaaggcggagaaaagaagctgagggaacccattgaactataggaagaactatatttgcagagggaggggggcctttgggaacaaaaccacccacagtctccatcttggcggaggagccctgacacactcctgcactcctggagcacttgggtgggactaggggaggtgccactgactccaggagctgaggtttgggctgtgtagaggatgagtagggagatgcagaggcagagaggcctgtgttcaccatgggatgacacaggagaaaaggctggccagctctccctgtcttcccaactccctctaaagttggcgagaaaaagcccttaattgtattgcaatggttatggattcggaaatggtttttcccttgctgtgtgttctttttcctcagattggaaaggatcgggcactgaactttgacccctgctgcatcagctactttactaaaggcgagtacattttgctggggggttcagacaagcaagtatctcttttcaccaaggatggagtgcggcttgggactgttggggagcagaactcctgggtgtggacgtgtcaagcgaaaccggattccaactatgtggtaagaagagaaagtttgttctgtggggccatggcttgaagaggcactgagcagccgccgtgtctcgagtcacatcactggggtttgtgtctgacaaatgggggaatgcagactttctccagagagctgggaattgacagttctctcaccccgcaggtggtcggctgccaggacggcaccatttccttctaccagcttattttcagcacagtccatgggctttacaaggaccgctatgcctacagggatagcatgactgacgtcattgtgcagcacctgatcactgagcagaaaggtaagaggcaggtccagaccttgggaagagggacaggtggaagcaggtggaaagggctggtgacagggcacttgaaatgacaggaaaaggtttctctttggcgttttgcaaacctgttagccactgggtctgtgtcttgttttcttttttttttttttttggtgggggaagtagggatgccagtctccttgaggatctcatgaaagcaataaatcctctctgaaaaatgtaccaactcagaattttgcacataatttcaaggagtacatgaatttccttagtgagggaggatgatttatgacaggttggagccaggtggttgacctgcatgggtcttcgtggacctttatcctttctggtcagagtcactctggggtgcttctccctcagccctgtctccacttgcctcctggtgggtccttctgccagagatgagcagtggaattggattggcacaggctaggtcagaagatcagagttcccggcctcgcatagtcattctaagccctaagactgcagtctctccctctgtccacttaagttgctgtgctggttaaatagactcaatccacttacttcaggtgtattcatatctggatgtgctggccttagtgcactgctaggtgcctttgcaagggatccaggttgggggttgtcttgtagattcagatgagtgtcctttggtccccctgggggaccctatctttttgaagattctggctgtggtggttggggcaaagccccttgggcagcttcacagtgtcccccttagggacattttctccacctggtctgtagtgggagtgtagagcctggtgtgtaccagaaattacatgtcttccccgtttgtcaaggaggtgggcagggagcggccagaggtgaggtcagttacttaggcaggcttctgatcaccgggggccactagtgctgtgcagaggagtttatatttgtatccagcaagtgatggtaacagtgagtagtttatttccatactcagttgtcagccttggaccatgaagattgtgtcctataggactttggatcccagggttcagcagagttgattgtatgtattagatactctaaagatttttcaatgagagtatctcactttaattgccagtagcgctaagtaaatgatggcttttaatttctctgccttgcaccttacataacaacctcttgctagaactagatatttttttctttgacagttcggattaaatgcaaagagcttgtcaagaagattgccatctacagaaatcgattggctatccaactgccagagaaaatcctcatctatgagttgtattcagaggacttatcagacatgcattaccgggtaaaggagaagattatcaagaagtttgagtgcaacctcctggtggtgtgtgccaatcacatcatcctgtgccaggtgggcagcagcatgttgaaggagttgggctgaattccatttgtgctccccccccagtgatagggtgcccacctcatggttttaaaactggtcactagaaaacaagtctgttccatcaaactaagtggtgcttattggctttcattttcctggcatctggatgaaccagactctatcagcaagtcatgagccataaactggagaatgtttttttgttttattttattattttttaaaaaatatttttcttgagacagacagggtcttgctctgttgcccaggctggaatgcagtggcacaattatggctcactgcagctttgacctcccaagctcaagcggtcttcctcctgagtagctggcaccacaggcacatgccaccacacccaactaattttttatttttagtagagacgcgaggctgtactttgggaggctaaggcgggaggaatgcttgaacccaggagtttgagacctgtccagcttcctaaagtactgggattataggtgtgagccactgtgtctagccaagaataccttgttctattgcagaacatcttgtcatactgggattagatatactttaatgacttaaaacataaattggtgtacagaatgaagatagtttttattgataagcatatacacataaaatttgtatcaactcagtaattgtcaaggaagttttaattcctgaaagattttttttcatagaaaaatatttctcaagattcttagagagtgtctaagtcaatgccaagagaagtttggaaagactttgagagaaggctagcccagcatcttggaagtagaggtggatttagttttacatagttctgttggaggtgataaaagagaagaattccttaggaatcactgtagtgtaaaatactattaaaatctctcaaaagcctagaactgggctgggtgcagtggctcatgcctgtaaatcccagcactttgggaggccaaggcaggatgattgcttgaggctagtagttcgaaagcagtctagaaaacagagaccccatctccaccaaaaaaaaaaaaaaaaaaaaaaaattatttaattagctgggtgtggtggcgcttgcctgtagtcccagctacttgggaggctgaggcaggagaattgctttagccagaaattggaggcagcagtgagctatgatagcgccactacactccagcctgggtgacagagtgagactctgtctcaaaaacaaataataaataaataatcaaagttagaactccaagcggtttagggttgctacaaattacaggatagatgtggcaagtatgtgtacttttgagtgctgcctctggcctaggctgcctgggtgggggtttgcattgaagatctgaggctgaattgggctccgtggggaagccttgcatggagtcttggattaacgatgccaatcgtggggtctacattgggttagatagatggatactgaatgtgtaggtattttctccccttagggacagaaagatctccttggggaggtctgggggcacttattctgttgaatttccatgcagagctgggtttgcttcctaggagaaacggctgcagtgcctgtccttcagcggagtgaaggagcgggagtggcagatggagtctctcattcgttacatcaaggtgatcggtggccctcctggaagagaaggcctcttagtggggctgaagaatggacaggtgagtgctccctcacgtctcctgtcaggctgataatctgcatgcacacgtgggtgacccgtctagcaatgactctgagctgggttctcagggcaggaaaagggcttctctcctccatgggtgaattgtggggcagcctgagttcagttttttgaggacagcctcaggccaaaggtgctgtggccctcacactcctagcaggcccacgttttggcagagttgagctataacctttggctacatgtagagtgtattagtggcttaaggtctccagaaggtgggagatttgttagagatgttgcttctgtggatttctagagggaggcagagatcgttacctaggtcagctcctgattagggcagcgagtggattaaggcagtgcgttccagcatgtgtcctaaagaatgctgggtcctcaagatactgatagatgtcataagcaaaatgggccctttggccagttagatgtgggatatccaggttacacaaaattctgtgtgtgtgtatacatgtgtacacgtgtgttctttgctcagcataagaaaagttctaagtaggctgctacatggaactttgaaagtgacaatgtagctgcattagcctgacagccaagctgtgcagcagatggcttatggctgaggcttgtcaggtctttgctggggatggaagtcacagggcatgagagcagtgggtgaagtcaagcagcaatgccaaggggaggaagggccgcttatttctcaggcagctctcacttccaatgggagcatggactatggggtcaggtgggccggaggtcgtgttcttacttagctactcactggctttgtcatcctgggcaggtcactttacctctgtgaggctggttttacatgaggataataccacatatttcatagggctgtcaaaaacagatatcatcagggttgggagttaaagccaatgttaaaaacaaaacaaaacaaaaaaaacaccaggggtattaaaacaggcatggtggagggtacctgttttcccagctactcaggaggctgagataggaggatcactttgagcccaggagtttgaggctgcagtgtgatatgattatacctgtgaatagccactgcgatcagcctgggcaacatagcaagaccttatctctaaaaaaaattttttttaaaccagggatatcagtaaatgatagctatcatgatcactatcatcattattataattttctaccacatgtcttgtcagtgttcatagtagctttttcctgtgttagttcgtgactcagatctctgctaggtggcatctcctaaagctgcagtttgggtaatgtcatcaacaaatccccagtccgaacagacactgaagtgagctcggcctgtctcagggctgtcattacttctgcagcctctgatgaacctcgcttctggcctcctaaggataagccattgccccccacccccctctttcttttgatgagtccttttccctgcacagagcttctggtgaaggtggtgggagttgttcttgcagagcacatgggattccaacggcctggcagtgggccaggatcttgttgccatggtgactgacactgttttcgctgaaattttgccagatcctgaagatcttcgtggacaatctctttgctatcgtcctgctgaagcaggccacagctgtgcgctgcttggacatgagtgcctcccgtaagaagctggccgtggtagatgaaaatgacacttgcctggtgtatgacatcgacaccaaggagctgctttttcaggtgaagtccctgagggggcccagggacatcatcctttgattagagactctcctctagcttcccagtccctgcaggaggctctcctgctctggcccaggcaggtctctgggaggggcaggggccaagcacatgcacagagtcccagaggccctgggccacaacctgctcctcccacacaggcacaagccgcagggcctggaccggcctctttaactttggtttccttgccaatggaaaccgaaggctctgagccagcagagcctttcttaagcgtttaccatgaacaagaaatggggcaatgactctgagaggggtgtgacgttggcactcagtgaatggggcgatggatgcacttcctttgcagaagtctgtgtctcacctgctgcaggcctgcctgtgtctatgcgcacctacagcgtgggaaggaaacaggatgttttgtcatctgaaagggggaaggggatgggcaagcctggccttctacttaattcacaagaatgctagaagagccagcagaatgcgaagtgcttggatctttggggttgtaggcgttgttcagtggagtcatccagccctgtggcctgaggaagtgtgtcaccagagaagacagcccggcagctctgtgccccgggcctggttggctttctgctgggctcgcgccattctttctctctttaggtctttgtaggtggtcaggactggttttccagagtgaagttccccccaaagctggagcccctcctgactggtttcctcggccactgcagggtttcctgatgttatgggcagattcagtccccttaccaggctcctccttgttctcagcagcagaatcgatgggggaggggtctggagtggggagcagcctcagtcaattagaaggagttacctggccacctctagcccagaggtaactccatgtcagtctcaactcactcatgtccttgagagagtagaatggtttcggggaaagagagggcatagccttcaagctgacctgggcttgggtcctgcctgcatcccttactgtgtgatcttaagttagtgagcctctctgagccttaattacttttctctaaaatgaaattagtaattgccccttacagaattgctacaggaatacactagatactacagtgcctagctcagtgttgagcacaaaatggggcctgaaatgttacttcccttctccccagcctcacctcccacctatagggggcatagctggccccaaatgtgaatcttgtgtctgagcctagaatcatacaagtgtggaagggcgtctgtgctgccccatccccactgctggctctatggcaggctaggggaggtgattctcagccctgccaggagacatcagcattcccagctgtaacattgcctgctggcttttcctcttctccactgcccctccctctacacataaaacagctatattgattttttctcattataaaaaacaatccatgctgattataaaagatttagtcattataaaagatcctaggcagaaaggtatgagcatatttcaggagaataattttttttcaaaagtaatacttgcttactcaaaaattccaacaacacgcaggtgcatggaggggcttgcctctgttcatttctcttgcctctgttcatttctttgtggtcccctttcatccttttccctccatcccactgtaagcaatttagtgggattcagtctttaagagggtattgggctgaaatgtgtgagcgctgaccaagcccagggtggttctcacaggatccccactgtccctgttccccaggaaccaaacgccaacagtgtagcttggaacacccagtgtgaggacatgctctgcttctcgggaggaggctacctcaacatcaaagccagcaccttccctgtgcaccggcagaagctgcagggctttgtggtcggctacaatggctccaagatcttctgcctccatgtcttctccatttctgccgtggaggtgccgcaggtaactgggggtgcctgtccactcttagcactggcaaggctgacaagaccagggaagctgggccctttgctggtgctttggggagagagtagcaaggagagaagaatggcagctgtgaggtcgtgggaggcagtctgggcctggaacctgccgccctgtctccactccttgcaacctgtgtgactgggggcaaacagctcaacctccctgagtatcagtttcttccttgtcccctttctgtagggatgggaggggtatgcagtgttgtcagcagcgtgtgttttgcagagagcccagcgtggggccgaatggagtgagcagcaaagccgggagtccggcagggtgtgtgtgtgagtacgtgtgtgatggtggtgatgtgtgtgtgagagagaggggagagagagaatgagtgggtggggggtgtgggctgaggtctgtgagccaataagggagcatgggactctgcacaagctctctgaaccaggaggtggccagaacagaaatggggcactgaagggtggagccacagaatgggggagggcagaaccacagacaggcgcctgagattgacctcccgaatgcaggatggtctcccctccaccttctgcaccccaggcagatggtgctcactgtagaattgccataaaacagagacgtgcatagcgagaaactgtagccttcagcatcccatcctcaggacagaatcactcttaaacatgttgaaatacatctgcttagcgcttttctacgtgtatatataatatatgcataatatacaattaggagcatgtggttttataagaacatttttaaacaaaagtggaatcacactgcaaatacttttcatgacttttatgtgtatacgtattgctacctatagatggaacctcagatttactgtattccctgagcctggcctgtaaacaagacttctcatcccttcctttatggctatcttctcatttcacctcacattcggttatggcagccccatcactgtctatgaagtgctggctgtacactagtcatctggccttttcactcaacaatctcctaaagcatcgttctgtgtcagtaaatggtaaatgttcttattctgcatggcaaaatttagggtaattgtagactcacataaattgtaggaaataatacagagatcccttaaaccctttgcctagtttcccccaacggtaacagtgtgcatagctctagagtgatcttcccacccatgttggcatgtgtaatctcccaccacagtcatggcactgaacactgccaccaccacaaggtccctggtgttgtgctttttacagccagcacccctccctcctgcctggtccccacctgccttgtatttacagctgcattttattgtgtcttgtggatgttccacagctttctttaccagtcctactggacatgtttgctgcttatagcttttttgtattattgtaaatagcaggcatctttctagctaggtccttgcacctgtcccaacttggcgccttggcataaattcctagaaatgaaattgctgggtcaaagcacgtgtacctttgaaagacttttagggaaatttccaggtttcccttccgctaggctctgtcagtctgttttccccatacaactcagcttcaggctagagcccacttcttctaagttgatgataccctcgaaactcatgactgcaagacttactggggaaatgcccatcatccatgcctgacacagatcagctattcaagaaatgttagtggaattcagatctgaggaaaaagaccagaaagcaagaggaagaagggaatgaggtgggtggaagtggcagcaggacgaggggcacgaacagcttctcctggactgtgtcctcgtcatccttgtctgccccattacaaacccacgcaccacatccaccaggaactcatctccctcaattgccccaaactagctctgcttattttattaaaaggttttctcccaagattgccatcctgacctcaaaaataaatgcagtttgctgctctctgactgtggccggccaagaggagccagaggggcagcctggggcttcctctgccaggactttaagattcagcagcaaagtcttgctgactgcaccaaggccatcctgctgacgcagcgggtcaggactgccaagggttaggaaacacattctcaagacaaaggctgttcatctgtcgcctctgcctccggccatcctgtggttttggcccagagaggagggagaaagcatcagacccagtcttggaatttttggttgcctttcgaaatttacattgtcttgtgcaagaactggtttgtcagggctgccaagtaggacaacgagccctaggagggcttctcaaggcggtggtgacttcatgtttgaaatccaacagcaagataaagtatagctcagagagtatttgttcagtggggtctatttttaaaactccactcaaattgtgcctcccaagtaagtccaagtgttagccatccatcatatgctcagctgtgatatgcctgcctgagtgcctgtcccactcacggggcagtcagcatggcaagcagttggtgtggttcggggaaggagcaccagctttcagtcctgactctgccatctcaagcagctgtaactagagcaactcatttcactctttggggcctcatttcttttctgtgaaatggggttaattatacccatctttcaggtttcgtcaagccaaatttctattattatttctccttattactgactcataaaatagcaaaaaccacaaaacacaactaaattgcaacaggctgtacttactgacggactttagaaaggaaagctcattgtgtgctttaagaaaagctttcaggagtttgagaaagcttccaggagatggtgaaacttgatctgagccctgagaggtctggaaaggaagagtggagcagggaagcttttcaaacaaagggaaaggtgggggtaggaacaagactggagagcctgggagatggtgaggagctggtgctgagaaaatacagtgaaggtaatgatcatgcctgcattttgcccagtgcttcattatttttggagcacatctctcctttgcccatggtagcctgagctgggcaggacatctaaacagaagttaatggatttacccaaaaagtcaccagcctaggatgtggctgagcctggcctgggttctaggtcacctgctccgtagcctatgcctgctgccccgctaaagggagcatttaatgtgccaatgaggagagatggcatggtggaaaagataagcacttggaagcagccatgttttgctctgagagtagacagactcaaaataaaaaaaattccttcaattctaaagctaaaaaatgggactggaaatttcaaagacagacaaaagccccaaatggagaaaacaatacttcaagctccacatttgggaaccattagcacagaggtcctggctgatttctcttccctgcccaggaagccaggagagatgcaggccactgaagcacactggctggcctaaaacaagggcaaggcctttccttgttaaagatgtcatggcccaactcaagactcattctcaggcctgcacgcacatatgcacatatacacgcgtgcatacatgtggcaggaaggggcacagaacctggagtccagtcacctctggctattgccagctatttgctgggacaggtcatttgtcctctctgagtctcggtctcctgggctgtagccagggagaaataatacctactgcacaggactgtggggacagccaaaagccttttataaacctaagaaagagaagtcgttaggaactattcatgggcactcacagcaaggcaaccccatcttgtaggagggcatctgtccccagggcagggatcaggagagctgtttccagaggcttccagggtaacttggagcaaatcacttacctttcttggactcagtccctggaagaagaggccattccagaccgcttcctcccacgaactcattcattgtgtcagcaaacgtagactggggttctgctgagggaggccgatacaacccaccactgcccacggctgtgcacggctttgctgtgggaacaggcctgtaactgcggcacaacctgcgatctggacaaagggcagaggaagctgagactctttcccctggggtgggggcttgaggggcttgggaggactctgcagaagaggtgacatttcaacagggccttgaaagccaaataggtattttccagaggcagagtggggaggggcaaaggcattccaggtgagggtgacatcctatggcgaggcaggcctgtaggtgggaaggaggggaggatgggcagagagtttgtgctgtggagcacagtagcccagtcatgagagaggtgcaggatggagcacacagggtgggctgggcaggctgggcagggtgctgattggcggctgcagggctgctccccaggcatgggtaatcatcccacgcatctggaggcaggctctgtatgcatctggttctttccatggctctgaaaacagtcttctttttttcccttgatgaaatcctgcagtccgctcccatgtaccagtacctggataggaaactgttcaaggaagcctaccagattgcttgcttgggtgtcacagacactgattggcgtgaactggccatggaagcgctagaaggtttagattttgaaacagcaaagaaggtaagcatctagccagcaggagctggagtttggtccttgtggggtcccttaagaaggcagatggggacccaggtggcacggagaggccatagactgcagcagtctctggagttaggctgacctgggcttgtatcttagccacttcctcactgtgggcctgggtaggtgacaccctttctaagattgcttctctatagacgtaggatgatgacaggccccatcctcacaaagctgtgaggatcaaatgggaggatgcctgtaaagcctgacccaggagcagcatgtcagattctggctgtcactcttattagctgttctctgtgggaagcacctgactagtagcctggcacatcacaggcactccgtaaatggcggcttttattatcggtgtagtcactggccatgatgctgcacacaatgctgcttttcttagcatctgccaactaaggtgggagagatggtcaaggtctctgattctgacagcaatgtgggcacttcccacgtaccttcatggcgggattcatggacttgattcgttgtgtcctttcctggcctagtctatgaaagctagagagatggctgaaaacatctgacccctctctgcacataaggaaaagcccaggtatgttcctgagctgtgtttccatctagaacctcagatggaggaaggaatggcttccaacctccactcccctaccccttccctctttatctccccacagtcaattaatgagctgctcattttgtccatattcccgggctgacattgaaggagtggcaaagagggacgtgatgcccgccttgggttagatcaagacttgtaggcatgaagagaggagactggaccagaccaggactaagaagcctggctgagaacgagctgtgtcacataaggggctctgggacctcaggccagccactttccttggagccccagtcctcccagttctgaaatgggggtggtgagaatgcccgctgcagtcatgaggcttaactgagatgttgtaaaggggaatttaaatcagggatggttgtgcagatgctagccattactaaacaagggaagtgatcgttgtgtaacaatgatctagattatatttttagatgtcctcagtgtaggaaagtggagatggaggaggctgtaagaattcagaggaggggccaggcgcggtggctcacgcctgtaaatcctagcactttgggaggccgaggtgtgcggatcacaaggtcaggagatcgagaccatcctggctaacacggtgaaaccccgtctctactaaaaatacaaaaaattagccgggcatggtggcaggcgcctgtagtcccagctactccggaggctgaggcaggagaatggcgtgaacctgggaggcggagcgtgcagtgagccgagatggtgccactgcactccagcctgggccatagagcaagactctgacttaaaaaaaaaaaaaaaaaagaattcagaggagggaggaggcatctctatggagggagcttccctctcctgccccacccagaaatgccagcagggagggagacgacaaatccctagaatagaaaggattgtaaaaagccacaaggtttaatatgagtgtttactgatatttttataaatatatatatttttatatatttgtttaaatattgagacggggactcactgtgttgcccaggcaggtcttgaactcctgggctcaagcagtcttcttgcctcagcctcccaaagtgctgggattacaggtataaaccaccacacccagccagatttactatagttgaaaagtaagtgtatgtggtatatatctattgtgtacaacatgctgttttgaaaaagccacatgatattgaagataggctggatgttactatttcatctaaatcccgagtaccccacctctttactctgtgccaggcactcaggctcaccagcttggatatagtggttcctagagatggacagccatccccactagatggcagagaagagctgctgagctcccgccagaccctgagcagagctgcaggttcctccctattcccaggcttccctctgctgagctcattcaggggccttgtgactctgaccaggcaccctgacgctgcaaaatgtgtcaggttgaaggaactcggaaacagatttattaatgggcaaatcctagacactagcacagctgagctacagctagaaagacccttgagagggtgtcagtagcaggcccctttccacaaagaagatggttggagcccagaagcagagaagtaggctcagagcgaggactcagacctcgaatgctcctttccctcttggccactgtgctgggctttgcagggttgccctctcaaggcgctttaaggaaacccagatctagagggtgatgtgtaagacctacagcttgggacacaggtagtcttagccctgtgttccttggcccatgtgatgcccgcattgcccttttctacgaattcctcttcacaaacacttgtttgccaggttctgactctgatgcctcccttaacgctgcctcccacccctgctcatgctcagaccattcatccgtgttctccaggcatgtggttcgtagttggagagctcttagctctgggaggtgtcatgatctgtttaattgaccagctttccctgttagaatgtggacctctgaattgtggagggggacaggggccgagacatgtttctccctgggtcctcagtctcttgacaggaagcctggtcctgtgggatgaaaagataaagttgcattgtggtcacctgcaaggcaggccggggacttgctcatctcccgaggtcttttcaggagggaggatgccatgctgctgagcagaggctgcaagtggtcaggattgctctgcgtgttcagttcaaagggctctggagctgctgcctcctctaggcacaggtcagcccattttgaatggggcaataaatggtgacagcaaagccacctgaaagcagcctgacctggtggcttgtgctcctccaaaccctgggcagaatctgaaagcagcaaaactagcttagctaacaccagtctgcttgttcctcagaaacttctagaggtccatgagttaaagtctctggctttactgtgagttcaaggcaagggctgcaattttagggtttacataaagagtttgccttccacagacttggtgggattcattccctacccctccaccttcttccagaatctgtctttataccctctcagctttcccctcctctgctccctctgtggtaccaggggctctgggtcccctgtgtctgtggcaccactgggtaggcatagctgtcccctgcattctacccatgttgccaagatgtataggcagtctctcatcagtccatgcatctcatcctctcctgctgtgatgctgcgtgaccccccagagggtcagaccggcttgttcttctttgggtctagagtctcccaaggaggcaccgccacagactgtggcatcacggttttgttttacctgatctcaaaatgactgatgcaactgggatgtctttgctgttctttacatggtccaatcccatggataaagccatgcctcgctgggtggtataacctcctgcacgcacgatgattaatctgtgcttgctcccttcctctcctctgtggctcactgtctagatagagcttgacttcccacccctagccaatcacccacttttgaagccaagaagacagcttattttattctttatttcttcgccacaggccttcatcagagtacaagacctccgatatttagagctcatcagcagcattgaggtaaaagatgaagcatttttccttctcaagaaggcatacttggggttcctgttttaggggcagcccttctaacaggcaagagccttgaggacatgggaacagagctcactggcgtctgggcatctgggccacagccttgctccgggggcagagtggccacactgggggagacaacagcaggtagtgtgagctgttgtgtgatagctgggtgaggcacatgggttccggatctctccagggttgggtttctagtctgtgaaaagggattggacctacctcacaggctgctgtgaggattcagtaggttctcaggaactggtttgcatcctcctggtggcggatagctggtcaccatcctctcagactccagtaatctgatagtgttggaggagtttcccaaatgcacatgagctgagctccattccccagaaatggacctggggagcaaggcccacagtctgaactgagcgccccagagttctggagcaacccctagccctactgtttctggctgagaatattgaccttgtcatccaaacccaataggcctgcagtgtgctaaggaagctggttgtaggtatgccatttgctgggtggtggtcaacactatgctttttttttcttttttttttttttttttctgaaacaaggtctcactctgttccccaggctcaagcgcagtggcacgatcacagcttactgcagcatagacctcccaggctcaaatgatcctcccacctagcctcccaagtagctgggaccacatgcatgtgccaccccgcctgattaattttttgtatattttttagagcagggttttcccatgttgcccaggctggtttcaaattcgtgggctcaagctattagcccaccttagcctcccaaagtgctagcattatagacttgagctaccatgcccggcccttagacactattcttaatttctgtgtatctcagtgctgtctggctgtctgttaaaaggcatatacattttttctcctgaacatatttattgtgaaggtatgggaatgtgagatacatttgaattcccagttggaaacagtgaggaaatagcaaatgtcttgtccctctcattcatttccccataataaacacctgtcatgggccagcccttgtgccgagctcagtgggcacagagctgaggaggagagaggctgacaggagctcacagcctgctaagcctcataacgtaatctgctctgtgccacatgcgtgatttatgtgaatgctgttctagatcctcacattaactgaatgaggcaggtactgttgctctccctattccatgcaggaggaaattaaggctcagcaagacgatgccacatccccatgggtccatagccaaaaacttggtggaattcaagcccagtctatttcctaagctcatgctctctcggccacataccctccctacccgcgtgttgtaaggggcatctgtatattctggggtttacctacccgcgtggtaaagggcttgttcggagctattgctcaaaatgcccagtgctgctgactttcacttgtaaatccactggcctggatctgggggtcttcacctgaagccaaggagcataattttcctctctacaaaagtaactgctgtggggtccaactattacttgtcacatcttactggggtcaaaatgtagtcctctcctcgtatgctatgagctgggaagtgcgttaaagtaaactcctaagattgtctcttgaaaaaaagtaaagtgcctttgagtgtgctctatatcgactgcctgcagacttatttgcacacatctgggtgctcagcataattccagagaactgcagatccttagtgggtgccttttggataggggagatgttcttgtcctgctgacggggggaaagaacctgcccatgttgacatgcacctgctgagtgccatagatcgtttttattggtcatggtgatatcctggggcctagaatggatatggcctgaatttcatgtctagtaaaaccttttttgtttgtttgtttgttttttttttgcagagatagagtctggctatattgaccaggctggcctacaactcctgggctcaagtgatcctcctcttttgacctcccaaagtgtagggatcacaggtgtaagccaccatgtccagccaaaatcaatcttttatctcacggcaagatttcaattcatttccaactattaggagttagtttgtttgatgagcctgagctgtgtgcaggtttttagaatgataatttctgtcagtatggaagcatgttgcctccagctgttaaaactttcaccagcttgtctaagagtttgattcaatgtcttatcgtcctccaatatgctgctctttctagaaaacaagcaaaaggaaactgctagggctcagggtttgggtgctactgagtgtttacaaatactcgagctgtagacaagcgaatgttccctgacacagaaggaagaagctttatcctagctgtgctaagtgtgtgtgtgtgtgtgtgtgtgttgttggggacatcacttgcttcaaaagactacattgtgtgatacaaggaatatctggagtcagacagaactgcgtccaaattccagctctgtctgaccctgacctgttcctcttcttgagtctcagcgtccttcactctaacacttgggtagtgagacctaccctgagggtcactgagaggaataaaggggccatgtgtgtataaagtatatacccagaacctagtggatgttcagcatgcgggatttcttaccttctctttagaagtagggatatcgtaagacttgtcatcctattttattggtctccctcttgggcagaaaccctaaacattctcctgctctgtcatccccatgagccacaactctgccaaacggggcctgcggatttgggagatcttgggagcttaggggtcatggatgagtcagagcacacactattcaaactattccgtcatagccttggaatacacaggaaagcaaccctgaggaatttccattaaacaaacaaaggtttgcatctttttttgatctttgcttgtctggtaaaagcctgcttttgttgtcaagccttcccagcgggaacctaggggagagagacaacagccaggagccaagcccaggttccagtaggaaggcccaggggcctcacttgaaatagccacatctaacctttgtaaaggctgcttcctgcccatggctgcagaggccatttcctttgcttctaatttttccaggagaggaagaagcggggagagaccaacaatgacctgtttctggcagatgtgttttcctaccaggggaagttccatgaggccgccaaactgtacaagaggagtgggcacgagaacctcgcgcttgaaatgtacaccgacctctgcatgtttgagtatgccaaggtaacctaccctgtcccaggcccaagctccagcttggagcccactggtattctcacgtgcggtgtccaagttattttccccaagagtgctgcggacaaaaactagcaatggtctcagaaaggatgtggggaaactggtaaacaaaggacccatctacagccactggttgaaactcacctaaaactgacctttaaggctgacaccaagggggcagactatggcagttcagaccttcatcagtgacagggctggatggctgtgggtctacaccagcacaatcccttcattgagttgagggctcagggcttcagggctgtcccccacaaatcctctcaatccttgtcaggagccgccaagaatcggtgtcttcaggcaggagccggtcctgccgatcatgcaggacgacatggtgcctgccagccaagtttcccatagcacctgctgattgtcctggacttctcactgggcttctgggaagtcaggcagagcctccgccctcccatgttagcgcagcatgcctcacgcctgccggctgcagagtggctaccatgtggttgcagtgggtgatggcagagattcccttttgcattgggacggcccccatgaaccttactccccagcagagctgggccttttaaggcaggtgtaggagaggagcttcctggaccaggctcctgatggcttctgtgggaaggagttgcactaaggagcccagagcagtcaagacatttgcagttcagtctaagcaaggttcaaagaggcttcggtacactgggcaatgagggtcttccttccatcaaggggctttgttaacctgccttttctggaagtgtcaaaagtggctctcagtatgttatgaagtgactcatcagccataacctattggtgggctactaatggtagttctccagctcacaagttcaagatggaaaatcttccccacttttttctgcttttctattcctgaagatggctgtgctcttccaccacctgttcgaccctggggctgaaggtgtgtttggtggcctgtgatgttgcccaggacctattgttcatcaggacttggacgagctcctgggccccagcctgtcttttcaccttagtgatttcttcactccgtacctgagacccagggtgttcaggctccctctactttttcctcgtcacctttcctaccctccctcaggccccaccaaagacacctagaagatttcataacacattcatactgagatcaccagagtcagtgcatctctgcttccggggataacaaaattttaactcaggatgaacccttaagggatcaagaccctagaggtagaatttagggttgggaacccctgaggcctcctcaaggaggcagctgtgctgcagtagaaaatgcctgaccaggctgggcatggtggctcaaacctgtaatactagcactttgggaggctgaagtgggtggattgcttgagctcaggaggtcgagaccagcctgggcaatatggtgaaaccctctctctaccaaaaatgcaaaaaattagctggtgcctgtagtcccagctactgggaggctaaggtggaaagattgcttgagccccagaggtggaagttgcagtgagccaagatcacgccactgcattccagcctgggtgacagagcaagacccatgtcaaaaaaaaataataaaatgcctggccttggtgccccagagctggtgtgagtgcagtttctttctgtgggatgacctggggaaaggctcttcggtttgccaaacctcccttcccttctcagatggtaatagcgacagctcagtttagtcatgagatttgcacagaataatgtataggaaagcgcattagaaatgccaacctgtagaaagattaggaagatgagaggggccacacgtgaccacagagtggattttcatacctctctccctggctggccccactcctgcccctgctctgaggcccctccttacactgtggtggacttcgtgtgcccacagcctcccaccagaactgcagcccatttacacactccatttgctccgtctctctatgaaggtaaatactctgggacttgtttttggttttagtttttgatcactattccaaggaggttggttccttttcaatcccccctgcccccacctggtagtctgaatttgagaaatatgtacctacacattatgtggggggtgggggagatctagtcctgattaacgtggcatatttttgtttacttgaaaattgcttcccaagattcaatctggttttcagaaaattttaaaattacattcccacgtacaaataaattgtatgctttctggataagtgacatgtttatatggtgataaagggaattataatgctcttaactcttatgtagtatgttcttatcaaaatcaccaagcatgagaacactgtttagtctcattcatcactcagcacagcctctttctgtccacttcagggccaagtctttgccatggccccagataatgtgtaacttagcttcaggaaagcaaaaagcctttgaatttccagtttgctgagccttgaaggaagcttttagacccagcttcaatgaagtcacagctccctgagtgaccagctggcctaggcttatggctccctctcagcctctcacccttgccgtggtcacccctggtcccctgagcactcactgaagtccctttgaaggacatttctagtctcctaagatgcctgttttcctccagctgccaccctcatttcaccagccaggtaggcagggtttccagcttcgtgctggcatagagaatccgcgccatagcagctgccagaaggaaaggtgtgtctgtaaaggcccaaactaggcggggacagcggctgctttccaagccccttccctttgtcagctccagggagaaccaaaggccagccagggggcctgtcttctattgggtcccagcatcagggtatacaatgcgctttcctccccttcttaaaatgtatcatatattaggccgacctaatactctgaaagcacatttaccctgaaagcaaatgagggaaaaaagcgagctaattgttcaagtggatttttagcatacattgactgtacttttctgacacatgagtgttaatcatggggaaaggagtgctttttttgttctcagtgaggctgacacaaagtactctccacagggtacattattcctgagacaaaccacttcttaccagtaacatagacctgggctgtaagtgctcccagtttccctttttgaaaagctccacctttaaaagctgcctcaattctggcaaactcccacgtgtgtattttgggtaactactctgaaaagaggtggtgttctgaggctgtttctcacacattgtagggccagcccagagaagctgggcataccacttcagaggtatgctgaggccgaaggaacacaggccctaggcctgatctctgagcctccaggaccacagccatctcttccttctcaggtcctctcctgagcaccttccctgcctcagattcccccatggcctcctgctgtcccactgtcggatcaggttctcacccctgcagacctgacctcagcacaggatccctaaccattcagctgagaagcaactaaccagagagatgtttgcttgttatctgttccaggaaagtaactggggcaaagacaatgtgatgattctctagttcagggcacagaatgtttgctggtgactcagagagggcatggagggcacggagggccggcaaacactgtaagtcattttgtttgtgtaagtttaggggaacccatgctcagcctcactctgaagcatgtggtatcacccatatgatctgaataagatgacaggtctcgatatgtggaattgtgcaccaggttgtctcattgctgtttaggaacagtcctgtattgaccaaactatgtgagagagagacagcctgatcatgaacccccgaccctgcagacttcatgtgcagtgccccaaatagtctagaaagtgttgtttagccgatgaacaaatgcccatttgtgagacgggaaggaagcactgggggccagcgtccctgatgctgtcccaggatcccccaggaacacctgcagggcagcctgagatcactcttcccgagacctgggactcccccaactcagcccctcagggccgggccctgcctacctcctggttgcctgcttcagccatgtggagcccgcccttgctgctagaaaagcctgatgtaacgctggcacaggaagttctgatccagagtgtttttgtttgttgtgcttcctcaggatttccttggatctggagaccccaaagaaacaaagatgctaatcaccaaacaggctgactgggccagaaatatcaaggagcccaaagccgccgtggagatgtacatctcagcaggagagcacgtcaaggccatcgagatctgtggtgaccatggctgggttgacatgtaggttttggtccctgccccgagaagcatttggcagcatgtcatcacatgtcacctcttgactgacaagggaaccaatagtgcttttctaattatctaaagctaatgtgatagtggctaggttcttcaggagacacagagattgcacaaggcagtggctgccttccaggagcttgtggagtcactaggggaagggatggtggggaccagggaagaggagacaccgggacatcacagctgccatttgctgagcgctcactacaacccagacgctgtgataaccttccaggcattaggttttccacctatgccatcagggctggtgtctcctcgcccaccttgcagatgatgaaacagaagctaaagggacaagttattcccaaagtccagatagctggaaagttgtagagctgagctttagcctctgatctgctggatgtcgatgccaactacgcgtgtaatggtaggaacaaaaacaaaacaagttccaaatccatcagggaagaattcttatgggaggaaccatggatatcttctcttaggagacactctttccatgaagggaccttaaagaattccaagaggtaaatagagatggcgggaaaggatatgcaggcaggaagtacagcagaaacacagcgagttggctctggttggaataaaagacgtgtgggaatgggagggtgaaggacatgggctgtgggttgggggaagtgggctggccacactggaagggcctccgatgccaaacggaggtgcttagatttgccaatagtgagtgaccacctacagtcagacaccccctcaggcaggcaggtagaatggagaccagataactggctagtgcagtagagcaggagggaacttggtagctgagggcatgagagagaagtagcagtgttagaaccaagtggcccatcccagggtgttggggcagtggtgagtgtcaggctggctttgctctgtggctgctggtgggttacaccattcgtcaaggtggacaacagggagaggagggggttggggtggggcagcactgagacaggatggattcagccttgggactcagcacaccggaccttgagggggaaggctttgtcctcccagtcagtgagcttcaggctcaagcatgtgcacacacacgtgcacatgctgctgcggtaggcaaaggacacgatgggacaagctcctgagggtggctcaggctgggtcctaaaggctgttgattcttctggaaacaacgttgtggtctacaggtagcagtggcccagccaggatttggggatatggaagaggctggttaatgattaaattgtttccttgggtgctgccatatattaataattggtgtgtgggcccctcacaaagggaccttgatggatgtcctaccaccccatctttttcttgtccgatagtaatttttttaaagacagaggcacagattttgttccccacattattctttaaatgaaggggttcatatagaagagagccaggcagatttagggtgctctgttctctcttctggtttttcttgtcactttcatttgtaagtgctatagtatcaggttaccctgagggtacttgagtaattcaagaaacacattaagcatgttctgcttgctttccagatgtggctataaaaggtgtctttcctccagggacgttgggtgtgatgggtgggaaggtttctaaggctgtaagggctgtctatgccacctttccctaaaaacgtgtcctttttctgctgagcagtgttatttttagatgccattattattctaagtgtagactgacaggcctccgtgccttgcctgtctccagacagggattcgttacagctgcttctccttcctttctcaccaagactagcctgggtagaaccctttctcctgggagagttagtttgactccaaattccagcctgaccagagagaacaagcgcattctatccaggcctcatgtccccatgagtgatgggagggctgctcaccatggggaagcagtggtgagccagtgggtccctgcagctcctccctctttggtcagcacgttggccaggaggacagggaagacttcctgcaggcctttgtccagagctcagagcaggccccacactcacctcttcctttagagggcagtcattgaggtattcttatgccttggcatccacttttccgtgagaattcctgcacccgtggtggaaagagtgctgggcccagtcttgggctgggtgcttcaccttccccacagactttattcttctcatctgagagatggaaataatcatgcccacctcttagggtggtgaagattctgatttcacgcatgggaaagctcatggcgtcatctgggtacctggtaggggattaggagataattgtttctataccctgctggatagctcagtgacttccgagaaagacacacaaggtggctgacaggatcctgtaaaggccacctctcccagatcctggtgatgtttctggagtgtgtattcatgcatttaataactacccactgagcaactcccatgggccatggcatagtatcaacactggggaccacagaatgaatggacatacggcttgccgttgacaagacccagagcccaccctcctacctgccccttccctctccaggttgatcgacatcgcccgcaaactggacaaggctgagcgcgagcccctgctgctgtgcgctacctacctcaagaagctggacagccctggctatgctgctgagacctacctgaagatgggtgacctcaagtccctggtgcagctgcacgtggagacccagcgctgggatgaggtgaggggaaagcaggcctcatgggctggggccccacctgagccctgggacacaggcgggtgggtacaggggccctttggggttcagatggagagaagctgccctcgtgatggaaggaacattgggctggcagtcaggtaacttaacctcgaattctctgagccacagaatcgtggagggcctttccacttgtcccttcattcagtcattgagaaaatcgttactgacagccagctctgccagggtggtgacaggcaccggggatgttagtgtgaacacgacagctccagtgcctgctgttgggctgagctgcctctgaccagcaccacaggctcagacacatggctgatgtggagatgcacctgcgtgacatttaaaacctgctgggtagcattttggcagaaagcaccatctgtgctttccagatccagactgtgagagccatttcaggggccagttttttccctcccttctctgcccccaccccacaaccactacttctctctggtgtcaggggctgtaaagaattagccaggtcagcgagaaaggtggccagcctcaggctggcagaagcagctgatgctgccccttctatggctcaacccccaccctccagctcactggctccctgttccctgcagagaaatccatccccgagaggattaggagctgtgccaagatcctcccccgactcacccacccacccatcatggtccattttagagtgaaagcaaagccttcactgagaggagccgtctgactgttgtctgctctctgaacagctccattggtgaggtgatgaggtcagtcatgagaaaaggtggggctagggacagaggcaatggtggcttctcaagagaaatttattagatttcccaagcagcatagattagagcatcttagaatgactcagacctcgctgtgcatcaggcagactttctcaccatggctcatgtccggttctcctggcctgacaggtggttctggggcttaggtgagaagcagtcagtgggtccatacagcacgaagcccacagtcatctttgacaactgataagaagtggtgatgatgataatgtcaattctgtttccttaggtgtcgcccgcaattaaaagaaatctgtttgcagcactacaggagcccacgcaaaccctcaaaataaaatgtttccgattctgtgccgcttctgtggtccagaaacagactgtgttgttactgaatccagtcgcttgcatattgctgttaattgccttttgttttcgaagagctgatttgtttttgcatttctgtgggtagttttttgggggaggcactctccccctctgagttgtcaggctggcaaaatatgatgtccctaatggattcagccaagtacagtgttttcatgggggctgcaggggcagctttattaagacttcatttgctccttcccccaggcctttgctttgggtgagaagcatcctgagtttaaggatgacatctacatgccgtatgctcagtggctagcagagaacgatcgctttgaggaagcccagaaaggtaggcaacacagactgtcaccttctagaaggagcaggagaagttactgccaagacatacatttcaggaaggctaccaagcccttcccatctgtagatcccaagatagatgacttcatcctggggatgtgattgtttggtggtgaaagactgtggagcatggaaagaccattggccttggagtcacaccctcctgggccacactcacttgccacaggcccttaagaggtgctgcctcctctccaagcctctgtggttactgagcaaagtgctgtgcactgcagtgtatcttcccgtttaatcctcgcaacagccctatggtatagctaccatcattatgattcccattttgcagatgagaaaactgaagggtaaagaggtgaagaaatttgcctgaagtttcatagctaggaagtggcagggaggtaatgtgagccagggtaccatgaggacaataagggaggattgccacacagtgtgaggcatggtctctactgagaatagaaactcagcttctatttctggctcagataaacgggtgacttctgctcctcaagaattctgttggtaaaatgggctgcacacagcgtacaacagcatctgaaataggagttaaagcaagtatagaactttcgctgatgttattaatcatattttttaaagttgacttccctctctgtgtcaggccctggctgagcacttaacctatgtaaccttgaatcttgccaacagctgtgcaaggacgaagaggctaaatgtgccatgccaagtcacaaatctagtcagcagcagagccagaattggaccagtacctctctgactggggaacctgatttttctgttttgctgcctatttagccttctaatggaagttgggtgtttgatgttccatagcatctgatttacgcttctatatggtaaccgttgccctctctggacacattgcagaacaaatgtctccctgttggagcccctcaaccgaaagccctcattgaaggttagcgcattctctgctgcttcagcatttccagagcacccagttgctgaagtatctgcatgtttgggcaaaacacatcaacctatccatctgtctgtgtctgcccttccaagaatccatcaccatagtaacttggtactcagacaagaggttgtagatgagaacggaacaaaggccagaccttctccttctctgaaggcggaggattaggatcatttgagtgctctcatatggcaagtgtcatggctacaagtgcttcactggcagccaccaacatctcaaggggctggccacgtagtaggtactcagaaaatatctgttaaacagtataggaacgattgagagtttttttgcttgttttcacaaatggttgtgataactgaggcagatccttcaaagtggtcattgaaaagcagtcatttgaagacaaactgaggacttgagttgggcttggttctgggaccttgggtgtgacactttacctccattttgcaaagcccatttcattgctcataaaaagggggataattttccttcttcataagtctgtggtgaggatccagtgaggtgattagcaacaaaagcattttacctccaagtgcagtaaagtggcaggtcctgtttctatcaccttaggagtcacaaaactttgccctggaatgagcagggggcagaacctcactgaagatgagcaagtttcactcttagactttgccctggaatttggcccctccagtttttcctttctgcatgcttttcaaagtcagtcgccttttcccagccaaaaaggaatttatctcactgtactttttccaggatgtagccttggttatttagagaagcgccatcccagcaacgaagcactgcagatgctccaatgagtgtcctacttccaaagcagccctgtgcaagccccacagagctccatcctgcctcctgtgtgacttcctaaatagcatgtgcttttttcctccctccaccactcctacagcgttccacaaggctgggcgacagagagaagcggtccaggtgctggagcagctcacaaacaatgccgtggcggagagcaggtttaatgatgctgcctattattactggatgctgtccatgcagtgcctcgatatagctcaaggtgtgtaaacatcagccagaccactgttttcccaagccccactctgacaccaagataaacatcagaagagctgggacattttaattaaagccctgggcttgtttattgggtgtattgtccataagcctgccttgcagtggcgtaatctggtgtatcatctttttccagtttgcccatcagaatggtatgaggaccgtcctggggttatggttggcaggtccagccctgcattgctaattcagagcatatctctcccctgctacctgggagcccatagctggacctgggtgagcactgggttttaaatttttttaattaaatgagaagatgaacgagagatggctttacagtaacacactccagattcttactcatcccagccaggaaaacagtttcaatattgctttctttcacaagacttcccatgatgtactgaaggagtagtggaagtggaagagacaaggagatgttcttctccactggacaaggccacatgcaggggtgggaaaaacactggcatggaagctgcaggtgacttgtagcaagtcacaatccttcctgagctctgcatgcccatctgtcctgtgggagtcccttgtcctggtccctttggttgctgggagcctcacagagtcatgcttacagtttgaaaattgtcaagcctaggtgtaaggtcgcatttttctgtttgggccagtgccttatgcttctgataggagcagcagagggaagaggcataagatgagcatgaatacagttggtgtctgcctgcctttgtcccagcaggctcttccgacacatcttgggtcttgctgcagctgtcgctcccccaggggaataatctgggagggtgcagtgagagatctggaaaaaatatcctcaaactccctggccttatgccctgtccacctaagaattcaccatcctggagtggccctactcctaagcagagtggctttcccctcactacactttgtccctcaccctggcacagacactgtgtggtgggagaactgatgctgggaaaagtactgttgcctggcccctcctcctggggccagttggcagccacagacactgtttgacacgtttcccctcccacccgctgcacacagcagatcctgcccagaaggacacaatgcttggcaagttctaccacttccagcgtttggcagagctgtaccatggttaccatgccatccatcgccacacggtaaggtggctgggtcaccagcacctgagggtaccatctcctgagctaggggtcccgggcatatctaaagagcagcagactggatggaatgtaacccactggtcacagtgaactgctgaggaatcttggtctcctctgggaagaaaaagtttgagtttctttgattgactgtttgtctgccatgcatcaagcagtgggctcctgaattgtgatccagagctggaatgggccttgctagttcctcagtgcaggctttgatgactcagggaaactctgcattaaccagcaagaggggtgggagttccatgaggccctctccttcagtagggcgaaggcccagattaaccaaaggctcgagatccctccctggccctgtcagtgatttgtgtgttcttcagcaattcactttccctctctgtccctcagtttccttctctgtgaaactagagtgttggcttggtctccagaaacccaagtagttctttttagtcactccctgattcctttgagaaagccattttaaatctctctggtggcaatggggaacaggtgatgggttgtcaacagcctcttcatccactgtatctcctcaatcacccaacagatgttgagcacttagtacctagtaggcaatgtactgagggcttcattgtatcaagtcatttcctcctttcaaccacactttgagggaaggactgtcacccccatgttacagatgagaatgaagccctagacagagaggtctcagaggttattaggttggtgcaaaagtaattgcggtttcagactgaattttaaatcattataactaggctcaaacacatctttattaattaaaataggaaccattatgatcaacacatttttgccaatgagaaataagtctgtttatttctgtagcataaaaatccatactttgggatttgacgaactcttggaaagcattttctgcatcctgctggttgtggaagcattttccctgcaaaaagttgttgagatggttgaagaagtggtagttggttagcaagaggtcaggtgaatattgcgatgaggcaaaattttgaagtattggttgtgtgatgtgcagtcaggtgggtggagaagaattgggccctttctgtgaaccagtgccagctgcaggtgttgcagttttcggtgcatctcctcgatttgctgagcatacttctcaaatgtaatcatttcaccaggatcagacaactgtagtggatcagaccagcagcagaccaccaaacagtgatcatgacctttttttggtgcaagtttggctttgggaactgctttggagctttttctcagtccagccgtggagctggtcatcacggttgtcatgtaaagtccactttttgtcacacctcacatctgattgagaaatgttttgttgttgttgcatagaataagaaaagacaacacttcaaaacgactatattttcattttctatcagctcatgaggcacccacttatcaagctttttcaccttcccaatttgcttcaaatgccaaacaaccgtagaatggttgacattgagttcttcggcaacttctcctgtagttgtgagaggatcagcttcgatgattgctctcggttgttgtcaacttccagtggccggccactatgctcctcatcttcaagcctctcatctcctttgcaaaacttcttgaaccaccactgcactgtatgtttgttagcagttcctgggccaaatgcgttgtcgatgttacgagttgtctctgttgctttatgacccattttgaactcaaataagaaaactgcttgaatttgttttttgtctaacatcatttgcatagtctaaaataaacagtaagtaataactcattagcaaaaaaacataaagcgagaaatgcccgttgaaatgatgtataacataaccacatttaagaatgtattctactatcaaacagcaaattccagagccaatatgtgagtctcagtagtctggcactggagcctgtgttcctagcctttccctccctgtctccttttagagaaagcaggctagtatgttggtttagtgggtaaactcgagagtcctcacacacaaatgacactgtgttacttatcttctctggccttcagcttctttctctataaaatagggataacagcactatgtacttgatgggattgttttgaggattagacgagttaatattggaagagtacctagcacagagtgaccctaggtggcagctatccttactgctgctccaggcaaggcttcacgccagctttccctgacctgctccctccagctgggcatctagcatttctcttttttcagagatgaggtctctgtcgcccaaggtggagtgcagtgtcatgatcatagctcatggcagcctcaaactgctggactcaagtgatcctcctgcctgagcctcccagagcactgggattacaggcatgagccaccacgcccagccttcccgccgttctttgacctctcaaatgccctgccttccaccttgggcatttctttccctctaatctgtgctgacttctcagcacattttttgcctcttgggaaagtctggcaagaaggactcctgacaggctctgtgcatgccgtcagtctagtgttacatctcttcccacagcagggtcagtggtctcaagggacctcatcttcccttacagtctttggctttcctgaaacgagaccccctcagggtccctcatctttatcaggtgctcacctggagagaaaccaccacaaaaggagcccagactcaacttaggctggaagtcagggcccagctcagcctcactttgcccaagccactccagagcctggctctcagctccttccctcagacttttctctcgctgctccctgtcctcttcctcacctggggcatggggctgagggctcctgtctctaacagctgagctctgctccaggacctacatgggactaggagctaaggggcctcagaccagctggggccctggctcttatcccagctgaatcttattaattgggccattccttcattcaataaatgcctactacgtgacagaccctgtgatgagacctggtgacacggtggtgaacaaaacgttgtccctgcagtcagtcccagtctagcaaacaggacaatccctcaggggaaacgtttagaggcctgtgaagagacttcctggaggaggtgtcctctcagccagaaggagggagagaataaaaatggggcaagtgaagtggaggaggattaggaagggtgtttgtggcaaaggtcacagcctgtgcaaaggcctggaggtgagtggtagtttgtggttcagcatccagggcccagcagagcagcactgattcagggcaagactggaaagggaagttcaggtccttcctggatacatggcatctttcccagaggaaaggactcccctgctacctattctctctgggacgttacttagcttccctacctagtgcagtagaaccacaggcagagttcatcttgttcttaccctggaaaggatgtggtctcaggttttcttgggttcttggagctaacaaaaggtatagaaatttacgtgtgaactaaatagaaaatgctaagctctgaactgaagaagtgtagagcaaagtgagtcctcaggagttcagaccaattaggggttaagctttggtggctcagtgatgagtagggcctcacaagacccttcttaagtgctcacaagaaagaggagttactggcctgctgtaatcctcaccatctaaagctttattagaaatgggcaatctcagtttatatacagtgtgccagatgccttcaaaataaggtattcttaaccttttgtagaccctcacacagaaaattccttatttgtctgctgagcttctggcagcctctaggtacgaagaccaatcactaatctgtgctaactgcctcctgttagtgcctatgccaggagccagggaaatgggtcagcagttgaggaactccgcatgtgtgctcgtttggtggcacatcagtcaagctgctgttggaaagcacagaagaggcatgtgggttcatgctggagagggctaaatgcctctgttgaaagacaggcttatatgaatcagtggttatgtcctaagctgcatagaaggtcttctcttttagagctaattggagacaacttgagtagttcagagaaatggaataattaccaactccagaggcagtacagcttggaagaaagacattcttgggctttggaatcagacctgggtttgaacagcagctcagctctgttctagttggtgacttgggcaaatcatctatctaggtgtcggtttcctcatcagtactgtgaggataaaaatgcataccacaaggttattatgttaaagaccagatgagacagtggctatatggcgctcagcacacagtaggagtaggtgctcaataatcagagccgctcttgttgatgtcactcagaattattggtgtctgccttttggcctggcccagcagcagctcttgaagaactcaatccctgtttgcttttctctcactgcaggaagatccgttcagtgtccatcgtcctgaaactcttttcaacatctccaggttcctgctgcacagcctgcccaaggacaccccctcgggcatctctaaagtgtatcctttctcttatccctcctccgtcccaccaccgttcttgtctaatggccccaagaaattccttccagagcactttcctggcagaaccttcctctctcagcaaccctcagggaagacagagaactcaccctcccgctgctgtttggctatagaggctcagcagggaggcccaggggcccaggccaagagaagatgagttttcagggctctctgagctgaacccagcagtgggtctctggccaacacactgtcccaatccctcctagaacccacagatgagggtgtgactgaaatggaagaagcaccaggccttcaggcttggaaccttgggcacttctccagactggggaggagggagtgtttgttcagcccaggtatacatagcaccttctgtgccccaagccctgggccaggcaccaggtggcaaagctgccatcaaagagggaggtcacaagttagggtctggtttggtggatgtgtgctgtgtctgagggtggaatgaagctgaggtcagggccatggtcagggaagtttacctggaggaggagatgtccatcatgcaagctgaggcagccagggaagatggccaagtggatgttccaggggaggacccagcatatggagaggcaagcaaggcatgtgggagagggtgaggggaccctgggtgggaggggccggagaggcagcaggacccaaggcctgagagcctacctttgggttttcctctcttctgtagccatcgagggccacagtggtaccataagcagagcaggtgcctgaagggcctgtgcagccagatactggatcattaccaggcaatgatccagatttttaaggtcttggatgtcaggagacataattgtccctgttcttttctaaatctcactgtactctcagctccttcccagccgcagccccaccttccctctgtaaggaaaacccactccactggagaagacccagagctccttgttgtaagaattggcctcgctagaggattccaggcccattatgtacatttcaggggaaataccctcaaatcaaggggtgccttcctggagtcagacctctgctgcatgcgtctccgtctttccccgtaggagcagtcagggctatgcctgtgggggctgagcacctgtactcatcctttccagcaagttctgtttgagtcaacagcttgatagaacctctaccctgagccttaccctgtgccatcccctggggacctggaaatggctcctgacagtccctgactttgaggagtcatgctggagacacagaaggaaactctccacagaactgctgaagtggacggggctgcactgcagacggcgggagcaggaacactgggagagatgcgggaggaagggcaggagggcctgggggcagccaacatcggaggtgacctgagaggagagcacaaaggctcgtcagcctctggctgaggagcttcaagggggccccagagcacaggctgccgctcagaaactgcccaccaggccctcggggaagggtgtgcagacagagtggggtacacccaggggcctcagagcagggttgagggtggctccccagggagtctggaccaggccccacctggcagggtgagagcagagtgccctttgtgccaggcatcctaggagggcctggctggcaggtttggtgaggcaggaagagccattttggcctagtcagggtataagatgagccatcagcaggcccagagatgctaagcaaggttaaagtattaatggaaactacgctgtttttatctttggaaaaattcctgggccttgccatccgagaagtacactcacctctcacaagcgcacagagccttcctcacggtctttcctctgccttcccggcaccagcacaagctgtgttccagcctggggctcactccaaggacaggcagtgccagctcctgggcctggtgttgcccctgctgtccttaaccctgttcacggcaggaaaatactcttcaccttggccaagcagagcaaggccctcggtgcctacaggctggcccggcacgcctatgacaagctgcgtggcctgtacatccctgccagattccaaaagtccattgagctgggtaccctgaccatccgcgccaagcccttccacgacagtgaggtgaggatgcagcacccttgggcaggtggcttctcctctcccttgaggccatctcatgccttcttgcctggcctgggttccgtttgaagagagacagctgcagctccctctaggctctgtgccccctgctcaagcctggccatgccagctcccctgtgcttccctgtccacctcctgttctccccgcagtccacctggcgcccgctcacagcccccggccccggcctcagccctcagcctggcctcccttgctccttgccctcccctaggcaagccccacacctctgtgcccaggtggctctgcctttaccccaggcctggccccagagctgactcttactctagaaacctctgccctttctggaaccaggctgtagttctccagcaaatctaccccacactcccaacccacattccttcaacccagccagcttccttctttcacacatcctccctcaagctcagagcaaggacttggttcagacagacctgggttcacatcccggctccaccctctcctagctctgtctccatctttctgcaccttgggttccccctttcccacaggtagttgtgaggctaaatgagccagtatagtccacgtgctccgcacggtgcccggagcatggtaaatggctggctaatggtggcagcggccactgtcattcctgccaggggaaaagtgccgttgagcgctgcctgtgcaggtgtcttgggcacggggacccaagtgacagggcttgggtatttcggcaggcctttatcctgcttccccatggcatggagctcctgggcccggcgccccttccctgcctgcccacccgggtggcctttcctcttggcagccaggccccaggggcctgaagccagagtccagggggaggaggacacgtgcctgccccggcccctcgggagtccgtggctgttttgtaggagttggtgcccttgtgctaccgctgctccaccaacaacccgctgctcaacaacctgggcaacgtctgcatcaactgccgccagcccttcatcttctccgcctcttcctacggtgagtccctgcatcctgagcatgtgggtgggacagcctgtggacagccaggctcactccactgctctctggcctcaggacgttgggcaagggccaaaggcctctgaatgtccctgtttatgaaatgaggacactctgacgcccacctacctgacacaaggagtcactgtcggtgttcccagagataggacccactgctgcccaaagctgaagcacccactctgggaacctggcgcagggctttacataaccaaatgccccagaaagagagtccgatggctttgcattcagaccaggaggctgagataggttatcaaggcccagctcctttgatgttgacagaggatcagaagccccttcccaggagctgagcagaggccacacacacacacagacacacacgcacacacagactgcccctgcacacacacacatacagaaactgcccctgcacacacacacacagactgtccctgaacacacacacagactgctcctgcacacacacacacagactgcccctgcacacacagagactgcccctgcacacacacacagagaccgcccctgcacacacacacacagaaaccgcccctgcacacacacggagactgcctctgcacacacacacagactgcccctgcgtgcacacacagactgcccctacacacacacagattgctcctgcacacacacacacacacacacagagactgcccctgcacacacacagagactgcccctgcacacacacacagagactgcccctgcacacacacacagagactgctcctgcacacacatacagagactgcccctgcacacacacacagactgcccctgcccacacacacagagaccgcccctgcacacacacatggagactgcccctgcacacacacatggagactgcccctgcgtgcacacacagagactgcccctgcacacacacagattgctcctgcacacacacacacacagagagactgcccctgcacacacacagagactgcccctgcacacacacacacacacggagactgcccctacacacacacacagaaactgcccctgcacacacacagattgctcctgcacacacacacacacacacacacacacacacagagagactgcccctgcacacacacacacagactgcccctgcacacagacacacagagaccgctcctgcacacacacagagactgcccctgcacacacacacagagactgcccctgcacacacacacacacagaggctgcccctgcacacacacagaccgctcctgcacacagacacacagagaccgctcctgcacacacacggagactgcccctgcacacacacagagactgcccctacacacacacacacagactgcccctgcacacacacacacacagaaactgcccctgcacacacacagattgctcctgcacacacacacacacacacacagactgcccctgcacacacacacagagactgcccctgcacacagacacacagagaccgctcctgcacacacacatggagactgcccctgcacacacacggagactgcctctgcacacacacagagactgcccctacacacacacacagactgcccctgcacacacacacacacagaaactgcccctgcacacacacacattgctcctgcacacacacacacacacacacacacacacacacagagactgctcctgcacacacatacagagactgcccctgctgcctcttcttgcttttggtgaagctgccagtgggttgagaagcaactctgtggtcaccccacctgcctggcggcaagtcctttgcaaggcctccagccccctcagccctttctctatgccctccagacgtgctacacctggttgagttctacctggaggaagggatcactgatgaagaagccatctccctcatcgacctggaggtgctgagacccaagcgggatgacagacagctagagattgcaaacaacagtatccatgcccttggccagagcctgtgtgtgcggctgtgtgaggggtctggggacaggcgggaagtaggagggcccagtcccaggggatcgcgggccatgctgagcctggccctgtgttcccagagagattggagaggcccacatgggacagggacagggatcagagatgggcagacagctggccagggcctaaggacccagaagtggcaagtggcaccttggtcttcccgtgtgggtctcccaccctcccctgacccctaaaaggcactggctgtgcctctgtctgtgcatagctcctgcatagccaacatgggacatgatgtcatgatgtcggtgttggcccccagctcttccactcaagtcactttcgcatgcaagtgacagagtccaaaactgacaagctgaacaagcaaagggtgtgcaaggaagccccaagcaggagaggaagcttcctggcccagcgctcagtctggtcggtcacaggctggctctgcctctcttggccgcactgtcctctgggcaacttcattctttggcagccccgtggtgcccccataacacagagatgtcaggagcagtgccagccccacatcccctcagccttatagcccccagaaacagccagctttcctctcagctgtggcagtgaaagccccggggcacagctcagcctgccccttggccaggaggatgcaccagggcagttgtccagggcaggccacacttgcaggctggacatgggaggggcttctggcagggaacagcacacacgtggcctgaggcctcgctcccttgcactgactgagtctgcaggcctgggggctgtaagcctgccttccttgcagctcccaggtgctgccacccccaggggccacactgggaggagggaagctcagagagctgcttgctgaaggaaagacggacccatctctgccacccaggctccctcaggtgccacagatgatatgtgctatggtgctggcaggtgggtgctgtgcccactccaacttggtaccagcagtccccatgtcctgggcctccctgcaggacccctgctggcctctgttaccagccccaccactgtgggagaggggcggtttccagggacctccaggtgagtctgacccgccctggggtcagcagggactctcgcccctgtctgctccatcacaagtgcccgcagacccccagcagccactgaatgtttctccaggatccctgggcccatcccctccgtgcctacccgcagtggctcacagggcccgcatgtgcttcccactggccctgggagctatggtgtgtgtggcctgcgaggggaatgggtgagggcagcagggccagcagagtcccttccttctgattccttggcctgagccccctctgttcctccacctggaaaactcttccactggtctggctgcccttgagtcttctcacaggggtgtagggtggaggctagggtctgtctccatctctgcttctgattccatccttgaccagatccctccaggctcccagattctgcggctagtggagaccaaggactccatcggagatgaggacccgttcacagctaagctgagctttgaggtgagggtgcctctctgggtgacctgcaggagggcagcctccatcccttctcctgtgcacatggggaccctcagctagcgcagtggtggaggaggattggccagaacttccagatgtggtggcacgaaggaggggcaggaccccttcctgtggggtgtgggagccatggctgcccccgagggaccatggccaagggcgcaggtctgtggacagggaggcagcttcagctctggtgggaggagcttgccactgttagggtcacctgggtttaggaagcaggtcctctctcaccactgccaaagattccaggatcataatccacacagatgtctcactgtggctgagtgaggacactgtgcctccttcccgcccaccctgcagcaaggtggctcagagttcgtgccagtggtggtgagccggctggtgctgcgctccatgagccgccgggatgtcctcatcaagcgatggcccccacccctgaggtggcaatacttccgctcactgctgcctgacgcctccattaccatgtgcccctcctgcttccaggtaggtggccaccctggtagctcacatgtgcttctcttggccacttttcccttgcccaaatgtccctctgggaggcgtggcccctgggaggaggggcacatccatggctccaagttgggacagaggcttgtctgtcctctcccctgcttgcattccatgtgcatctaaagtggacttcactggcccctgcgctgtccacatcctccccaaatcctgggggcccagcaagcgtgatgtgcccttgaccttcactcagaaaacaagaaaccccacagccccctcccatctccccttccagccctcaaacaaaggtgctgcaggtctgtgtccagccctgaccactgccaagccccctccccttgagaggcagtgcgtcctggccccaggcgtagggctgatgagcactagggcttcagcctggtcttacagctgtcttcccttagatgttccattctgaggactatgagttgctggtgcttcagcatggctgctgcccctactgccgcaggtgcaaggatgaccctggcccatgaccagcatcctggggacggcctgcaccctctgcccgccttggggtctgctgggctgtgaaggagaataaagagtt

SEQ ID NO: 15626 - DNA, 80108 bp, Homo sapiens
cttgtggagtggcgaccgttagtgaggcggttgctgagacagacgctgaggcgggtaggaggagcccgagccgtaagggaagccgtgatgagggccgtgttgacgtggagagataaagccgagcactggtgaggagcggggcggttcgcgaagagcaggaggtcgagtcctcgcggggagtgcgcgagccgctgcagcgtgtttgaggggggcagcgggcttgctgcctgggccgagggcactgaaccccggcctgggagactgcagggtcgccctcccgccccttggcggttggagaaactcccgagggttggagagcggcaaagggaggtgccgcgcctgaggtggtggcgggtggaggcggctcttccctcacggtctggccctgtcgctgccttggattcatctcacacccacgagacagcacgaagctgctcaagcttcacagttcttgccacatccacatagtacccatactcttgttttcttgacgtttttctctaaattgtctcatttattttaattatgatttcacattttacaaggaaactttattactccatttatgaaaaccagtgtcacttgctctaaatgttaagataaaatcagcgtcgcttgctctaagtgtaaaagtaaaacttaaagtagggagaaacaaaactgaacaagctgtagctagctattgttgctagggagcctttaaacctgagatctcgtttctctaaaactggagatgggcaggtatgatcagaaaggtgctcaaaatgagcaccaaacacaagctctcctaattgggaagtctgaaaaagaactgaaggggaatgactttgtcaccttttgattcagttatttaatgtcctattccattgttatcgcctaaatctataacatagcagtctgttttgtcatattcttacttatgggataggtcttggcctgactttgaaaatcattcagcattgttgtgaagcctctgttctggccactggagcaggttacttgtctttggttctgtcccttctgagatctttctctgtgtaaagcatgccgtctctcctcatctcacacggaaatcctgaacatccttcaaggctcacgttggagacgggtcctctcttttgtgttcggcactagtggtagctgacactatgtgccaggtgctggctaagcacttcatatcctttatctcgttgtgtcttcaccactctctaaggtaggtactataatttcctctattttatgtatgaggaaactgaagcccagagagggtggataatttgccagcgtcacacagtgaggggtggaaccagctttcaagctcaggtcttcctcactccaacgtcaacgctctcagccactacattaatttttccttatgttacagacgtggcaaactcaaatgtctgcaggagacaggcaggtaacataaatgggagatgtttatttgcatcttcaacactaggaattgtatgttttccctaggaatagtcttgtattctgtaccccatttttcttgaaacacagccgtatcagtgaatctttcatttgtacttttaatagagatttgagttttaaaaaatcattttacttttaactttattataaacgtacctatagcacaagctgatgatagctggcaactgaacatttggcttcaatgtcagagtaatagagtgtggcaaactgcagagctcatgctcggcctaaaaggggcagctgctgctcagctcctgccaattaccaccatgcaggaatttggcctagtgtgctcagctcttcctgtttttaccagaagctaggaatctgggtttttatgtgaaatggcctaatttttaaatgttagcatccactctgaaaaaaaaacaaaacaccgtgtgggccaaataaaacatttgctggccgaatgcagcctgatttgctctgttttcaacccctggcacagaattttgttcatttctctcttgtggtacttccagagtctgttgagcataagagttaattttttaaatctgtttaattcagaagtctaataaacccgttaaaggcaatggctatgtcttactcgtttccaaattattctagagacaggtcagtggttgttgttactatggatagtaataaaatactagatatatataaaacgaaatactgtgggtagatgtattcatacgtgaatgaatgatgaataaagattggttttctggtttttggcccattacagatttgagacaacctattaggataagggatgtaggggttctatagaccatcaatcctgatggctgctagatataccagctgatagcccagaatgaaaacaaaacaaaaaactaaacaaaaaaaaaaaagacagtagaactaaaaaaatcctagatgtcaaagattagtcctccacatccaaatcagccattgtctcccggtctgctcctttgcttctattttaaccttcacatagcagcaggaactctgtttttttaagacctgctgctgtgatcctgttactctacttctcataaacctagagtgattcccaattactttccatgtcaagtcgtgcattttgctagagggtcctcctgaccctcctccccatcaggcttgcaacatttaaatttatacttttaggttgagctgaaaactctatttttctacccgaagatccttcccaaatgctcccttattctatgaactccctagttttctcctttaaatgcacagctccaggttcatctcaaccaggatgtcttattaggctagcccactgtattccaatcaggctagcatctgctgtaactctccattcatgccagctagtatttactgagtacttgctataggccacatgtccacatgtctttataggtgttatcatgtttaatctctacaacatgtgaggttggaattttcatctcatttaaagatgaagaaattgagatttaatgaggtgacataagttacctaagattacaaaatgagtaagtggggctgggtcagatgatgcaggaattggagaggcactgtgggacattggtttacagtgaggtgggtgcagggttgtcagaggacaatttgcaggattcctctgtatctctgcaatggaatctgacagtgtgtcttctgacagtgtatctcttttataaaaagaggcaggtggagagagaaccatcctacagtagaatagactgcctgcaaatgagtgagctcccagccctggagtgttcaagcaggggctagatggccatctataaggaattcttgccctgatgggccagatggactgcatgacaaggtctagagtcctttccaattctgagtttctggtgatttcataattatatttattacatgtctaggacagtgccatgcactgtgggtccacaaatatgtagaacatggccattgctttcaaattgtgtatgactataattaaaggggcaaggcaagataatatctaacacaatgtaaagaagactgtataagtcagagctaaactgaaatgtacagattctaagtacattaagagtttagattggggcaaatcagacatatatgatatattttaggaaggcaaatttcaagatattcagagaaaatgaatttttatatctaagaggaagaatgttcaggcttggctcaaatgagacattcagaaatgattttgtgataattcaacccaaaatgacccttatgaagaagaggtcacacaggaatcactttgatgagctcatatgtgtacaaggcagaaaggaagccacataccaaggatgactttagatgagaggtgcagacactgctccaacatctaataatccaccatagcaatccacaagtgtcaggcgctttggatagactggcttgtgcaccccgtgagtaggaggctacctctctatccttgttttgtaggtgagaatgaaagctcagataggagatcagcttttctggccccacgtcccccctactttttattccgccatgctgcttctcaaaatgtgaaatgtgccaaggctcagaggaagaaagcgtaagaaacaaggaaggcccaggtctgttaccacataatggtgaggaagctgaaaaactcagggcttcagtttgcccagctggaaagagtgtgataatcatccttgttccagcttctttatcagccagctctgtgactaggagcaaacaacttgcctctctgtactttagtttcctcattggtaaaatcggggcagtggtgcctgtcctgtctactacattatgttttcgtaaggatcaaataagataatgtaagtttacactcttttttttttttgagacagagtctcgctctgttgccaggctggagtgcagtggcgcaatctcggctcactgcaagctccgcctcccaggttcaagccattctcctgcctcagcctcccgagtaggtgggactacaggtgtgcaccaccacgcccagctaatttctgtatttttagtagagatacagtttcaccatgttggccaggatggtctccatctcttgacctcgtgatctgcctgcctcggcctcccaaaatgctaagattataggcgtgagccaccatgtctggccaagtttacactctttaacaattcttaaatattgaataactgtgaagagtttttattaaaggaagcgtcaggtcaacagagccatattaaaagctttctgaattcttcatgtaatgccttaagtaggtaataatacctttttttgacatatgccaacaatgataatggcagccacatagcataatggttaaaacatgggcttcaggccagattgcctgggtttgaggccggatgcagtggctcacacttaaaatcccagcactttgggaggctgaggcagatggatcacttgaggtcaggagttcgagaccagcctggccaacatggtaaaaccctgtctttaccaaaaatacaaaaatgacctgggtgtggtggcaggcacctgtcatcccagctactcaggaggctaaggcaggagaatcgattgaaactgggaggcagaggttgctgtgagccaagatcctgctactgcactccagcctgggtgacagagcaagactccacctcaaaaaaaacaaaaacaaaaacaaaaaaacagattgccttggtttgaatcctggctccatttccattcagtagcactttattttcaggcaagttatttaacttctctgtaccatagttttctcatctgtgaaacaggtatacagttgttttgaggttaacatgagttaatacatgtaaagcatttaagctgtacctggcatacacaataataaatgtgttcaataaatgttagtcactgttattaaagtatgaaggataacagatttgacatacttggcagtaattcaagggagcagaaggcagcatagcgcgttaattacaagcacagactctagagtcagacctgagttgaaatcctggcccttgcacttgctagttgtgtgacatcaggcaaactacttgacctctctgagccatggtatcctcatctacaaaacagagtaataattcctacctcacagaattattgtggagatgaaataaaataatgcattttaagagctcagcaggtgctgtctggaataagagttcgaagtactgtcattgagagtgtacttccaagttactgacaaaagcttgatttttagattactggtataaaccaaaaataaaattcagaggccccccaaccatctgaatggatttccttctcaaccagggctcttttaaaatttaacctgagagactgtttcaggccatgatgggaaatgggggtcaaacatgcctcagtatacctctctggcattaacatcaacacagactttaagtatgataagaaacattttacaaactctcctctctaaagcctagtacctcaaggcttcctctgcaaacagtaacttgggttgccacaatcctttatcttaacccaggcattcctttctgttgaacctaggttttttgttttttttttttctgagacagagtctcactctgtcgcccaggctggagtgtagtggcgcgatctcagctcactgcaagctccaccttccgggttcacgccattctcctgcctcatcctcccgtgtagctgggactataggtgcccgccatcatgcttggctaattttttgtagagacggggtttcaccgtgttagccaggatggtctcagtctcctgacctcatgatccacccacctcggcctcccaaagtgctgggattacaggcatgagccaccgcgcccggccgaccctaggtccttagataagctcaaccaattgtcagaaaaattttaaatcaacctataagctagaagccccctgcttcaagttgttccatctttctggaccaaaccaatgcatttcttaaatgtatttgattgaagtctcatgtttcactaaaatgtgtcaaaccgagctgcaccctgaccaccttgggcacatgttctcaggaccacctgagggctgtgtcatgggctgtggtcactcatatttggctcagaataaatctcttcagatattttacagagtttgattttttgttgacactggcaagtttatcccatgctaaacttttactatgggttgggttttgtttttttgttgttgttgtttgttttttgtgtgttttgttttgagtaacttcagtagtaaccttaacaatagtctgttttgacaggtttttgacacattcttactatagtcacctgaaccaatgaaatcctctgcctggggcatttgaaaaatctttgtaatatggctctagcccatttttctagcctcatttctccatgttctagcaacatcttgcacatagccagatgtttcagtcaaattaaattattttgattacttgtgttggcaagaagagtcaaactgcaaaatattttaagagatttattctgagcctaatatgagtgaccacagccagtgacacagccctcaggaggtccacagaacatgtgcccacggtggttggggtgcagtttggggaggcatgagacatcaatcagatacatttaagaaatacattggtttgatccagaaaggcaggacaactcaaagtgagggcttccaggctataggtaaatttaaacattttctggctgacaattggctgagtttgtttaaagacctgggatcaacagaaaggaatgtctgggttaagataaaggattgtggagacccatgttcttatttgcagaggaagccttcgggtactaggcttcagaaagaataggttgtaaaatgtttcttctcaccctgcaaaacagagtcttgctgtcacccaggctggagtgcagtggtgcaatctcggctcactgcaacctctgtctcccgggttcaagcaattctcctgcctcagcctccctagtagctgggattacaggcgcccgccaccacacctggctaatttttgtatttttagttgagacagggtttcaccatgttggtcaggctggcctcaaactcctgacctcgtgatccgcccgcctcggcctcccaaaacgctgggattacaggcatgagcaccgcacccagcctaaaatgtttatcatacttaaagtctgtgttgatattaatgccggagaggtacaatgaggcatgtcagaggcccacttcccgtcatggcctgaaacagtctctcaggttaaattttaaaagagccctggttgaggaggaagtccattcagacggttgggggggcttacaattttatttttgttttacacttgttatttctcactttcatgtctttgcttgttttattttctttgcctgaaatgtcctttacccagtgtcctcctccatgtttcaaaagccctacctttttcaaatatcttcttcattaatctttttctgatcctctccttgaattaaaatgctgttgaagcggcgtcattgtctggggtaaatatccgagatttgttgtctcaacagcaatggaaaactaggatacggacacaccagagtgaggttacgagtagaagtttaacaggcgaaagaaagagaagagctcactgcagctgacagcgttctcgaaaaaatgagttgccacctctgtggtgaaatgcaggttttatagataagcttgaggaggtggtgtctgatttacatagggcacaaaagattgattggattggtgtttcatttgcataactttcgaaaaactggttagggctaggtgtgtcatttgcattgggtgcgaaaagctggccacccccaccctaatcttttattatgcagttgggttatttacgtggccagcgccatgttgcccgtttctttactgtacacgtggtgacaaattaaagggaggacagaacctccatgttgaacatacttggcccccaggtagcctttttctattggcacagctgccggcattcaccagtgcaagcttccagcttgcctttttatttatttatttattttttttttttgagacggagtcttcctccgtcgcccagactggagtgcagtggcatgatcttggctcactgcaacctctgcctcccaggttctagtgattctcctgcctcagcctctcgagtagctgggattacaggcgctcaccacccaccaccatgcccagctaatttttgtatttttggtagagacaaggtttcactatgttggccaggctggtctcgaactcctgacctcaagtcttcctcctgccttggcctcccagagtgctgggattacaggcatgagccgctgcgccaggcctcagcttgcctatctatgtttgcagctcgatttttcaggctgctctttgttagaaaaaaataatttcttgggctgctttttattaaaagggaagttctgccgaagactcttttaccttcactatctggctaaataatttctttctagctcctgtatcactgcgtcttcctccttcgaatcctgttttcatgtgtctcttaaagcctttatcagagtactgttctgtatttcatccaatctaataggtcattgattataaaataccattgttttgtgtatcaataagaaagcaaaaaatgctgccagttacactgaaacatcatcaattataagacacaaccttagaggtgagaaaatgtgaaaaaaaaatgtaagctttagaattgatgacatatggtagttctttgtgaaagtgtctgtttcacaccttctcactggatagtaatttccctgaggggagggagggattatgatctgttcatatctgttggtgcctggcacctaagagggactcagtaagtatctgtggatttactggcccttaacacattctctcatgttgtctagcctttatgatattattagaagagttaataccctcaacagttgaccctttgaataatttcttgtgtctggcttctggacaagaggaaatcaggacaaagagctaactactgagtggatcatgattgaatgggctgctgtggtgtggcggttgaatggaatttgcaacaaatgcaattcgtagttattctttttctcctcagtacacacacagtgtttcttaatggcaataaagtttactttcctggccattagcagacttcatcattttggttcctaattgtctttttcccttgtcttctgttcagtataaatgacatcgcatttaagcctgatggaactcaactgattttggctgccggaagcagattactggtaggattttgtcttagtttcctcttaaagtgcttccctaacctccctcttgtgagtactctgaaatttgaccctttttttttttttttgagattaaaaaggcaagggtggaaaaaccttccctattactttttaatagggatggaaatgggctatttaaaacgggcaagtaaactatcagataagaacctgtgaacaataccacctttggggtcattcatctttccctttttactttgagacacccatgaaagagttgaaaacaatcacaatgcctttgaaactggactggtgtcagtttacattttgtcccccagaaaaattcaagcaacaggactgacggtgctgtgtccatgaaaagtcagatagcctgaccccaacttttaggcattggcctatctaaacagttccatatggatgttgtcctatttttcatattttcaaataacataagctccctctggaacctatccaggtatataaaagtaattttcagagaaccccttatgtttgaccaaaaaacctttgtatgatctctctttctgtctaagtctacttcctcttctctgttgtctctagatacgcagactgattaatctccattctttgtatggttaactacataatcttaaaacatggttaaattgttctgcagacttctctccagtgtaaacaatccaaactctattagtttttctacataggttatcttttccaatactctaaccatttcagaaagtttccgcttgatttctcagatggtgtgtgtgtgtgtgttttttttttttttttttttttttggagacagagtctggctctgtcgcccaggctggagtgcagtgacgcgatctcggcttactgcaagctccacctcccgggttcacaccattctcctgcctcagcctcctgagtagctgggactacaggcgcctgccgctacgctcagctaattttttgtatttttagtagagacggggtttctccgtgttagccaggatggtctcgatctcctgacctcgtaatccacccacctcggcctcccaaagtgctgggattacagaggtgagccaccgcgcccggccagatggtgtgtttttaaactctccacatagtgatagatgtcacatggctatcaaatacctaaatccatattacagctgggttttattttatttcttagagacagggttgtgctctgttgcccaagctggtgtgcagtagtgcagtcatagatcactgcagcctcaaactcctgggcttaagggatcttcccacctcagcctcccgagtagctaggactgtggacacacaccacctcgtccacctaatttttatttttttttatttttatttatttttattttttgtagagatggggtttcacttagttgcccaagctggtcttgaactcctggtttcaagcaatcctcccacttcagcctcccagagtgttgggatgacaggagtgagctaccatgcctggcctacagttgggttttataacattccctcctacttgaaagcccagagttctgtgactttcaaattcttggtagcaaatatgaaacatctattatgttgatttagtgcagagctggcattaaaatttaatcatgttgtagctggctctttttatgggctagttttatttaggagggcctgccttgatcaatcatatatccaaattcaggtaaggatgagtataaagaatttccatggagtgagtaattgaacctttggttctcaaggattggtagtatattcctggtcacatagtacatagacctgggtcctctacttcttggttacccaactttaagtcacgttgtttttggttttgcagtgcagtttttattggctacagatttagaatattgacacgtattgttataaaaacaaaaatagcagtagcaaccctgcaggaattctgactaatagatatcacatagataatctgtatttgtctcttttgccaggtttatgacacctctgatggcaccttacttcagcccctcaagggacacaaagacactgtgtactgtgtggcatatgcgaaggatggtaaaaggctgctctgggtttccattctctataatagcctcatcattgttcatttttctctttagtcactttttaattatttctagtaagctggagtacaagttgcaagttcagaagacagtgaagttgctaagacttcagtttggtcattcaatctagcaagtatttattgaggtcatctatgttccaggcactgttcaaggtgcttgagttacttcagagaaaaaaacggtggtccctccccttatggggcttctgttttatggggtggtggtgagaagtgagggaggaagaaagtatgagggaagacatacagtaaacatagtaaaaaggtaaattaagtagtatgctggaaggtgataactgttatggaagaagaaaaagtagagcagaatgagggggattgagagtgctgggcagggcagggggttgggtacagtattgaattagactagtgagggtgggctcattgagatgaggacaggtgaggaaaaagactttgaagtcaggaggcaatgagattgtgccagtgggcatcggggggaagagagctctttgcagaggaagagccattgcagaggccctcaggtgtgggtgtggctgctaggagctggatcaaagagaatcgggaattgtagaggatgaggataaagtggtaacagacatggggtggtcagatcataaagattttgattctcagtcaaaatggaactactgaaaggtcctcagcagaggagggatctgatttgatttgtattttaaaaggatccctctagttgctgagttggaaacaacctgcaagaggtgagggttaggacatctgtgtgaggaagcatcatccagacagggggtgatggtggctcagacctctgtgggggcagaggaggtgatgagaaattatcagactctggatataatgggagggtggagccaactggattgtctgacagattggatatgggctatgaagaaaaaggagtcaagtttttgacctgaggactgaaaggttggagttgccccccccactgagatggaaaagactgcaggtagagaaaagttatggttgaagatcagaaattcagttttatacatgctgaatttgagaaaagttgatgatgtcggagaggggagagaactgctggaacagagttgttgagtaggcaagaggagatgggatctagggcatagacggggtatttgctttagataggggcacagtaggaactgcagaggccagcagatggggacaatgtggtagtaggaatctaatggaaattctcaattccattttttttttcttcagtgaaataggaagcaacagcaactgagagtggcaatggggaagggaggtttcagagagttgaagagaaagggaaaaagtgtaaagtcactgcctcagagaatgggacagcgagtggacccaggaggtgtagtgagatccccggtgacatgaagggccctcttgaagattgtgatcatgaattgaaagtgagattagttggtgtgattgtgtctttttctccagcgattttgagctgcatagttgtagaggcagaagaggtgaatttaaccagaggtggttttgcaagcacatttgaagatgaagtaggagggcaagggagcagaaagtgtatacagataaataattatgtacattaaccttgaattgttggctgaataatgaagggagagaggacagcaatggagaagtagtaggttctggtggtgttgaaggattgttacagttggggtaccaggtgggttgggaaggaagggaagtggtgcatgaaactgagatttaaatttattttaaaataaatccatgttgtcccacagcataggattagtgggaagaaatgggctttggaatgagacagttgtgagttccaaccccaacccaacaccagagttctgtgagtctgagctggttattgagtctgagtcacgatttcttcatgtatcaaatggataacattgagataacattctgtagccactgccaagaagtcacaaaattgtaatgttataattcttgaatgaaccttggagattattccagtcccaggtttttaacttcttttggctgatgggcctctttgataatcagatggaagctttagaccactttctagaaagatgcaaattcttcatgtgtatgcagaatttcatgcatataattttagtctgattagtccagtctcttcactttagtcctgcataaagacataaacaattggccaggcacggtggctcatgcctataatcctactgaaatcctaaagctctgggagcctgagttgggaagattgcttaaggcaggagtttgagaccagcctgggcaacatagtgagactccctaaaatctggcctgggtgacagagctagactctgtctcttaaaaaaaaaaaaaaaagacaagtcatgtgacttgccaaggccatgcagcagattggcccaaagacaaaactaatttcttgcttcatagtcaggtgtgctgtaccatggtagtcatatttgtgtgtgtgtgtgtgtgtgtgtgtgtgtgtgtgtgtgtgtgtgcatgtttgagttcaagttcagaataatgttttagggagacctgtgaggagggagcctggagagctgaactgtttctgtctcatcctagtggctgttgaggaatgtgggtcagtccagggcccagtataaggcccagtaggtacagaagagctattgggcctctggtgcctctggtgtttataagcatagcagggctctttgacctgcaacaccattagggcacttgaggatgtcagagtgtgacccatcagtagtggcatttgcacagcactttgcagagtcctgtcacacacatctcacttgatgcttccaacaactctctgaagcaggcagcaaggggactcttatctccgctcaaagatgagaaaacagacttggagcaattacaggtgatggtggcagaggcaggcctaacccaggttctctgactgcagagtctttgttctttctagtgtatcatgctgcctcttcatgacacctgtataatgattaagaagtcttttagtcctcagaattggttttttcctcttagacctgaagattgagatacactgaattccagctttgctctttaagtctgcttgtttctgatttctcctttaagttcattaagttttttttgtttttttttttgagatgaagtctcgctctgtcgcccaggctggagtgcagtggcgcgatctcggctcatggcaacctctgactccctggttcaagtgattctcctgcctcagcctcctgagtagctgggactacaggcacgcgccaccatgcctagctaatttttgtattttcagtagagacagggtttcaccatgttggtcggcctgatctcaaactcctgacctcgtgatccgcccacctcggcctcccaaagtgctgggattacaggcgtgaaccaccatgcctggcccaagtttaataagtatttaatgagcaaccatgatataaaagtatgtaagacatagtttttttgttcaagaaaaacaatataatatgaagaaataatagaaatagctaatttttttttaattctattccaggcccagttctaagcaacataagggttaggggtgccactgcctgtgcaataaaaaatctgcatgtaatttctgaaccccccaaaactttactattaatagcctactgttgaccagaagccttacctgttacataaacagttaacacatttttaatattatatgtattatatattgtattcttaaaataagctagataaaatgttaattgagaaaaaagaaaaatatatttactcttcattaaatggaagtggatcatcataaaggtcttcatcttcattgtcttcaggttgaataggctgaggaggaggaggaggaggaggaggaggaagagggattggtgatgctgtgccagggagacagaggcaaaagaaaattcacatgtaaaagtggactcatgtagttaaaactcatgttgttcaggggtcaactgtatgtacacatgtacatacactcatttaatcttcacaccaaccatgaggtaaatactaacattgtatccatttttcaaataaggaaatgaaagctcttcagtagcttgtttgggtcatgcagctggtcagtgagatctctaggaattctgacccagagactctgagcccaaagcttatgcttttcatcaccatcacctgctacctaccaggatgagggaggagtgatggaaatagtaagagcagtttctttgtttatttagtatttgcagcaatatcatatggctcaccctaatatctactatttcagctactgtaaaaggtacttggccgggtgtggtggctcatgcttgtgatctcagcactttgggaagccaaggcgggtggatcatgaggtcaggagtttgagacaagcctggccaacacagtgaaacctcgtctgtactaaatatataaaaattagctgggcatggtggtgtgtgcctgtaatcccaactacttgggaggctgaggcaggagaattgcttgaacctgggaggcggagattgcagtgagctgagattatgccactgctctctggcctgggtgacagagctagactccgtctcaaaaagggccagtcgtggtgactcatgcctgtaatcacagcactttggaaggcggatcacctgaggtcaggagtttgagaccagcctgcccaacatggagaaaccccatctctactaaaaatacaaaaaattagccaggtgtggtggtgggcacctgtagtcccagctactcgggaggctgaggcaggataatcgcttgaacccgggagtcggaggttgcggtgagccgagatcgtgccactgcactatagcctgggcaacagagtgagacttagtctcaaaaaaaaggtactttacagatactatcttagttgactcccataaaaagactctgaggaagatactgttcctctgtgtttcagatgaaggcattgaggctcagagaacagtgacttgcccaaggtcaccttccacttgccctgtgaataaagtctaaaagtccttaagatgtacagaatgtggcacatacttacctcttaatcctcgtctctcaccagagtaggtgaagaccccgttatttgctgccatggtaccgtgatcctcttccaaatgcttataaatgtggaacagtgtaattaataacaaattacttgttatatgttgcctctctccagtctgttccttcataaagcccaagtagtatgaaaatgcgaatctgatctatcactctttgcttaaaacctttctttggcttcccattgctttaggataaagagcaaggcctctgctgtgtccctgaggtcccaagagatccttccacaacccacctcacccttccctccgttccatgatgactccgctcattccctcagacatgccaggcttttcctgcttcagggcctttgcacatctgttccatccatgtggatgggtctgtctcctctctacatctggctaagctctgctcatcctttaggtctccactgaaggatctcatccttagagaaatgttccctcatctaaattaggtcccccaggagatgttgaccaaagggtagtttcagtcagacaaaaggagtacatttttgagatctattgcacagcatggtgaccatagttaataatagcgtatatttcaaaactggcacaggaatagtttttttttttttttttttttgagatggagtctcgctctgttgcccaggctggagtgcagtggcgtgatctcggctcactgcaagccccacctcctgggttcactccattttcccacctcagcctccagagtagctgggactacaggcgcccgtcaccaggccggctaattttgtttttgtatttttagtagagacggggtttcaccgtgttggccaggatggtctcgatctcctgacctcgtgatccacccgcctcagccctccaaagtgctgggattacaggtgtgagccactgttcccggccaggaatagattttaaatgttctcactataaaaaaataagtatctgcagtgatggatatgttaattagcttaatcattcttcaatgtgtatgtatataaaataccacattgtacttcataagtagatataattattatttgtcaaaaataaaaatttaagtaaaaaagtaaatcaggttccccagttattctctttcataggatccgtgtcttaccatgttgtatttgtgttagattaatttgatgtgtacttcttacactagactgaactttatgaaagtagggatcatgtgtgttttaatcattacttaatccctagcatagaacatgacagctacatgtagtaggctcccaatacatctttgtttactcagtgtcagacaaagcaggtttggaacccaaatattctgactccaaggtcctgcctcccagtactgataagaactaggaaagaagctaacacttactaggtaccttaaagaactagttttctaaagaattctctctgggaaatgctggtttaagataaatgtaagactttccattttacaaacacttttaggcaagcgctttgcttctggatcagctgacaaaagcgttattatctggacatcaaaactggaaggcattctgaagtacacgtaagtaacttaggtgtacagtattatgagtttgatgcttattgaataattgcagcaaaagcctcttagaaaagatgtaggagaaaacttttttctcttaaattgaacttgaaattaagttgtgggtgtgtgtggttggtataggaaggttgagtagtgaataagttaatgaatatttcttggccacttactggcgtggccagcactgggctaggtgcttttatgtagctcatctcagttcatctgacattgtagactttatcccacccccaacctgtcatcttccagtgtccctgtctcagagaatggccttatatccacccagtgtcaaatgtcagaaacttggggtcagtgtgctccaggcctcctcttactattggggatctgccgtgttcttcccctgttcctctactagttggtccctatttaccctgcagatctcagactcaaatgtcagtttctttgtaaggactttcctgcctctctagactggaacaggtctctttcgaggcatttctcacaattgcagttttaggtttattctggtgactgatcagtattgctcatcggcctgtaagttccataagaacagatactgcatctattttttgttttgttttgttttgttttgagacagagtcttgctctgttgcccaggctggagtgcagtggcacgatctcggctcaccgcaagctccacctcccaggttcacgccattctcctgcctcagcctcccgagtagctgggactataggcgctcaccaccatgccaggctaattttttgtatttttagtagagatggggtttcaccatgttagctaggatggtctcgatctcctgactacatctattttttttttctcactcttgtgtccctgatacaatgcctagcccataattggtactcaccaattttccttccttccttctttccttccttccttccttccttccttccctccctccctcccttcttccttccttccttccctccctccctcccttcttccttccttccttccttccttccttccttccttccttccttccctccctccctcccttcttccttccttccttccttccttccttcctttcttttcagtcttgctctgtctcccaggctacagtgcagtggtaactagctcactgcaactacaaccttccaggctcaaataatcctcttacttcagcttcccaaatagctggaactgcaggtgcacacccccacaccaggccaatttttaaatttttttttttcttggtagagacagggtttcactttgttgcctgtactggtcttgaactcctgggctcaagcagtcctctcaaagtactgggattacagatacgagccactgcacctggcctcttttcaattgtggtaaaatatacatgacataaaatttatcatattaactactttttaagtttacagtttaatgttaaatacatttacattgttgtgcaaccaatctcccaaactcttttatcctgctaaactaaaattctatatccttcaaatacctactcacccttctctcctacccccagcccctgaaaaccagcattctactttctgtctctctgagtttgactgctttacatacctcatataagtagagtcatacaatgtttgttcttttgtggctgagttatttcatttcacgtaatgtcctcaaggctcatctgtgttgtagcatgtgtcagaatttactttctgtgttgtagcatgtgtcagaatttacttccttttttttctttattattatttttttttatgaagacgaggtctcactatgactcctgagctcaagcaatccttctcccttggccgcccaaactgctgggattacaggtgtgagccactgggctcagcttccttcctttttaagtctgaatattattccattgtatatatagaccacattttctttatccattcatctgttgatggacacttgtgttgcttctgcttcttagctattatgaataatgctgctatgaacatgggtgtacaaatcaacaaacaatttttgaaggaatgaatgaatgagtgaagttgtaagtaaagtattacccacaagtgaaggactaaaacgggttgagacgccttgcatggtacatgatttgctcagctttcattgttgtctaaggatttgtcatgtttccagatcttggtctgtgatgtcttcattgcacctccatcttccatttctgggcctccacaaaacagtaagagtaacagccacagataaagcacctaaaggccaaggtgggaggattgattgcttgaggccaagcgttcaaaaccaacctggccaaaagtgagtccccatctctacaaataagaaaacagtgggtgaggagaaggagaattaattctttaggagtaggagaattaatttctgtgctttttgttggtcacttgcagaagagcatgtggtctaaagtcagaggctgtgggctcattattaaaatcttcagttgtagccactgaaatctttgtggtttgctgcatagtaatctacagttgtttacttcccaggcacaatgatgctatacaatgtgtctcctacaatcctattactcatcaactggcatcttgttcctccagtgactttggtacgttctgattcctgatgtcctgtcctggaataactgaaaatctgggctaaaaatgctaaaatgcattcagaatatggtgattttatcctgagagagttaatactacttctctaccttcaatggctgaggggaggctgacagttattctttaaattgtgtggaaaccaagacagtgaatggtgacctttactctggtaagacatcagagactacaggaagggccccagcaaaggaaatggtaacaagattgggagggcacaggcataacttggtgttgctgcctttgggaagccttcccttggtgttgctgcctctgggaagccttccctgactcaccctggcagagacagtgcagttgtcctcacctttgtattgacccacatctatgtttatgtgaaattcttcactgttgcggttctacttcttgtgcaatttgtcgtcattactggtttaggtggctgtagctgtcctccctgaggggctgaacaccttgaggagttcatcctggccacggtcccgtgccagcattacagcactggtgtagtactggcacaaaagaggtgtcagtaaaatgtctgtggagggaggaagggagtgaaattgggcagaggcttgtaggttatttccattaatggttgattctgttttcagctctatcagtctgtgttcgttgctagtggatacaatgaagtcactagatgaggagtcagaggcctaatccctctcagtgttccagttcccttatctaaaaggagcatgctactcactgtgtctcactgatacggttctggttctgaggttcaaaagagagaatggaattgaaagccaattgtataaatacatggagaaaggcctgtcatttgtttaacatattttatagcattttcttcatgtgaagcactggtctgtgtgcttacactggaatattaaaaaggcaaaatagaatccctaccctcaaggagcttgtggtcttaggagaaggtgggattaaaaaaaatataatattaagtactagtatttattgaatgcttgcagtgtgctaggcactgttctaaggattagaaatgaatttctatttgagctttatgacagcccctgaggtgtcaggtattattctcattcccaccctactgatgaaaaagaggtagaggtcccttagctagtaagtggaggaaccagggcttggactttagaccaggtgattgcatacagagcctgctctgctaagcactgctgaaggaggcccaggaggaaggagtttcttccagcttggggctccaggcaggcttagtggaacacagataacatgtgcacacgtcaaaatgtttggaggaagcgttctggaccaggggaaaggcaaaaaataacttgtttgatgttgcacttggccatgtatttgtgcactggagttaccttcttgattgtacttcgcaacttggcaaatagaagaatttgcttatgttgtctagacatacacttgctatgaggcactgagccagggcatctgggacaggggggagcaagccttaggtgaccagtgtgccatgggagaggcacagctcagatagagtcatgtgttgtgattgagacctatgaaagaaaactagattttcagaaagcatcattgttattttaaatgctaggttatactctggttgcagtgtcaaagttataaacaatgaaactgtcatttctttgagagtcaaatccctgaaaagttggctagaactttaccaatctattttatttttcttctgaaagaatgatagattcatagtaagttacaaagatggtaccaagaagtctatgtacttttcatccagtttcccccagtggatccatcttatgtaactattatacaatatcaagaccaggaaactgagactggcacaaagtgtgtatattatatagttctgttgttttatcgcatgtgtagattgccatcagcgtgacacagaactaagccatcaccatgcagttaccacttagtgtcatatctactcaccttacctccagttatctccaaaccctggtaaccacaaatctgttctccatttctataattttgtcattcaagaatgttatataaatggaatcgtacagtatatgaccttttgagattatgttttttcattcagcataaaatcctggagatccatctaagttgttgtatgtttcaattatttgttcctttttattgctgggtagtattccaaccaatccatcttcttttatattattgtgcattgaagggttgtggtctcctgaacagaagtctgtctccaaacacaaatcaagcagcaagatcatctgctgcaggtaagtgcagctctgacgataagatttatgttccttcatcttccacacagactctcaaaatccaattatttcatgcagcagagaaggtcttgtgttaggtagttggtttaggcccctgtatttccttttttcttctttcttcgtctcctcgatgggaaagacttgtgcctttgatcatgaagcaaaagagaactacaagttgccttcatgcagttacttagcaacaagcctcaacatccagctatactgagtggaggcttgttgaaaatgtgaggctgtcattgtccaggcagcatgtgtggggaagaaagctttccctcccacactttgatgctagacctgaattagaatccagaatctctcattgacaggccatgtgacctcaggaaagttactaaatctttctgagctggagctttacgttcctcatctgacagatagggataaaaatactgacttgacgagattgttgtgaaatgcacacaaactcatgagtgtaaagcgtgcaggacagtacctggtgtacagtagacactctaaatggtagctattcttgctgttcagcttctaggagtatatcccttccgttcagcatctgttgagcaccttctacaaagcaagcactgttctaggggttggaagacaccaagtctgttcttaaggtgctctttaagtgggaggggattgagatggagagtgggaagtggtggctggcccagagatgtaggcacaagctaagggctgtcatagaggtatgtacagagggctgggggagctcagaaaaaggcaccaaatggtgccttcacttctcactgtttattacagaactaaatagcattttaagtttgatcctctgactttatgtcaggaccggcaataatgaaaccatatcccagctgttgctgcctcatcagacttttatttcaaaccaaggcatcatcctcactagttttaccttctgtggggtgcttcccctatccccatgccttttgttggttgtgtacacagctggacaaatgatggtcagtacctggcgctggggatgttcaatgggatcatcagcatacggaacaaaaatggcgaggagaaagtaaagatcgagcggccggggggctccctctcgccaatatggtccatctgctggaacccttcaaggtactcttaaagttgtcctccttctagaacaaacaccatcatgaagaagggctttttgtcttcctgaggtctccctacattcaaaggcttctcacctcacttgaatggtctgttttagaacctgtcccatttgtatggattttttttttaatagtcccgctacctgagaatgtatggaatttattaagagcctcctcaaaagttgagtttaggaatgaatcctggacattttagcaaagcagatgagctatttaggacaggccaaagtgtgtgtgtggcgtgtgtgtctgcgcacatgtgcatgcacacatgtgtacgtgtacatgtatatgagtgtgtgtgtgtgtgtgtgtgtgtgtgtgtgtgtgtgtgtgtgtgtggtgtgtgagtgatgcagcaggaccatttccttatgaatcaatagtggagctctttgctgtggctttatttttgcctttccttttttagttcttccctccaagtttgggcagaatatgtgcccacctgttaataaatagctttttcatgagcctttttttgcccttgtcagaaagtcaaaattaagtctacagacgtccctaaagcctagagatacacaaacaattggcacctaccttcttaaattttatacacactttgctttctatgtccatgtgactttgagagtaaactaattatatgctctttttttttttttttttttttttgagatggagtctcgctcggttgcccagcctggagtgcagtggcacaatctcggctcactgcaacctccacctctcgggttcacgcagttctcctgtctcagcctcctgagtagctgggattacaggtgcctgccaccacgcctggctaattttttttttttttttgagacggagtctcgctctgtcgcccaggccggactgcggactgcagtggcgcaatctcggctcactgcaagctccgcttcccgggttcacgccattctcctgcctcagcctcccgagtagctgggactacaggcgcccgccaccgcgcccggctaattttttgtatttttagtagagacggggtttcaccttgttagccaggatggtctcgatctcctgacctcatgatccacccgcctcggcctcccaaagtgctgggattacaggcgtgagccaccgcgcacgcctggctaattttttgttgccaccacacctggctaattttttgtatttttagtagagacagggtttcaccatgttggccaggctggtcttgaacttctgacctcaggttatccacccacctcagcctcccaaagtgctgagattacaggtgtgagccactgtgcctgaccctatatgctctttatatatcctataatattattaaaccatcagtatcctttacagagtcctctgagggtaaacgaaaggtcctacttgtttaccagctcaatgtcattttacagatggttgcctacttgatttagaaggttgtttggaaggttattatgcttcttcctgaataattttttttggcccatgctgtaccatgcatgtctaatgctgtcaaaggccattagcctgccccagagttcctgctgtttgatttgtggctgcagaggacttggtggctctaggctaccatttttaattcatgagaagcaggaggccctgtatacctggtggctgtcctcctccaggtagggttcagaggctccttttattttttatttttattcttttttttttttttttttttttttgagacggggtctcactctgtcacccaggctgcagtgcagtagtgcgatcttggctcactgcaacctccgcctcccaggttcaagcaatcctctcacctcagcctcccaagtagcttggatcacaggcacatgccactacacctgtctaattttttgtatttttggtagagacagggtttcaccatgttggccaggctggtcttgaactcctgatctcgagcgattcacttgcctcggcctcctgaagtgctgggattacaggcgtgagtcactgcacctggcccccaggggctccttgccaggattttaaattatagttttagtgtagttctaggcaatgtaattttgaacaactacttactgtctacagccgatgggagagtttctggatgaacagagagaatgaggatgccgaggatgtcattgtcaacagatatattcaggaaatcccttccactctgaagtcagcagtgtacagtagtcagggtagtgaggcagaggaggaagaaccagaggaagaggacgacagtcccagggacgacaacttgtgagtgtgtcccagtgagtgggaacccttctggtaagggcccaggccccacacagacttgccaggacagatgttaaactctttggccaagggagtgcagggactagggggaactgtgggtgaaagcgccttcaaaaaaaggagacatacccttaaaacttgtgtgtgggtataaagtgatcctgtgagaaactataggaaatactgaaaagactaaaggagaaagttcaacttttctgataaaaccccatcccctgaggaaatcactgttagcaatctagtgtatttctcctcagtcttttcgtgtgttcatataattaactaagtcatattctgctttttttttcacttaacattatagtgtgaaccctttccagtaacattacaaatccttcgaagaacatgatttttaatgtctgaaaagtgtgcccttttgtggatgccccatcactcgacacttcctctattactggacacgtttcttagcctgttcccacactatcccttaccttaccttgcattttctaggatgtatatcagagaggaagcccttaccttagccacagtcttcactcccaaatcctggctgtctagtcattcttctcttcagttgagattgcctgtagggaaaacatgggcaggccagagtggggaaagctggggtagccaggatatctcagtttggcagtagagatctagcttgagactttccaaactgttttacatagtacctgagtttccttggaagaatcccaccctgaggtcatgggggctgggaagtggggaccagtaaaggaggaaggtatggctttgggtccccatctcagtgcctttgattgtttcaacatgagtttttgtttcataaagaatcctactgccccaggaggtaaaagggggttgaaaatcactgatccatctcacagggactgagcccagcccagagccatatgtggcctccccaagagggctcactggtgggctgggctcctggattgtgtttggactttggacatcagtgccagtcacacaaaggtcatctgcaggctccctcattaacatccctctcggtctttgtctcttttcccttagttttgggttagtgcctatgacatttgccactcttggctgggttttacaaacaaggctttaccttgcctgcctacatatccagtggtgctaccaggttaccacaagacactgggatcagaaaagctggaattaataaacaaagaggcaacattaggtggattaagacccagcctcaagggctaggaatgcttttcttttttttttttgtgacagagtctggctctgtcacctgggctggagtgcagtggcacgatctcggctcactgcaacttccgcctcccgggttctaagcgattcttgtgcctcagcctctggaatagctgggattacagacacgcgacaccacgccgaactaattttgcattttcagtaaagatagggtttccccatgttggccaggctggtctagaactcctgacctcaggtgatccacctgcctcaacctcccaaagtgctggaattacaagcgtgagccatcacgggctgccgcttttctcttgaactagattcccaggtagcttgctctccagcctcaggcaagggagtttctcctgtgtgctggtcctacagtcccagccccacagcactgatccccataggttctcagtttcaaagacagttgtttgttttcagagcccattgctcttttttgaaaattagattcagtcagaaaccatttcacctgtgcaaggacccccgcctgcaggagaacctatttttaggtgttaattttctttcttcaggaagagcaagcaagtttcccttctattaaaaaatgtctttgtgctgcaagagatgtttctctgccatctccccacattttctagtatgtaagagaaaagcagtctcaatattgcagccttgcctatcttagtgttgctccccagtaagctctgaaatgagaggtttatcttcttcagctgcagcagtgtccccagcaccataaggtcatagcaggggactcagtgaaacagcagatcccaggaaggctgaacctcaactctgcttcatcccgtaagactgattgatgggttgggccaaattataacttttggcttcagtaaagctgtacaacatttggcaacctgaggccaggacttccttgttcctgttgtttaagcccttagagctatactcatcagcaggctgtggcccttcataacctcttttatcttctgttgattagagaggaacgtaatgacatcctggctgtggctgactggggacagaaagtttccttctaccagctgagtggaaaacaggtatgtagccctgtacaaatccaattgcagtcatgcctgttatattttcattttctgagattctgttactattaattatacattatcattgttagttcctgcttattgagcatttgctgtggtaccagatactgtgctcactgctttgcatactttatcctattttattcttataaaacccaatgaagtgggtactactttccttatcaactttttagaaatgagtaaaccagaactcagagcagtgaaattatatgcccaagatctcacacagctagtaaatggtggagcctaggagttaaacccaggttggtttgactttaaaatctagctcttaattttgaccttactttcctctattcgctttctttcattcaaccagtatttatgagtacccactcaggaaagccctttcataaaggagctgctgacatagagctgggaaagtgatagcctctacctgcaagagctcacaggctggcggagacacacttgatagcaaagagcccctgtgtggtgtggtatgtgacacaatagaaagctgtacagatagacagctttttgggacacaaaagagggtaacatcactacttggtagagatgggaggtcttgttagaggttatctttgagcaggccatctttgagttaggctaaggacattgggaatggtgtttcaggcagaaaaaaaaatagcatgtatcaaggcaggaaggaatgaaaatatatgacagttcagagaatggtgagttgtacagggtgactgcatctcagagtttgtgacctgaaaacagagctgaagaggaacatgggggtatgattttttatttatttatttatttatttatttatttttaatttttttcgagatggagtctcactctgtggcccaggctggagtgcagtggctcagtcttggctcactgcaagctccgcctcctgggttcacgccattctcctacctcagcctcctgagtagctgggactacaggcgcccaccaccacgcctggctaatattttttgtatttttagtagagacggggtttcactgtgttagccaggatggtctcaatctcctgacctcgtgatccgcccgcctcagcctcccaaagtgctgggattacaggcatgagccaccacgcccggcctatgattttttgtttgtttgttttgagacagagtctcactctgtcgcctaggctggagtgtaatggctcaatctcggttcactgcgacctctgcctcacgggttcaagagattctcctgcctcagcctcctgggtagctgggattacaggcatgtgccaccatgtccggctaattttgtatttttagtagagacggggtttctccatgttggtcaggctggtctcaagctcctgacctcaggtgatccacctgcctcagtctcccaaagtgctgggattacaggcatgagctgccaccacgcctggctggagatgtgattataaaggacctgagtagtgtgaataagaagtttgaacatcatatactgtaagtattcaggagccataggtggcaggaagtggcatcacagattcttgcttcagaagaataacttgtttccatggagggtggattaaaatatagagagcatggtagtaggatgacttattagtaggcaggaaatgccaaggattagagtaaaggtgctgggtacagatttcacaccacagccaagcaagtgagaaatgcaacctgtgcagtgaagcctttaattgcgtagcatccttattcctcaaaacatgtcatgtaagagggaagagttttagatgtgtgtagcccagcttttgggccatttcttctacccctgccttaccattggtcatttcttttgtattcgagtaaagaaaagataaagggagcagataatgaagtattttctcagtttcccatggctgatttcctaaaactctcattttaattaactatcatctagtttccctggccctctctattcatctgcttaatgtgtgtacatcatcattcaacagatacttattggcacacctactgtgtacgaggcactggatgtgggtactgaagactcttgggaacaaataaccacactgcagtgggagggaatggggtcttgttgctatggccacagaagaaaagagctcaacatggccgagggccacaggaaatatcttgcatgtatgcagccccagagctcatgttgtggcccaaagtttctgcacgatgagcaaccttaacctgctgagatggtaaccccaacttgtttgggacagtaaaattgttttcttgctgggtgtcttcccttcccaatctaggaagatttagaattcaatataggatgatgaagtaaatcaaacccatacttttgtgttagtctgaggtataatttgtgtatttttgtcatttgaagtgttagtaatacttaaggggatctggcttaataataataatagctaacatttattgaattccaggcattatataaactctttacaaggattaactcttttaatccttataacaaccctatgaggtaaatactgttatcatcaccattttacatgtacgaaaattgaagcacagagaggctcaataatttgcccaaaggcacacatttagtctgtggtccaccctgctgaaacccaggcatactggtgccagaatccatattagaatgtctatcagattagtcttgcaatgaccattcaaaagttgtattgagtaatttcatatgtctgattttatttactttttgagaaaaggcctcaccctgttacccaggctggagtgcagtggtatgatcatggttcactgcagccttgatccccctgggctcaaggaatcttcccactttggccttccaagtagctgggactacaggcacatgccaccacatcctgctaattaaaaaaaaaaattttttttttttggtagagatagggtctcctatgttgtccaggctggtctcaaactcctgggctcaaatgattcttctgccttggcttcccaaactgctgggaatacaggtgtgagccaccatatctggcctacttctgattttaagtggaaagataagaattatatttaaagtgtatattatttaaggttcctaagcaatattggaatgcttaagcaatttgttacatttttcttcttggtgttcactgagctttttgaatctacacattgatatcgttctgtctttcaccaaatgtgaaaacattttggccatgatttcttgaaatatttcttcttctccattctttcctttcctctggaactctaattacacttacattagaccttttgttactgttctccaagtcatcgaggccctgttattatttttttaaatcccttcttttccctctgatcttcagattagaggatttctgttgttcagtattaaatttcattgactcttctgcaacttccaatatttttcttaagctcattcagtgtgtatttgtttcagttattattgcatttttccttttctagaatttccatttggttcttttttcctttttattcattacaagcgtatttttctttatagccttaatcatagttataataactgttttaaaattctcatctgcagctgggcatggtggctcatgcctgtaatcttagtacttctggaggccaaggagggacgattgcttgaggccaggagttcaagactagcctgggctacatagagagactccatccctaaaaacgaacaaacaaattggccagggaggtggcaggcacccattgtcctaacaactctgtaggctgaggtgggagtattctcaagctgaggagttcaaggctgcagtgaactcttaccactgcactccagtgtgggtgacagagcaagacctgtgcccaaaaagcaaacaaaaattcttatctgctatttctaacatttgggtcgtcatggttcagtctccattgatttttttcccttgaatatggttcacattttcctgctttggggaattttgaattgtactcaatattgtgagtaatatgtcataaagactcatatccatcatgttcctctgaagattattgtgtatgtttgtgtgtatatatgtttaagcaggcagtttactttgctgggctcaaaatcaaaactccatgttttcagtggtgtcagcagctgacatctctgtgcagttctttagctgtagctaggctgcttggcatcttgtcacagtttatagttcaagggtttccagatattcagtggagtttatgtgcagaatttaagctcttactttgcttctcttttctgggatttcccacttcactttccgggtgctgtggtcctcccaaattctatactcacccagcatgatggtgaagagggctgccctcaggcaaaaacccttaaaaaaatgagaagttcacctagtgtttgttcccttcttctaaatgtgcatgtgtcttcagtttctgcctgcttttggtcgccctgaaatggttgttgtttatagttggtccagagtttattgttgttactttgtgggaagattggtccgatgggaactagtgagccatttccagaagctgctagccttccatgtcgtgattcataagaatttttagttttcttgttaggttttctagcatcagataagtgctagggaaagttttcgttgctaggcatttgaaattcctatacaggaaaggaaatttgaatgtattaaacttataattgcagtttaaattggtgtaagggaattaatttaactaagttttaaatgggactggatatttaagggattttataatctgttcaaaattggatgccttaaacagtcaaagtcaattggctgttcactttaactagatttataaataggaaaatatttgtaaattgaacttaagaacttaaggagaaaccagttccctaaagttatttcttttataaattgaatattagtttaataatgttaatcacaaatcgtctttttattcacaaaagacacccttggggcagcaaaaaactccagtggtaataaggaacttgggctttagtggggcagacctgattaaccctgtgtctacagacaacgagagaagtgcaatgggataggcgagcacaagtgctgtgggaggatgaggggatggggattggagatgttcctggaggagatgacacctggcagacaaagtgagggaaagagcattcctggctgggtctaggaatggtgtggagtgtagcacctgtgaggatgtggaggcctgaaaaagcattgcccgcttaggaaacttacaagttcattttggctgagagaatgaccttgggggctgagctcgggagtttgacctgcatcctagaagctgaggaagcaccatcaagaaagagaaaagacaacccacagaatgagagaagttttacaactcatatatctgataaaggacttgtatctggaatatataaagagctataaagacagggctgggcatggtggttcacacgtgtaatcccagtgctttgggaggcagagacagggagatcacttgagaacaggagttcaggaccaacctgggtaacagtgggaccccacctctaaaaaaatatatttttaattagctgagtgtggtggtatatgcctctagtcccagctactgggggtggtgaggggctgaggcagaggaattgagcccagaagttcaaggttgcattgagttatgatcatacgactgcattccagcctaagccacagagtgtgacatttctctgtggccaataagcacatgaaatgatgctccatatcattagccatcaggaaaatgcaaattgaaaccacaatgagataattcgcactcactaaaatggagaaattggaatcctcatacactgctaatgcaaatataaagtggtgcattcacttgaaaagtgtagcagttcctaaaaaaggttcaacgtagagtttaaaaataaaaaaatataggccaggagctatgactcactcctgtaatcccagcactttgggaggccaaggtgggtggatcatctgagctcaggagtttgagactagccgggacaacaaggagaaacaccgtctctgcaaaaaatacaaaaattagccaggcgtgttctcacacatctgtagtcccagctacttgggaggctgaggtaggaggatcacgtgaagctgggaagtggaggttgcagtaagccaagatggcgccactgcactccagcctgggcaacagagtcagaccctttttcaaaaaaaaaattttttgccaggcatggtggcactcacctatggtcccagctacttaggaggctgaggcaggaagatcgcttgagtccaggagttgaaggctgcagtgagccgtaattgcaccactgcactccagcctgggtgacagagtgagaccccatcttgaaataaacaagaattaaaaaatgaagagaagtagtatgggtgtagttgcagaataaaggacagtctttaaactgaataaactcagctttataaaatacttttttaaaaaggcggagaaaagaagctgagggaacccattgaactataggaagaactatatttgcagagggaggggggcctttgggaacaaaaccacccacagtctccatcttggcggaggagccctgacacactcctgcactcctggagcacttgggtgggactaggggaggtgccactgactccaggagctgaggtttgggctgtgtagaggatgagtagggagatgcagaggcagagaggcctgtgttcaccatgggatgacacaggagaaaaggctggccagctctccctgtcttcccaactccctctaaagttggcgagaaaaagcccttaattgtattgcaatggttatggattcggaaatggtttttcccttgctgtgtgttctttttcctcagattggaaaggatcgggcactgaactttgacccctgctgcatcagctactttactaaaggcgagtacattttgctggggggttcagacaagcaagtatctcttttcaccaaggatggagtgcggcttgggactgttggggagcagaactcctgggtgtggacgtgtcaagcgaaaccggattccaactatgtggtaagaagagaaagtttgttctgtggggccatggcttgaagaggcactgagcagccgccgtgtctcgagtcacatcactggggtttgtgtctgacaaatgggggaatgcagactttctccagagagctgggaattgacagttctctcaccccgcaggtggtcggctgccaggacggcaccatttccttctaccagcttattttcagcacagtccatgggctttacaaggaccgctatgcctacagggatagcatgactgacgtcattgtgcagcacctgatcactgagcagaaaggtaagaggcaggtccagaccttgggaagagggacaggtggaagcaggtggaaagggctggtgacagggcacttgaaatgacaggaaaaggtttctctttggcgttttgcaaacctgttagccactgggtctgtgtcttgttttcttttttttttttttttggtgggggaagtagggatgccagtctccttgaggatctcatgaaagcaataaatcctctctgaaaaatgtaccaactcagaattttgcacataatttcaaggagtacatgaatttccttagtgagggaggatgatttatgacaggttggagccaggtggttgacctgcatgggtcttcgtggacctttatcctttctggtcagagtcactctggggtgcttctccctcagccctgtctccacttgcctcctggtgggtccttctgccagagatgagcagtggaattggattggcacaggctaggtcagaagatcagagttcccggcctcgcatagtcattctaagccctaagactgcagtctctccctctgtccacttaagttgctgtgctggttaaatagactcaatccacttacttcaggtgtattcatatctggatgtgctggccttagtgcactgctaggtgcctttgcaagggatccaggttgggggttgtcttgtagattcagatgagtgtcctttggtccccctgggggaccctatctttttgaagattctggctgtggtggttggggcaaagccccttgggcagcttcacagtgtcccccttagggacattttctccacctggtctgtagtgggagtgtagagcctggtgtgtaccagaaattacatgtcttccccgtttgtcaaggaggtgggcagggagcggccagaggtgaggtcagttacttaggcaggcttctgatcaccgggggccactagtgctgtgcagaggagtttatatttgtatccagcaagtgatggtaacagtgagtagtttatttccatactcagttgtcagccttggaccatgaagattgtgtcctataggactttggatcccagggttcagcagagttgattgtatgtattagatactctaaagatttttcaatgagagtatctcactttaattgccagtagcgctaagtaaatgatggcttttaatttctctgccttgcaccttacataacaacctcttgctagaactagatatttttttctttgacagttcggattaaatgcaaagagcttgtcaagaagattgccatctacagaaatcgattggctatccaactgccagagaaaatcctcatctatgagttgtattcagaggacttatcagacatgcattaccgggtaaaggagaagattatcaagaagtttgagtgcaacctcctggtggtgtgtgccaatcacatcatcctgtgccaggtgggcagcagcatgttgaaggagttgggctgaattccatttgtgctccccccccagtgatagggtgcccacctcatggttttaaaactggtcactagaaaacaagtctgttccatcaaactaagtggtgcttattggctttcattttcctggcatctggatgaaccagactctatcagcaagtcatgagccataaactggagaatgtttttttgttttattttattattttttaaaaaatatttttcttgagacagacagggtcttgctctgttgcccaggctggaatgcagtggcacaattatggctcactgcagctttgacctcccaagctcaagcggtcttcctcctgagtagctggcaccacaggcacatgccaccacacccaactaattttttatttttagtagagacgcgaggctgtactttgggaggctaaggcgggaggaatgcttgaacccaggagtttgagacctgtccagcttcctaaagtactgggattataggtgtgagccactgtgtctagccaagaataccttgttctattgcagaacatcttgtcatactgggattagatatactttaatgacttaaaacataaattggtgtacagaatgaagatagtttttattgataagcatatacacataaaatttgtatcaactcagtaattgtcaaggaagttttaattcctgaaagattttttttcatagaaaaatatttctcaagattcttagagagtgtctaagtcaatgccaagagaagtttggaaagactttgagagaaggctagcccagcatcttggaagtagaggtggatttagttttacatagttctgttggaggtgataaaagagaagaattccttaggaatcactgtagtgtaaaatactattaaaatctctcaaaagcctagaactgggctgggtgcagtggctcatgcctgtaaatcccagcactttgggaggccaaggcaggatgattgcttgaggctagtagttcgaaagcagtctagaaaacagagaccccatctccaccaaaaaaaaaaaaaaaaaaaaaaaattatttaattagctgggtgtggtggcgcttgcctgtagtcccagctacttgggaggctgaggcaggagaattgctttagccagaaattggaggcagcagtgagctatgatagcgccactacactccagcctgggtgacagagtgagactctgtctcaaaaacaaataataaataaataatcaaagttagaactccaagcggtttagggttgctacaaattacaggatagatgtggcaagtatgtgtacttttgagtgctgcctctggcctaggctgcctgggtgggggtttgcattgaagatctgaggctgaattgggctccgtggggaagccttgcatggagtcttggattaacgatgccaatcgtggggtctacattgggttagatagatggatactgaatgtgtaggtattttctccccttagggacagaaagatctccttggggaggtctgggggcacttattctgttgaatttccatgcagagctgggtttgcttcctaggagaaacggctgcagtgcctgtccttcagcggagtgaaggagcgggagtggcagatggagtctctcattcgttacatcaaggtgatcggtggccctcctggaagagaaggcctcttagtggggctgaagaatggacaggtgagtgctccctcacgtctcctgtcaggctgataatctgcatgcacacgtgggtgacccgtctagcaatgactctgagctgggttctcagggcaggaaaagggcttctctcctccatgggtgaattgtggggcagcctgagttcagttttttgaggacagcctcaggccaaaggtgctgtggccctcacactcctagcaggcccacgttttggcagagttgagctataacctttggctacatgtagagtgtattagtggcttaaggtctccagaaggtgggagatttgttagagatgttgcttctgtggatttctagagggaggcagagatcgttacctaggtcagctcctgattagggcagcgagtggattaaggcagtgcgttccagcatgtgtcctaaagaatgctgggtcctcaagatactgatagatgtcataagcaaaatgggccctttggccagttagatgtgggatatccaggttacacaaaattctgtgtgtgtgtatacatgtgtacacgtgtgttctttgctcagcataagaaaagttctaagtaggctgctacatggaactttgaaagtgacaatgtagctgcattagcctgacagccaagctgtgcagcagatggcttatggctgaggcttgtcaggtctttgctggggatggaagtcacagggcatgagagcagtgggtgaagtcaagcagcaatgccaaggggaggaagggccgcttatttctcaggcagctctcacttccaatgggagcatggactatggggtcaggtgggccggaggtcgtgttcttacttagctactcactggctttgtcatcctgggcaggtcactttacctctgtgaggctggttttacatgaggataataccacatatttcatagggctgtcaaaaacagatatcatcagggttgggagttaaagccaatgttaaaaacaaaacaaaacaaaaaaaacaccaggggtattaaaacaggcatggtggagggtacctgttttcccagctactcaggaggctgagataggaggatcactttgagcccaggagtttgaggctgcagtgtgatatgattatacctgtgaatagccactgcgatcagcctgggcaacatagcaagaccttatctctaaaaaaaattttttttaaaccagggatatcagtaaatgatagctatcatgatcactatcatcattattataattttctaccacatgtcttgtcagtgttcatagtagctttttcctgtgttagttcgtgactcagatctctgctaggtggcatctcctaaagctgcagtttgggtaatgtcatcaacaaatccccagtccgaacagacactgaagtgagctcggcctgtctcagggctgtcattacttctgcagcctctgatgaacctcgcttctggcctcctaaggataagccattgccccccacccccctctttcttttgatgagtccttttccctgcacagagcttctggtgaaggtggtgggagttgttcttgcagagcacatgggattccaacggcctggcagtgggccaggatcttgttgccatggtgactgacactgttttcgctgaaattttgccagatcctgaagatcttcgtggacaatctctttgctatcgtcctgctgaagcaggccacagctgtgcgctgcttggacatgagtgcctcccgtaagaagctggccgtggtagatgaaaatgacacttgcctggtgtatgacatcgacaccaaggagctgctttttcaggtgaagtccctgagggggcccagggacatcatcctttgattagagactctcctctagcttcccagtccctgcaggaggctctcctgctctggcccaggcaggtctctgggaggggcaggggccaagcacatgcacagagtcccagaggccctgggccacaacctgctcctcccacacaggcacaagccgcagggcctggaccggcctctttaactttggtttccttgccaatggaaaccgaaggctctgagccagcagagcctttcttaagcgtttaccatgaacaagaaatggggcaatgactctgagaggggtgtgacgttggcactcagtgaatggggcgatggatgcacttcctttgcagaagtctgtgtctcacctgctgcaggcctgcctgtgtctatgcgcacctacagcgtgggaaggaaacaggatgttttgtcatctgaaagggggaaggggatgggcaagcctggccttctacttaattcacaagaatgctagaagagccagcagaatgcgaagtgcttggatctttggggttgtaggcgttgttcagtggagtcatccagccctgtggcctgaggaagtgtgtcaccagagaagacagcccggcagctctgtgccccgggcctggttggctttctgctgggctcgcgccattctttctctctttaggtctttgtaggtggtcaggactggttttccagagtgaagttccccccaaagctggagcccctcctgactggtttcctcggccactgcagggtttcctgatgttatgggcagattcagtccccttaccaggctcctccttgttctcagcagcagaatcgatgggggaggggtctggagtggggagcagcctcagtcaattagaaggagttacctggccacctctagcccagaggtaactccatgtcagtctcaactcactcatgtccttgagagagtagaatggtttcggggaaagagagggcatagccttcaagctgacctgggcttgggtcctgcctgcatcccttactgtgtgatcttaagttagtgagcctctctgagccttaattacttttctctaaaatgaaattagtaattgccccttacagaattgctacaggaatacactagatactacagtgcctagctcagtgttgagcacaaaatggggcctgaaatgttacttcccttctccccagcctcacctcccacctatagggggcatagctggccccaaatgtgaatcttgtgtctgagcctagaatcatacaagtgtggaagggcgtctgtgctgccccatccccactgctggctctatggcaggctaggggaggtgattctcagccctgccaggagacatcagcattcccagctgtaacattgcctgctggcttttcctcttctccactgcccctccctctacacataaaacagctatattgattttttctcattataaaaaacaatccatgctgattataaaagatttagtcattataaaagatcctaggcagaaaggtatgagcatatttcaggagaataattttttttcaaaagtaatacttgcttactcaaaaattccaacaacacgcaggtgcatggaggggcttgcctctgttcatttctcttgcctctgttcatttctttgtggtcccctttcatccttttccctccatcccactgtaagcaatttagtgggattcagtctttaagagggtattgggctgaaatgtgtgagcgctgaccaagcccagggtggttctcacaggatccccactgtccctgttccccaggaaccaaacgccaacagtgtagcttggaacacccagtgtgaggacatgctctgcttctcgggaggaggctacctcaacatcaaagccagcaccttccctgtgcaccggcagaagctgcagggctttgtggtcggctacaatggctccaagatcttctgcctccatgtcttctccatttctgccgtggaggtgccgcaggtaactgggggtgcctgtccactcttagcactggcaaggctgacaagaccagggaagctgggccctttgctggtgctttggggagagagtagcaaggagagaagaatggcagctgtgaggtcgtgggaggcagtctgggcctggaacctgccgccctgtctccactccttgcaacctgtgtgactgggggcaaacagctcaacctccctgagtatcagtttcttccttgtcccctttctgtagggatgggaggggtatgcagtgttgtcagcagcgtgtgttttgcagagagcccagcgtggggccgaatggagtgagcagcaaagccgggagtccggcagggtgtgtgtgtgagtacgtgtgtgatggtggtgatgtgtgtgtgagagagaggggagagagagaatgagtgggtggggggtgtgggctgaggtctgtgagccaataagggagcatgggactctgcacaagctctctgaaccaggaggtggccagaacagaaatggggcactgaagggtggagccacagaatgggggagggcagaaccacagacaggcgcctgagattgacctcccgaatgcaggatggtctcccctccaccttctgcaccccaggcagatggtgctcactgtagaattgccataaaacagagacgtgcatagcgagaaactgtagccttcagcatcccatcctcaggacagaatcactcttaaacatgttgaaatacatctgcttagcgcttttctacgtgtatatataatatatgcataatatacaattaggagcatgtggttttataagaacatttttaaacaaaagtggaatcacactgcaaatacttttcatgacttttatgtgtatacgtattgctacctatagatggaacctcagatttactgtattccctgagcctggcctgtaaacaagacttctcatcccttcctttatggctatcttctcatttcacctcacattcggttatggcagccccatcactgtctatgaagtgctggctgtacactagtcatctggccttttcactcaacaatctcctaaagcatcgttctgtgtcagtaaatggtaaatgttcttattctgcatggcaaaatttagggtaattgtagactcacataaattgtaggaaataatacagagatcccttaaaccctttgcctagtttcccccaacggtaacagtgtgcatagctctagagtgatcttcccacccatgttggcatgtgtaatctcccaccacagtcatggcactgaacactgccaccaccacaaggtccctggtgttgtgctttttacagccagcacccctccctcctgcctggtccccacctgccttgtatttacagctgcattttattgtgtcttgtggatgttccacagctttctttaccagtcctactggacatgtttgctgcttatagcttttttgtattattgtaaatagcaggcatctttctagctaggtccttgcacctgtcccaacttggcgccttggcataaattcctagaaatgaaattgctgggtcaaagcacgtgtacctttgaaagacttttagggaaatttccaggtttcccttccgctaggctctgtcagtctgttttccccatacaactcagcttcaggctagagcccacttcttctaagttgatgataccctcgaaactcatgactgcaagacttactggggaaatgcccatcatccatgcctgacacagatcagctattcaagaaatgttagtggaattcagatctgaggaaaaagaccagaaagcaagaggaagaagggaatgaggtgggtggaagtggcagcaggacgaggggcacgaacagcttctcctggactgtgtcctcgtcatccttgtctgccccattacaaacccacgcaccacatccaccaggaactcatctccctcaattgccccaaactagctctgcttattttattaaaaggttttctcccaagattgccatcctgacctcaaaaataaatgcagtttgctgctctctgactgtggccggccaagaggagccagaggggcagcctggggcttcctctgccaggactttaagattcagcagcaaagtcttgctgactgcaccaaggccatcctgctgacgcagcgggtcaggactgccaagggttaggaaacacattctcaagacaaaggctgttcatctgtcgcctctgcctccggccatcctgtggttttggcccagagaggagggagaaagcatcagacccagtcttggaatttttggttgcctttcgaaatttacattgtcttgtgcaagaactggtttgtcagggctgccaagtaggacaacgagccctaggagggcttctcaaggcggtggtgacttcatgtttgaaatccaacagcaagataaagtatagctcagagagtatttgttcagtggggtctatttttaaaactccactcaaattgtgcctcccaagtaagtccaagtgttagccatccatcatatgctcagctgtgatatgcctgcctgagtgcctgtcccactcacggggcagtcagcatggcaagcagttggtgtggttcggggaaggagcaccagctttcagtcctgactctgccatctcaagcagctgtaactagagcaactcatttcactctttggggcctcatttcttttctgtgaaatggggttaattatacccatctttcaggtttcgtcaagccaaatttctattattatttctccttattactgactcataaaatagcaaaaaccacaaaacacaactaaattgcaacaggctgtacttactgacggactttagaaaggaaagctcattgtgtgctttaagaaaagctttcaggagtttgagaaagcttccaggagatggtgaaacttgatctgagccctgagaggtctggaaaggaagagtggagcagggaagcttttcaaacaaagggaaaggtgggggtaggaacaagactggagagcctgggagatggtgaggagctggtgctgagaaaatacagtgaaggtaatgatcatgcctgcattttgcccagtgcttcattatttttggagcacatctctcctttgcccatggtagcctgagctgggcaggacatctaaacagaagttaatggatttacccaaaaagtcaccagcctaggatgtggctgagcctggcctgggttctaggtcacctgctccgtagcctatgcctgctgccccgctaaagggagcatttaatgtgccaatgaggagagatggcatggtggaaaagataagcacttggaagcagccatgttttgctctgagagtagacagactcaaaataaaaaaaattccttcaattctaaagctaaaaaatgggactggaaatttcaaagacagacaaaagccccaaatggagaaaacaatacttcaagctccacatttgggaaccattagcacagaggtcctggctgatttctcttccctgcccaggaagccaggagagatgcaggccactgaagcacactggctggcctaaaacaagggcaaggcctttccttgttaaagatgtcatggcccaactcaagactcattctcaggcctgcacgcacatatgcacatatacacgcgtgcatacatgtggcaggaaggggcacagaacctggagtccagtcacctctggctattgccagctatttgctgggacaggtcatttgtcctctctgagtctcggtctcctgggctgtagccagggagaaataatacctactgcacaggactgtggggacagccaaaagccttttataaacctaagaaagagaagtcgttaggaactattcatgggcactcacagcaaggcaaccccatcttgtaggagggcatctgtccccagggcagggatcaggagagctgtttccagaggcttccagggtaacttggagcaaatcacttacctttcttggactcagtccctggaagaagaggccattccagaccgcttcctcccacgaactcattcattgtgtcagcaaacgtagactggggttctgctgagggaggccgatacaacccaccactgcccacggctgtgcacggctttgctgtgggaacaggcctgtaactgcggcacaacctgcgatctggacaaagggcagaggaagctgagactctttcccctggggtgggggcttgaggggcttgggaggactctgcagaagaggtgacatttcaacagggccttgaaagccaaataggtattttccagaggcagagtggggaggggcaaaggcattccaggtgagggtgacatcctatggcgaggcaggcctgtaggtgggaaggaggggaggatgggcagagagtttgtgctgtggagcacagtagcccagtcatgagagaggtgcaggatggagcacacagggtgggctgggcaggctgggcagggtgctgattggcggctgcagggctgctccccaggcatgggtaatcatcccacgcatctggaggcaggctctgtatgcatctggttctttccatggctctgaaaacagtcttctttttttcccttgatgaaatcctgcagtccgctcccatgtaccagtacctggataggaaactgttcaaggaagcctaccagattgcttgcttgggtgtcacagacactgattggcgtgaactggccatggaagcgctagaaggtttagattttgaaacagcaaagaaggtaagcatctagccagcaggagctggagtttggtccttgtggggtcccttaagaaggcagatggggacccaggtggcacggagaggccatagactgcagcagtctctggagttaggctgacctgggcttgtatcttagccacttcctcactgtgggcctgggtaggtgacaccctttctaagattgcttctctatagacgtaggatgatgacaggccccatcctcacaaagctgtgaggatcaaatgggaggatgcctgtaaagcctgacccaggagcagcatgtcagattctggctgtcactcttattagctgttctctgtgggaagcacctgactagtagcctggcacatcacaggcactccgtaaatggcggcttttattatcggtgtagtcactggccatgatgctgcacacaatgctgcttttcttagcatctgccaactaaggtgggagagatggtcaaggtctctgattctgacagcaatgtgggcacttcccacgtaccttcatggcgggattcatggacttgattcgttgtgtcctttcctggcctagtctatgaaagctagagagatggctgaaaacatctgacccctctctgcacataaggaaaagcccaggtatgttcctgagctgtgtttccatctagaacctcagatggaggaaggaatggcttccaacctccactcccctaccccttccctctttatctccccacagtcaattaatgagctgctcattttgtccatattcccgggctgacattgaaggagtggcaaagagggacgtgatgcccgccttgggttagatcaagacttgtaggcatgaagagaggagactggaccagaccaggactaagaagcctggctgagaacgagctgtgtcacataaggggctctgggacctcaggccagccactttccttggagccccagtcctcccagttctgaaatgggggtggtgagaatgcccgctgcagtcatgaggcttaactgagatgttgtaaaggggaatttaaatcagggatggttgtgcagatgctagccattactaaacaagggaagtgatcgttgtgtaacaatgatctagattatatttttagatgtcctcagtgtaggaaagtggagatggaggaggctgtaagaattcagaggaggggccaggcgcggtggctcacgcctgtaaatcctagcactttgggaggccgaggtgtgcggatcacaaggtcaggagatcgagaccatcctggctaacacggtgaaaccccgtctctactaaaaatacaaaaaattagccgggcatggtggcaggcgcctgtagtcccagctactccggaggctgaggcaggagaatggcgtgaacctgggaggcggagcgtgcagtgagccgagatggtgccactgcactccagcctgggccatagagcaagactctgacttaaaaaaaaaaaaaaaaaagaattcagaggagggaggaggcatctctatggagggagcttccctctcctgccccacccagaaatgccagcagggagggagacgacaaatccctagaatagaaaggattgtaaaaagccacaaggtttaatatgagtgtttactgatatttttataaatatatatatttttatatatttgtttaaatattgagacggggactcactgtgttgcccaggcaggtcttgaactcctgggctcaagcagtcttcttgcctcagcctcccaaagtgctgggattacaggtataaaccaccacacccagccagatttactatagttgaaaagtaagtgtatgtggtatatatctattgtgtacaacatgctgttttgaaaaagccacatgatattgaagataggctggatgttactatttcatctaaatcccgagtaccccacctctttactctgtgccaggcactcaggctcaccagcttggatatagtggttcctagagatggacagccatccccactagatggcagagaagagctgctgagctcccgccagaccctgagcagagctgcaggttcctccctattcccaggcttccctctgctgagctcattcaggggccttgtgactctgaccaggcaccctgacgctgcaaaatgtgtcaggttgaaggaactcggaaacagatttattaatgggcaaatcctagacactagcacagctgagctacagctagaaagacccttgagagggtgtcagtagcaggcccctttccacaaagaagatggttggagcccagaagcagagaagtaggctcagagcgaggactcagacctcgaatgctcctttccctcttggccactgtgctgggctttgcagggttgccctctcaaggcgctttaaggaaacccagatctagagggtgatgtgtaagacctacagcttgggacacaggtagtcttagccctgtgttccttggcccatgtgatgcccgcattgcccttttctacgaattcctcttcacaaacacttgtttgccaggttctgactctgatgcctcccttaacgctgcctcccacccctgctcatgctcagaccattcatccgtgttctccaggcatgtggttcgtagttggagagctcttagctctgggaggtgtcatgatctgtttaattgaccagctttccctgttagaatgtggacctctgaattgtggagggggacaggggccgagacatgtttctccctgggtcctcagtctcttgacaggaagcctggtcctgtgggatgaaaagataaagttgcattgtggtcacctgcaaggcaggccggggacttgctcatctcccgaggtcttttcaggagggaggatgccatgctgctgagcagaggctgcaagtggtcaggattgctctgcgtgttcagttcaaagggctctggagctgctgcctcctctaggcacaggtcagcccattttgaatggggcaataaatggtgacagcaaagccacctgaaagcagcctgacctggtggcttgtgctcctccaaaccctgggcagaatctgaaagcagcaaaactagcttagctaacaccagtctgcttgttcctcagaaacttctagaggtccatgagttaaagtctctggctttactgtgagttcaaggcaagggctgcaattttagggtttacataaagagtttgccttccacagacttggtgggattcattccctacccctccaccttcttccagaatctgtctttataccctctcagctttcccctcctctgctccctctgtggtaccaggggctctgggtcccctgtgtctgtggcaccactgggtaggcatagctgtcccctgcattctacccatgttgccaagatgtataggcagtctctcatcagtccatgcatctcatcctctcctgctgtgatgctgcgtgaccccccagagggtcagaccggcttgttcttctttgggtctagagtctcccaaggaggcaccgccacagactgtggcatcacggttttgttttacctgatctcaaaatgactgatgcaactgggatgtctttgctgttctttacatggtccaatcccatggataaagccatgcctcgctgggtggtataacctcctgcacgcacgatgattaatctgtgcttgctcccttcctctcctctgtggctcactgtctagatagagcttgacttcccacccctagccaatcacccacttttgaagccaagaagacagcttattttattctttatttcttcgccacaggccttcatcagagtacaagacctccgatatttagagctcatcagcagcattgaggtaaaagatgaagcatttttccttctcaagaaggcatacttggggttcctgttttaggggcagcccttctaacaggcaagagccttgaggacatgggaacagagctcactggcgtctgggcatctgggccacagccttgctccgggggcagagtggccacactgggggagacaacagcaggtagtgtgagctgttgtgtgatagctgggtgaggcacatgggttccggatctctccagggttgggtttctagtctgtgaaaagggattggacctacctcacaggctgctgtgaggattcagtaggttctcaggaactggtttgcatcctcctggtggcggatagctggtcaccatcctctcagactccagtaatctgatagtgttggaggagtttcccaaatgcacatgagctgagctccattccccagaaatggacctggggagcaaggcccacagtctgaactgagcgccccagagttctggagcaacccctagccctactgtttctggctgagaatattgaccttgtcatccaaacccaataggcctgcagtgtgctaaggaagctggttgtaggtatgccatttgctgggtggtggtcaacactatgctttttttttcttttttttttttttttttctgaaacaaggtctcactctgttccccaggctcaagcgcagtggcacgatcacagcttactgcagcatagacctcccaggctcaaatgatcctcccacctagcctcccaagtagctgggaccacatgcatgtgccaccccgcctgattaattttttgtatattttttagagcagggttttcccatgttgcccaggctggtttcaaattcgtgggctcaagctattagcccaccttagcctcccaaagtgctagcattatagacttgagctaccatgcccggcccttagacactattcttaatttctgtgtatctcagtgctgtctggctgtctgttaaaaggcatatacattttttctcctgaacatatttattgtgaaggtatgggaatgtgagatacatttgaattcccagttggaaacagtgaggaaatagcaaatgtcttgtccctctcattcatttccccataataaacacctgtcatgggccagcccttgtgccgagctcagtgggcacagagctgaggaggagagaggctgacaggagctcacagcctgctaagcctcataacgtaatctgctctgtgccacatgcgtgatttatgtgaatgctgttctagatcctcacattaactgaatgaggcaggtactgttgctctccctattccatgcaggaggaaattaaggctcagcaagacgatgccacatccccatgggtccatagccaaaaacttggtggaattcaagcccagtctatttcctaagctcatgctctctcggccacataccctccctacccgcgtgttgtaaggggcatctgtatattctggggtttacctacccgcgtggtaaagggcttgttcggagctattgctcaaaatgcccagtgctgctgactttcacttgtaaatccactggcctggatctgggggtcttcacctgaagccaaggagcataattttcctctctacaaaagtaactgctgtggggtccaactattacttgtcacatcttactggggtcaaaatgtagtcctctcctcgtatgctatgagctgggaagtgcgttaaagtaaactcctaagattgtctcttgaaaaaaagtaaagtgcctttgagtgtgctctatatcgactgcctgcagacttatttgcacacatctgggtgctcagcataattccagagaactgcagatccttagtgggtgccttttggataggggagatgttcttgtcctgctgacggggggaaagaacctgcccatgttgacatgcacctgctgagtgccatagatcgtttttattggtcatggtgatatcctggggcctagaatggatatggcctgaatttcatgtctagtaaaaccttttttgtttgtttgtttgttttttttttgcagagatagagtctggctatattgaccaggctggcctacaactcctgggctcaagtgatcctcctcttttgacctcccaaagtgtagggatcacaggtgtaagccaccatgtccagccaaaatcaatcttttatctcacggcaagatttcaattcatttccaactattaggagttagtttgtttgatgagcctgagctgtgtgcaggtttttagaatgataatttctgtcagtatggaagcatgttgcctccagctgttaaaactttcaccagcttgtctaagagtttgattcaatgtcttatcgtcctccaatatgctgctctttctagaaaacaagcaaaaggaaactgctagggctcagggtttgggtgctactgagtgtttacaaatactcgagctgtagacaagcgaatgttccctgacacagaaggaagaagctttatcctagctgtgctaagtgtgtgtgtgtgtgtgtgtgtgttgttggggacatcacttgcttcaaaagactacattgtgtgatacaaggaatatctggagtcagacagaactgcgtccaaattccagctctgtctgaccctgacctgttcctcttcttgagtctcagcgtccttcactctaacacttgggtagtgagacctaccctgagggtcactgagaggaataaaggggccatgtgtgtataaagtatatacccagaacctagtggatgttcagcatgcgggatttcttaccttctctttagaagtagggatatcgtaagacttgtcatcctattttattggtctccctcttgggcagaaaccctaaacattctcctgctctgtcatccccatgagccacaactctgccaaacggggcctgcggatttgggagatcttgggagcttaggggtcatggatgagtcagagcacacactattcaaactattccgtcatagccttggaatacacaggaaagcaaccctgaggaatttccattaaacaaacaaaggtttgcatctttttttgatctttgcttgtctggtaaaagcctgcttttgttgtcaagccttcccagcgggaacctaggggagagagacaacagccaggagccaagcccaggttccagtaggaaggcccaggggcctcacttgaaatagccacatctaacctttgtaaaggctgcttcctgcccatggctgcagaggccatttcctttgcttctaatttttccaggagaggaagaagcggggagagaccaacaatgacctgtttctggcagatgtgttttcctaccaggggaagttccatgaggccgccaaactgtacaagaggagtgggcacgagaacctcgcgcttgaaatgtacaccgacctctgcatgtttgagtatgccaaggtaacctaccctgtcccaggcccaagctccagcttggagcccactggtattctcacgtgcggtgtccaagttattttccccaagagtgctgcggacaaaaactagcaatggtctcagaaaggatgtggggaaactggtaaacaaaggacccatctacagccactggttgaaactcacctaaaactgacctttaaggctgacaccaagggggcagactatggcagttcagaccttcatcagtgacagggctggatggctgtgggtctacaccagcacaatcccttcattgagttgagggctcagggcttcagggctgtcccccacaaatcctctcaatccttgtcaggagccgccaagaatcggtgtcttcaggcaggagccggtcctgccgatcatgcaggacgacatggtgcctgccagccaagtttcccatagcacctgctgattgtcctggacttctcactgggcttctgggaagtcaggcagagcctccgccctcccatgttagcgcagcatgcctcacgcctgccggctgcagagtggctaccatgtggttgcagtgggtgatggcagagattcccttttgcattgggacggcccccatgaaccttactccccagcagagctgggccttttaaggcaggtgtaggagaggagcttcctggaccaggctcctgatggcttctgtgggaaggagttgcactaaggagcccagagcagtcaagacatttgcagttcagtctaagcaaggttcaaagaggcttcggtacactgggcaatgagggtcttccttccatcaaggggctttgttaacctgccttttctggaagtgtcaaaagtggctctcagtatgttatgaagtgactcatcagccataacctattggtgggctactaatggtagttctccagctcacaagttcaagatggaaaatcttccccacttttttctgcttttctattcctgaagatggctgtgctcttccaccacctgttcgaccctggggctgaaggtgtgtttggtggcctgtgatgttgcccaggacctattgttcatcaggacttggacgagctcctgggccccagcctgtcttttcaccttagtgatttcttcactccgtacctgagacccagggtgttcaggctccctctactttttcctcgtcacctttcctaccctccctcaggccccaccaaagacacctagaagatttcataacacattcatactgagatcaccagagtcagtgcatctctgcttccggggataacaaaattttaactcaggatgaacccttaagggatcaagaccctagaggtagaatttagggttgggaacccctgaggcctcctcaaggaggcagctgtgctgcagtagaaaatgcctgaccaggctgggcatggtggctcaaacctgtaatactagcactttgggaggctgaagtgggtggattgcttgagctcaggaggtcgagaccagcctgggcaatatggtgaaaccctctctctaccaaaaatgcaaaaaattagctggtgcctgtagtcccagctactgggaggctaaggtggaaagattgcttgagccccagaggtggaagttgcagtgagccaagatcacgccactgcattccagcctgggtgacagagcaagacccatgtcaaaaaaaaataataaaatgcctggccttggtgccccagagctggtgtgagtgcagtttctttctgtgggatgacctggggaaaggctcttcggtttgccaaacctcccttcccttctcagatggtaatagcgacagctcagtttagtcatgagatttgcacagaataatgtataggaaagcgcattagaaatgccaacctgtagaaagattaggaagatgagaggggccacacgtgaccacagagtggattttcatacctctctccctggctggccccactcctgcccctgctctgaggcccctccttacactgtggtggacttcgtgtgcccacagcctcccaccagaactgcagcccatttacacactccatttgctccgtctctctatgaaggtaaatactctgggacttgtttttggttttagtttttgatcactattccaaggaggttggttccttttcaatcccccctgcccccacctggtagtctgaatttgagaaatatgtacctacacattatgtggggggtgggggagatctagtcctgattaacgtggcatatttttgtttacttgaaaattgcttcccaagattcaatctggttttcagaaaattttaaaattacattcccacgtacaaataaattgtatgctttctggataagtgacatgtttatatggtgataaagggaattataatgctcttaactcttatgtagtatgttcttatcaaaatcaccaagcatgagaacactgtttagtctcattcatcactcagcacagcctctttctgtccacttcagggccaagtctttgccatggccccagataatgtgtaacttagcttcaggaaagcaaaaagcctttgaatttccagtttgctgagccttgaaggaagcttttagacccagcttcaatgaagtcacagctccctgagtgaccagctggcctaggcttatggctccctctcagcctctcacccttgccgtggtcacccctggtcccctgagcactcactgaagtccctttgaaggacatttctagtctcctaagatgcctgttttcctccagctgccaccctcatttcaccagccaggtaggcagggtttccagcttcgtgctggcatagagaatccgcgccatagcagctgccagaaggaaaggtgtgtctgtaaaggcccaaactaggcggggacagcggctgctttccaagccccttccctttgtcagctccagggagaaccaaaggccagccagggggcctgtcttctattgggtcccagcatcagggtatacaatgcgctttcctccccttcttaaaatgtatcatatattaggccgacctaatactctgaaagcacatttaccctgaaagcaaatgagggaaaaaagcgagctaattgttcaagtggatttttagcatacattgactgtacttttctgacacatgagtgttaatcatggggaaaggagtgctttttttgttctcagtgaggctgacacaaagtactctccacagggtacattattcctgagacaaaccacttcttaccagtaacatagacctgggctgtaagtgctcccagtttccctttttgaaaagctccacctttaaaagctgcctcaattctggcaaactcccacgtgtgtattttgggtaactactctgaaaagaggtggtgttctgaggctgtttctcacacattgtagggccagcccagagaagctgggcataccacttcagaggtatgctgaggccgaaggaacacaggccctaggcctgatctctgagcctccaggaccacagccatctcttccttctcaggtcctctcctgagcaccttccctgcctcagattcccccatggcctcctgctgtcccactgtcggatcaggttctcacccctgcagacctgacctcagcacaggatccctaaccattcagctgagaagcaactaaccagagagatgtttgcttgttatctgttccaggaaagtaactggggcaaagacaatgtgatgattctctagttcagggcacagaatgtttgctggtgactcagagagggcatggagggcacggagggccggcaaacactgtaagtcattttgtttgtgtaagtttaggggaacccatgctcagcctcactctgaagcatgtggtatcacccatatgatctgaataagatgacaggtctcgatatgtggaattgtgcaccaggttgtctcattgctgtttaggaacagtcctgtattgaccaaactatgtgagagagagacagcctgatcatgaacccccgaccctgcagacttcatgtgcagtgccccaaatagtctagaaagtgttgtttagccgatgaacaaatgcccatttgtgagacgggaaggaagcactgggggccagcgtccctgatgctgtcccaggatcccccaggaacacctgcagggcagcctgagatcactcttcccgagacctgggactcccccaactcagcccctcagggccgggccctgcctacctcctggttgcctgcttcagccatgtggagcccgcccttgctgctagaaaagcctgatgtaacgctggcacaggaagttctgatccagagtgtttttgtttgttgtgcttcctcaggatttccttggatctggagaccccaaagaaacaaagatgctaatcaccaaacaggctgactgggccagaaatatcaaggagcccaaagccgccgtggagatgtacatctcagcaggagagcacgtcaaggccatcgagatctgtggtgaccatggctgggttgacatgtaggttttggtccctgccccgagaagcatttggcagcatgtcatcacatgtcacctcttgactgacaagggaaccaatagtgcttttctaattatctaaagctaatgtgatagtggctaggttcttcaggagacacagagattgcacaaggcagtggctgccttccaggagcttgtggagtcactaggggaagggatggtggggaccagggaagaggagacaccgggacatcacagctgccatttgctgagcgctcactacaacccagacgctgtgataaccttccaggcattaggttttccacctatgccatcagggctggtgtctcctcgcccaccttgcagatgatgaaacagaagctaaagggacaagttattcccaaagtccagatagctggaaagttgtagagctgagctttagcctctgatctgctggatgtcgatgccaactacgcgtgtaatggtaggaacaaaaacaaaacaagttccaaatccatcagggaagaattcttatgggaggaaccatggatatcttctcttaggagacactctttccatgaagggaccttaaagaattccaagaggtaaatagagatggcgggaaaggatatgcaggcaggaagtacagcagaaacacagcgagttggctctggttggaataaaagacgtgtgggaatgggagggtgaaggacatgggctgtgggttgggggaagtgggctggccacactggaagggcctccgatgccaaacggaggtgcttagatttgccaatagtgagtgaccacctacagtcagacaccccctcaggcaggcaggtagaatggagaccagataactggctagtgcagtagagcaggagggaacttggtagctgagggcatgagagagaagtagcagtgttagaaccaagtggcccatcccagggtgttggggcagtggtgagtgtcaggctggctttgctctgtggctgctggtgggttacaccattcgtcaaggtggacaacagggagaggagggggttggggtggggcagcactgagacaggatggattcagccttgggactcagcacaccggaccttgagggggaaggctttgtcctcccagtcagtgagcttcaggctcaagcatgtgcacacacacgtgcacatgctgctgcggtaggcaaaggacacgatgggacaagctcctgagggtggctcaggctgggtcctaaaggctgttgattcttctggaaacaacgttgtggtctacaggtagcagtggcccagccaggatttggggatatggaagaggctggttaatgattaaattgtttccttgggtgctgccatatattaataattggtgtgtgggcccctcacaaagggaccttgatggatgtcctaccaccccatctttttcttgtccgatagtaatttttttaaagacagaggcacagattttgttccccacattattctttaaatgaaggggttcatatagaagagagccaggcagatttagggtgctctgttctctcttctggtttttcttgtcactttcatttgtaagtgctatagtatcaggttaccctgagggtacttgagtaattcaagaaacacattaagcatgttctgcttgctttccagatgtggctataaaaggtgtctttcctccagggacgttgggtgtgatgggtgggaaggtttctaaggctgtaagggctgtctatgccacctttccctaaaaacgtgtcctttttctgctgagcagtgttatttttagatgccattattattctaagtgtagactgacaggcctccgtgccttgcctgtctccagacagggattcgttacagctgcttctccttcctttctcaccaagactagcctgggtagaaccctttctcctgggagagttagtttgactccaaattccagcctgaccagagagaacaagcgcattctatccaggcctcatgtccccatgagtgatgggagggctgctcaccatggggaagcagtggtgagccagtgggtccctgcagctcctccctctttggtcagcacgttggccaggaggacagggaagacttcctgcaggcctttgtccagagctcagagcaggccccacactcacctcttcctttagagggcagtcattgaggtattcttatgccttggcatccacttttccgtgagaattcctgcacccgtggtggaaagagtgctgggcccagtcttgggctgggtgcttcaccttccccacagactttattcttctcatctgagagatggaaataatcatgcccacctcttagggtggtgaagattctgatttcacgcatgggaaagctcatggcgtcatctgggtacctggtaggggattaggagataattgtttctataccctgctggatagctcagtgacttccgagaaagacacacaaggtggctgacaggatcctgtaaaggccacctctcccagatcctggtgatgtttctggagtgtgtattcatgcatttaataactacccactgagcaactcccatgggccatggcatagtatcaacactggggaccacagaatgaatggacatacggcttgccgttgacaagacccagagcccaccctcctacctgccccttccctctccaggttgatcgacatcgcccgcaaactggacaaggctgagcgcgagcccctgctgctgtgcgctacctacctcaagaagctggacagccctggctatgctgctgagacctacctgaagatgggtgacctcaagtccctggtgcagctgcacgtggagacccagcgctgggatgaggtgaggggaaagcaggcctcatgggctggggccccacctgagccctgggacacaggcgggtgggtacaggggccctttggggttcagatggagagaagctgccctcgtgatggaaggaacattgggctggcagtcaggtaacttaacctcgaattctctgagccacagaatcgtggagggcctttccacttgtcccttcattcagtcattgagaaaatcgttactgacagccagctctgccagggtggtgacaggcaccggggatgttagtgtgaacacgacagctccagtgcctgctgttgggctgagctgcctctgaccagcaccacaggctcagacacatggctgatgtggagatgcacctgcgtgacatttaaaacctgctgggtagcattttggcagaaagcaccatctgtgctttccagatccagactgtgagagccatttcaggggccagttttttccctcccttctctgcccccaccccacaaccactacttctctctggtgtcaggggctgtaaagaattagccaggtcagcgagaaaggtggccagcctcaggctggcagaagcagctgatgctgccccttctatggctcaacccccaccctccagctcactggctccctgttccctgcagagaaatccatccccgagaggattaggagctgtgccaagatcctcccccgactcacccacccacccatcatggtccattttagagtgaaagcaaagccttcactgagaggagccgtctgactgttgtctgctctctgaacagctccattggtgaggtgatgaggtcagtcatgagaaaaggtggggctagggacagaggcaatggtggcttctcaagagaaatttattagatttcccaagcagcatagattagagcatcttagaatgactcagacctcgctgtgcatcaggcagactttctcaccatggctcatgtccggttctcctggcctgacaggtggttctggggcttaggtgagaagcagtcagtgggtccatacagcacgaagcccacagtcatctttgacaactgataagaagtggtgatgatgataatgtcaattctgtttccttaggtgtcgcccgcaattaaaagaaatctgtttgcagcactacaggagcccacgcaaaccctcaaaataaaatgtttccgattctgtgccgcttctgtggtccagaaacagactgtgttgttactgaatccagtcgcttgcatattgctgttaattgccttttgttttcgaagagctgatttgtttttgcatttctgtgggtagttttttgggggaggcactctccccctctgagttgtcaggctggcaaaatatgatgtccctaatggattcagccaagtacagtgttttcatgggggctgcaggggcagctttattaagacttcatttgctccttcccccaggcctttgctttgggtgagaagcatcctgagtttaaggatgacatctacatgccgtatgctcagtggctagcagagaacgatcgctttgaggaagcccagaaaggtaggcaacacagactgtcaccttctagaaggagcaggagaagttactgccaagacatacatttcaggaaggctaccaagcccttcccatctgtagatcccaagatagatgacttcatcctggggatgtgattgtttggtggtgaaagactgtggagcatggaaagaccattggccttggagtcacaccctcctgggccacactcacttgccacaggcccttaagaggtgctgcctcctctccaagcctctgtggttactgagcaaagtgctgtgcactgcagtgtatcttcccgtttaatcctcgcaacagccctatggtatagctaccatcattatgattcccattttgcagatgagaaaactgaagggtaaagaggtgaagaaatttgcctgaagtttcatagctaggaagtggcagggaggtaatgtgagccagggtaccatgaggacaataagggaggattgccacacagtgtgaggcatggtctctactgagaatagaaactcagcttctatttctggctcagataaacgggtgacttctgctcctcaagaattctgttggtaaaatgggctgcacacagcgtacaacagcatctgaaataggagttaaagcaagtatagaactttcgctgatgttattaatcatattttttaaagttgacttccctctctgtgtcaggccctggctgagcacttaacctatgtaaccttgaatcttgccaacagctgtgcaaggacgaagaggctaaatgtgccatgccaagtcacaaatctagtcagcagcagagccagaattggaccagtacctctctgactggggaacctgatttttctgttttgctgcctatttagccttctaatggaagttgggtgtttgatgttccatagcatctgatttacgcttctatatggtaaccgttgccctctctggacacattgcagaacaaatgtctccctgttggagcccctcaaccgaaagccctcattgaaggttagcgcattctctgctgcttcagcatttccagagcacccagttgctgaagtatctgcatgtttgggcaaaacacatcaacctatccatctgtctgtgtctgcccttccaagaatccatcaccatagtaacttggtactcagacaagaggttgtagatgagaacggaacaaaggccagaccttctccttctctgaaggcggaggattaggatcatttgagtgctctcatatggcaagtgtcatggctacaagtgcttcactggcagccaccaacatctcaaggggctggccacgtagtaggtactcagaaaatatctgttaaacagtataggaacgattgagagtttttttgcttgttttcacaaatggttgtgataactgaggcagatccttcaaagtggtcattgaaaagcagtcatttgaagacaaactgaggacttgagttgggcttggttctgggaccttgggtgtgacactttacctccattttgcaaagcccatttcattgctcataaaaagggggataattttccttcttcataagtctgtggtgaggatccagtgaggtgattagcaacaaaagcattttacctccaagtgcagtaaagtggcaggtcctgtttctatcaccttaggagtcacaaaactttgccctggaatgagcagggggcagaacctcactgaagatgagcaagtttcactcttagactttgccctggaatttggcccctccagtttttcctttctgcatgcttttcaaagtcagtcgccttttcccagccaaaaaggaatttatctcactgtactttttccaggatgtagccttggttatttagagaagcgccatcccagcaacgaagcactgcagatgctccaatgagtgtcctacttccaaagcagccctgtgcaagccccacagagctccatcctgcctcctgtgtgacttcctaaatagcatgtgcttttttcctccctccaccactcctacagcgttccacaaggctgggcgacagagagaagcggtccaggtgctggagcagctcacaaacaatgccgtggcggagagcaggtttaatgatgctgcctattattactggatgctgtccatgcagtgcctcgatatagctcaaggtgtgtaaacatcagccagaccactgttttcccaagccccactctgacaccaagataaacatcagaagagctgggacattttaattaaagccctgggcttgtttattgggtgtattgtccataagcctgccttgcagtggcgtaatctggtgtatcatctttttccagtttgcccatcagaatggtatgaggaccgtcctggggttatggttggcaggtccagccctgcattgctaattcagagcatatctctcccctgctacctgggagcccatagctggacctgggtgagcactgggttttaaatttttttaattaaatgagaagatgaacgagagatggctttacagtaacacactccagattcttactcatcccagccaggaaaacagtttcaatattgctttctttcacaagacttcccatgatgtactgaaggagtagtggaagtggaagagacaaggagatgttcttctccactggacaaggccacatgcaggggtgggaaaaacactggcatggaagctgcaggtgacttgtagcaagtcacaatccttcctgagctctgcatgcccatctgtcctgtgggagtcccttgtcctggtccctttggttgctgggagcctcacagagtcatgcttacagtttgaaaattgtcaagcctaggtgtaaggtcgcatttttctgtttgggccagtgccttatgcttctgataggagcagcagagggaagaggcataagatgagcatgaatacagttggtgtctgcctgcctttgtcccagcaggctcttccgacacatcttgggtcttgctgcagctgtcgctcccccaggggaataatctgggagggtgcagtgagagatctggaaaaaatatcctcaaactccctggccttatgccctgtccacctaagaattcaccatcctggagtggccctactcctaagcagagtggctttcccctcactacactttgtccctcaccctggcacagacactgtgtggtgggagaactgatgctgggaaaagtactgttgcctggcccctcctcctggggccagttggcagccacagacactgtttgacacgtttcccctcccacccgctgcacacagcagatcctgcccagaaggacacaatgcttggcaagttctaccacttccagcgtttggcagagctgtaccatggttaccatgccatccatcgccacacggtaaggtggctgggtcaccagcacctgagggtaccatctcctgagctaggggtcccgggcatatctaaagagcagcagactggatggaatgtaacccactggtcacagtgaactgctgaggaatcttggtctcctctgggaagaaaaagtttgagtttctttgattgactgtttgtctgccatgcatcaagcagtgggctcctgaattgtgatccagagctggaatgggccttgctagttcctcagtgcaggctttgatgactcagggaaactctgcattaaccagcaagaggggtgggagttccatgaggccctctccttcagtagggcgaaggcccagattaaccaaaggctcgagatccctccctggccctgtcagtgatttgtgtgttcttcagcaattcactttccctctctgtccctcagtttccttctctgtgaaactagagtgttggcttggtctccagaaacccaagtagttctttttagtcactccctgattcctttgagaaagccattttaaatctctctggtggcaatggggaacaggtgatgggttgtcaacagcctcttcatccactgtatctcctcaatcacccaacagatgttgagcacttagtacctagtaggcaatgtactgagggcttcattgtatcaagtcatttcctcctttcaaccacactttgagggaaggactgtcacccccatgttacagatgagaatgaagccctagacagagaggtctcagaggttattaggttggtgcaaaagtaattgcggtttcagactgaattttaaatcattataactaggctcaaacacatctttattaattaaaataggaaccattatgatcaacacatttttgccaatgagaaataagtctgtttatttctgtagcataaaaatccatactttgggatttgacgaactcttggaaagcattttctgcatcctgctggttgtggaagcattttccctgcaaaaagttgttgagatggttgaagaagtggtagttggttagcaagaggtcaggtgaatattgcgatgaggcaaaattttgaagtattggttgtgtgatgtgcagtcaggtgggtggagaagaattgggccctttctgtgaaccagtgccagctgcaggtgttgcagttttcggtgcatctcctcgatttgctgagcatacttctcaaatgtaatcatttcaccaggatcagacaactgtagtggatcagaccagcagcagaccaccaaacagtgatcatgacctttttttggtgcaagtttggctttgggaactgctttggagctttttctcagtccagccgtggagctggtcatcacggttgtcatgtaaagtccactttttgtcacacctcacatctgattgagaaatgttttgttgttgttgcatagaataagaaaagacaacacttcaaaacgactatattttcattttctatcagctcatgaggcacccacttatcaagctttttcaccttcccaatttgcttcaaatgccaaacaaccgtagaatggttgacattgagttcttcggcaacttctcctgtagttgtgagaggatcagcttcgatgattgctctcggttgttgtcaacttccagtggccggccactatgctcctcatcttcaagcctctcatctcctttgcaaaacttcttgaaccaccactgcactgtatgtttgttagcagttcctgggccaaatgcgttgtcgatgttacgagttgtctctgttgctttatgacccattttgaactcaaataagaaaactgcttgaatttgttttttgtctaacatcatttgcatagtctaaaataaacagtaagtaataactcattagcaaaaaaacataaagcgagaaatgcccgttgaaatgatgtataacataaccacatttaagaatgtattctactatcaaacagcaaattccagagccaatatgtgagtctcagtagtctggcactggagcctgtgttcctagcctttccctccctgtctccttttagagaaagcaggctagtatgttggtttagtgggtaaactcgagagtcctcacacacaaatgacactgtgttacttatcttctctggccttcagcttctttctctataaaatagggataacagcactatgtacttgatgggattgttttgaggattagacgagttaatattggaagagtacctagcacagagtgaccctaggtggcagctatccttactgctgctccaggcaaggcttcacgccagctttccctgacctgctccctccagctgggcatctagcatttctcttttttcagagatgaggtctctgtcgcccaaggtggagtgcagtgtcatgatcatagctcatggcagcctcaaactgctggactcaagtgatcctcctgcctgagcctcccagagcactgggattacaggcatgagccaccacgcccagccttcccgccgttctttgacctctcaaatgccctgccttccaccttgggcatttctttccctctaatctgtgctgacttctcagcacattttttgcctcttgggaaagtctggcaagaaggactcctgacaggctctgtgcatgccgtcagtctagtgttacatctcttcccacagcagggtcagtggtctcaagggacctcatcttcccttacagtctttggctttcctgaaacgagaccccctcagggtccctcatctttatcaggtgctcacctggagagaaaccaccacaaaaggagcccagactcaacttaggctggaagtcagggcccagctcagcctcactttgcccaagccactccagagcctggctctcagctccttccctcagacttttctctcgctgctccctgtcctcttcctcacctggggcatggggctgagggctcctgtctctaacagctgagctctgctccaggacctacatgggactaggagctaaggggcctcagaccagctggggccctggctcttatcccagctgaatcttattaattgggccattccttcattcaataaatgcctactacgtgacagaccctgtgatgagacctggtgacacggtggtgaacaaaacgttgtccctgcagtcagtcccagtctagcaaacaggacaatccctcaggggaaacgtttagaggcctgtgaagagacttcctggaggaggtgtcctctcagccagaaggagggagagaataaaaatggggcaagtgaagtggaggaggattaggaagggtgtttgtggcaaaggtcacagcctgtgcaaaggcctggaggtgagtggtagtttgtggttcagcatccagggcccagcagagcagcactgattcagggcaagactggaaagggaagttcaggtccttcctggatacatggcatctttcccagaggaaaggactcccctgctacctattctctctgggacgttacttagcttccctacctagtgcagtagaaccacaggcagagttcatcttgttcttaccctggaaaggatgtggtctcaggttttcttgggttcttggagctaacaaaaggtatagaaatttacgtgtgaactaaatagaaaatgctaagctctgaactgaagaagtgtagagcaaagtgagtcctcaggagttcagaccaattaggggttaagctttggtggctcagtgatgagtagggcctcacaagacccttcttaagtgctcacaagaaagaggagttactggcctgctgtaatcctcaccatctaaagctttattagaaatgggcaatctcagtttatatacagtgtgccagatgccttcaaaataaggtattcttaaccttttgtagaccctcacacagaaaattccttatttgtctgctgagcttctggcagcctctaggtacgaagaccaatcactaatctgtgctaactgcctcctgttagtgcctatgccaggagccagggaaatgggtcagcagttgaggaactccgcatgtgtgctcgtttggtggcacatcagtcaagctgctgttggaaagcacagaagaggcatgtgggttcatgctggagagggctaaatgcctctgttgaaagacaggcttatatgaatcagtggttatgtcctaagctgcatagaaggtcttctcttttagagctaattggagacaacttgagtagttcagagaaatggaataattaccaactccagaggcagtacagcttggaagaaagacattcttgggctttggaatcagacctgggtttgaacagcagctcagctctgttctagttggtgacttgggcaaatcatctatctaggtgtcggtttcctcatcagtactgtgaggataaaaatgcataccacaaggttattatgttaaagaccagatgagacagtggctatatggcgctcagcacacagtaggagtaggtgctcaataatcagagccgctcttgttgatgtcactcagaattattggtgtctgccttttggcctggcccagcagcagctcttgaagaactcaatccctgtttgcttttctctcactgcaggaagatccgttcagtgtccatcgtcctgaaactcttttcaacatctccaggttcctgctgcacagcctgcccaaggacaccccctcgggcatctctaaagtgtatcctttctcttatccctcctccgtcccaccaccgttcttgtctaatggccccaagaaattccttccagagcactttcctggcagaaccttcctctctcagcaaccctcagggaagacagagaactcaccctcccgctgctgtttggctatagaggctcagcagggaggcccaggggcccaggccaagagaagatgagttttcagggctctctgagctgaacccagcagtgggtctctggccaacacactgtcccaatccctcctagaacccacagatgagggtgtgactgaaatggaagaagcaccaggccttcaggcttggaaccttgggcacttctccagactggggaggagggagtgtttgttcagcccaggtatacatagcaccttctgtgccccaagccctgggccaggcaccaggtggcaaagctgccatcaaagagggaggtcacaagttagggtctggtttggtggatgtgtgctgtgtctgagggtggaatgaagctgaggtcagggccatggtcagggaagtttacctggaggaggagatgtccatcatgcaagctgaggcagccagggaagatggccaagtggatgttccaggggaggacccagcatatggagaggcaagcaaggcatgtgggagagggtgaggggaccctgggtgggaggggccggagaggcagcaggacccaaggcctgagagcctacctttgggttttcctctcttctgtagccatcgagggccacagtggtaccataagcagagcaggtgcctgaagggcctgtgcagccagatactggatcattaccaggcaatgatccagatttttaaggtcttggatgtcaggagacataattgtccctgttcttttctaaatctcactgtactctcagctccttcccagccgcagccccaccttccctctgtaaggaaaacccactccactggagaagacccagagctccttgttgtaagaattggcctcgctagaggattccaggcccattatgtacatttcaggggaaataccctcaaatcaaggggtgccttcctggagtcagacctctgctgcatgcgtctccgtctttccccgtaggagcagtcagggctatgcctgtgggggctgagcacctgtactcatcctttccagcaagttctgtttgagtcaacagcttgatagaacctctaccctgagccttaccctgtgccatcccctggggacctggaaatggctcctgacagtccctgactttgaggagtcatgctggagacacagaaggaaactctccacagaactgctgaagtggacggggctgcactgcagacggcgggagcaggaacactgggagagatgcgggaggaagggcaggagggcctgggggcagccaacatcggaggtgacctgagaggagagcacaaaggctcgtcagcctctggctgaggagcttcaagggggccccagagcacaggctgccgctcagaaactgcccaccaggccctcggggaagggtgtgcagacagagtggggtacacccaggggcctcagagcagggttgagggtggctccccagggagtctggaccaggccccacctggcagggtgagagcagagtgccctttgtgccaggcatcctaggagggcctggctggcaggtttggtgaggcaggaagagccattttggcctagtcagggtataagatgagccatcagcaggcccagagatgctaagcaaggttaaagtattaatggaaactacgctgtttttatctttggaaaaattcctgggccttgccatccgagaagtacactcacctctcacaagcgcacagagccttcctcacggtctttcctctgccttcccggcaccagcacaagctgtgttccagcctggggctcactccaaggacaggcagtgccagctcctgggcctggtgttgcccctgctgtccttaaccctgttcacggcaggaaaatactcttcaccttggccaagcagagcaaggccctcggtgcctacaggctggcccggcacgcctatgacaagctgcgtggcctgtacatccctgccagattccaaaagtccattgagctgggtaccctgaccatccgcgccaagcccttccacgacagtgaggtgaggatgcagcacccttgggcaggtggcttctcctctcccttgaggccatctcatgccttcttgcctggcctgggttccgtttgaagagagacagctgcagctccctctaggctctgtgccccctgctcaagcctggccatgccagctcccctgtgcttccctgtccacctcctgttctccccgcagtccacctggcgcccgctcacagcccccggccccggcctcagccctcagcctggcctcccttgctccttgccctcccctaggcaagccccacacctctgtgcccaggtggctctgcctttaccccaggcctggccccagagctgactcttactctagaaacctctgccctttctggaaccaggctgtagttctccagcaaatctaccccacactcccaacccacattccttcaacccagccagcttccttctttcacacatcctccctcaagctcagagcaaggacttggttcagacagacctgggttcacatcccggctccaccctctcctagctctgtctccatctttctgcaccttgggttccccctttcccacaggtagttgtgaggctaaatgagccagtatagtccacgtgctccgcacggtgcccggagcatggtaaatggctggctaatggtggcagcggccactgtcattcctgccaggggaaaagtgccgttgagcgctgcctgtgcaggtgtcttgggcacggggacccaagtgacagggcttgggtatttcggcaggcctttatcctgcttccccatggcatggagctcctgggcccggcgccccttccctgcctgcccacccgggtggcctttcctcttggcagccaggccccaggggcctgaagccagagtccagggggaggaggacacgtgcctgccccggcccctcgggagtccgtggctgttttgtaggagttggtgcccttgtgctaccgctgctccaccaacaacccgctgctcaacaacctgggcaacgtctgcatcaactgccgccagcccttcatcttctccgcctcttcctacggtgagtccctgcatcctgagcatgtgggtgggacagcctgtggacagccaggctcactccactgctctctggcctcaggacgttgggcaagggccaaaggcctctgaatgtccctgtttatgaaatgaggacactctgacgcccacctacctgacacaaggagtcactgtcggtgttcccagagataggacccactgctgcccaaagctgaagcacccactctgggaacctggcgcagggctttacataaccaaatgccccagaaagagagtccgatggctttgcattcagaccaggaggctgagataggttatcaaggcccagctcctttgatgttgacagaggatcagaagccccttcccaggagctgagcagaggccacacacacacacagacacacacgcacacacagactgcccctgcacacacacacatacagaaactgcccctgcacacacacacacagactgtccctgaacacacacacagactgctcctgcacacacacacacagactgcccctgcacacacagagactgcccctgcacacacacacagagaccgcccctgcacacacacacacagaaaccgcccctgcacacacacggagactgcctctgcacacacacacagactgcccctgcgtgcacacacagactgcccctacacacacacagattgctcctgcacacacacacacacacacacagagactgcccctgcacacacacagagactgcccctgcacacacacacagagactgcccctgcacacacacacagagactgctcctgcacacacatacagagactgcccctgcacacacacacagactgcccctgcccacacacacagagaccgcccctgcacacacacatggagactgcccctgcacacacacatggagactgcccctgcgtgcacacacagagactgcccctgcacacacacagattgctcctgcacacacacacacacagagagactgcccctgcacacacacagagactgcccctgcacacacacacacacacggagactgcccctacacacacacacagaaactgcccctgcacacacacagattgctcctgcacacacacacacacacacacacacacacacagagagactgcccctgcacacacacacacagactgcccctgcacacagacacacagagaccgctcctgcacacacacagagactgcccctgcacacacacacagagactgcccctgcacacacacacacacagaggctgcccctgcacacacacagaccgctcctgcacacagacacacagagaccgctcctgcacacacacggagactgcccctgcacacacacagagactgcccctacacacacacacacagactgcccctgcacacacacacacacagaaactgcccctgcacacacacagattgctcctgcacacacacacacacacacacagactgcccctgcacacacacacagagactgcccctgcacacagacacacagagaccgctcctgcacacacacatggagactgcccctgcacacacacggagactgcctctgcacacacacagagactgcccctacacacacacacagactgcccctgcacacacacacacacagaaactgcccctgcacacacacacattgctcctgcacacacacacacacacacacacacacacacacagagactgctcctgcacacacatacagagactgcccctgctgcctcttcttgcttttggtgaagctgccagtgggttgagaagcaactctgtggtcaccccacctgcctggcggcaagtcctttgcaaggcctccagccccctcagccctttctctatgccctccagacgtgctacacctggttgagttctacctggaggaagggatcactgatgaagaagccatctccctcatcgacctggaggtgctgagacccaagcgggatgacagacagctagagattgcaaacaacagtatccatgcccttggccagagcctgtgtgtgcggctgtgtgaggggtctggggacaggcgggaagtaggagggcccagtcccaggggatcgcgggccatgctgagcctggccctgtgttcccagagagattggagaggcccacatgggacagggacagggatcagagatgggcagacagctggccagggcctaaggacccagaagtggcaagtggcaccttggtcttcccgtgtgggtctcccaccctcccctgacccctaaaaggcactggctgtgcctctgtctgtgcatagctcctgcatagccaacatgggacatgatgtcatgatgtcggtgttggcccccagctcttccactcaagtcactttcgcatgcaagtgacagagtccaaaactgacaagctgaacaagcaaagggtgtgcaaggaagccccaagcaggagaggaagcttcctggcccagcgctcagtctggtcggtcacaggctggctctgcctctcttggccgcactgtcctctgggcaacttcattctttggcagccccgtggtgcccccataacacagagatgtcaggagcagtgccagccccacatcccctcagccttatagcccccagaaacagccagctttcctctcagctgtggcagtgaaagccccggggcacagctcagcctgccccttggccaggaggatgcaccagggcagttgtccagggcaggccacacttgcaggctggacatgggaggggcttctggcagggaacagcacacacgtggcctgaggcctcgctcccttgcactgactgagtctgcaggcctgggggctgtaagcctgccttccttgcagctcccaggtgctgccacccccaggggccacactgggaggagggaagctcagagagctgcttgctgaaggaaagacggacccatctctgccacccaggctccctcaggtgccacagatgatatgtgctatggtgctggcaggtgggtgctgtgcccactccaacttggtaccagcagtccccatgtcctgggcctccctgcaggacccctgctggcctctgttaccagccccaccactgtgggagaggggcggtttccagggacctccaggtgagtctgacccgccctggggtcagcagggactctcgcccctgtctgctccatcacaagtgcccgcagacccccagcagccactgaatgtttctccaggatccctgggcccatcccctccgtgcctacccgcagtggctcacagggcccgcatgtgcttcccactggccctgggagctatggtgtgtgtggcctgcgaggggaatgggtgagggcagcagggccagcagagtcccttccttctgattccttggcctgagccccctctgttcctccacctggaaaactcttccactggtctggctgcccttgagtcttctcacaggggtgtagggtggaggctagggtctgtctccatctctgcttctgattccatccttgaccagatccctccaggctcccagattctgcggctagtggagaccaaggactccatcggagatgaggacccgttcacagctaagctgagctttgaggtgagggtgcctctctgggtgacctgcaggagggcagcctccatcccttctcctgtgcacatggggaccctcagctagcgcagtggtggaggaggattggccagaacttccagatgtggtggcacgaaggaggggcaggaccccttcctgtggggtgtgggagccatggctgcccccgagggaccatggccaagggcgcaggtctgtggacagggaggcagcttcagctctggtgggaggagcttgccactgttagggtcacctgggtttaggaagcaggtcctctctcaccactgccaaagattccaggatcataatccacacagatgtctcactgtggctgagtgaggacactgtgcctccttcccgcccaccctgcagcaaggtggctcagagttcgtgccagtggtggtgagccggctggtgctgcgctccatgagccgccgggatgtcctcatcaagcgatggcccccacccctgaggtggcaatacttccgctcactgctgcctgacgcctccattaccatgtgcccctcctgcttccaggtaggtggccaccctggtagctcacatgtgcttctcttggccacttttcccttgcccaaatgtccctctgggaggcgtggcccctgggaggaggggcacatccatggctccaagttgggacagaggcttgtctgtcctctcccctgcttgcattccatgtgcatctaaagtggacttcactggcccctgcgctgtccacatcctccccaaatcctgggggcccagcaagcgtgatgtgcccttgaccttcactcagaaaacaagaaaccccacagccccctcccatctccccttccagccctcaaacaaaggtgctgcaggtctgtgtccagccctgaccactgccaagccccctccccttgagaggcagtgcgtcctggccccaggcgtagggctgatgagcactagggcttcagcctggtcttacagctgtcttcccttagatgttccattctgaggactatgagttgctggtgcttcagcatggctgctgcccctactgccgcaggtgcaaggatgaccctggcccatgaccagcatcctggggacggcctgcaccctctgcccgccttggggtctgctgggctgtgaaggagaataaagagttaaactgtcagaa

SEQ ID NO: 15627 - DNA, 80472 bp, Homo sapiens; identical to SEQ ID NO: 1201

SEQ ID NO: 15628 - DNA, 80472 bp, Homo sapiens; identical to SEQ ID NO: 1201

SEQ ID NO: 15629 - DNA, 80119 bp, Homo sapiens
aaagtggcttgtggagtggcgaccgttagtgaggcggttgctgagacagacgctgaggcgggtaggaggagcccgagccgtaagggaagccgtgatgagggccgtgttgacgtggagagataaagccgagcactggtgaggagcggggcggttcgcgaagagcaggaggtcgagtcctcgcggggagtgcgcgagccgctgcagcgtgtttgaggggggcagcgggcttgctgcctgggccgagggcactgaaccccggcctgggagactgcagggtcgccctcccgccccttggcggttggagaaactcccgagggttggagagcggcaaagggaggtgccgcgcctgaggtggtggcgggtggaggcggctcttccctcacggtctggccctgtcgctgccttggattcatctcacacccacgagacagcacgaagctgctcaagcttcacagttcttgccacatccacatagtacccatactcttgttttcttgacgtttttctctaaattgtctcatttattttaattatgatttcacattttacaaggaaactttattactccatttatgaaaaccagtgtcacttgctctaaatgttaagataaaatcagcgtcgcttgctctaagtgtaaaagtaaaacttaaagtagggagaaacaaaactgaacaagctgtagctagctattgttgctagggagcctttaaacctgagatctcgtttctctaaaactggagatgggcaggtatgatcagaaaggtgctcaaaatgagcaccaaacacaagctctcctaattgggaagtctgaaaaagaactgaaggggaatgactttgtcaccttttgattcagttatttaatgtcctattccattgttatcgcctaaatctataacatagcagtctgttttgtcatattcttacttatgggataggtcttggcctgactttgaaaatcattcagcattgttgtgaagcctctgttctggccactggagcaggttacttgtctttggttctgtcccttctgagatctttctctgtgtaaagcatgccgtctctcctcatctcacacggaaatcctgaacatccttcaaggctcacgttggagacgggtcctctcttttgtgttcggcactagtggtagctgacactatgtgccaggtgctggctaagcacttcatatcctttatctcgttgtgtcttcaccactctctaaggtaggtactataatttcctctattttatgtatgaggaaactgaagcccagagagggtggataatttgccagcgtcacacagtgaggggtggaaccagctttcaagctcaggtcttcctcactccaacgtcaacgctctcagccactacattaatttttccttatgttacagacgtggcaaactcaaatgtctgcaggagacaggcaggtaacataaatgggagatgtttatttgcatcttcaacactaggaattgtatgttttccctaggaatagtcttgtattctgtaccccatttttcttgaaacacagccgtatcagtgaatctttcatttgtacttttaatagagatttgagttttaaaaaatcattttacttttaactttattataaacgtacctatagcacaagctgatgatagctggcaactgaacatttggcttcaatgtcagagtaatagagtgtggcaaactgcagagctcatgctcggcctaaaaggggcagctgctgctcagctcctgccaattaccaccatgcaggaatttggcctagtgtgctcagctcttcctgtttttaccagaagctaggaatctgggtttttatgtgaaatggcctaatttttaaatgttagcatccactctgaaaaaaaaacaaaacaccgtgtgggccaaataaaacatttgctggccgaatgcagcctgatttgctctgttttcaacccctggcacagaattttgttcatttctctcttgtggtacttccagagtctgttgagcataagagttaattttttaaatctgtttaattcagaagtctaataaacccgttaaaggcaatggctatgtcttactcgtttccaaattattctagagacaggtcagtggttgttgttactatggatagtaataaaatactagatatatataaaacgaaatactgtgggtagatgtattcatacgtgaatgaatgatgaataaagattggttttctggtttttggcccattacagatttgagacaacctattaggataagggatgtaggggttctatagaccatcaatcctgatggctgctagatataccagctgatagcccagaatgaaaacaaaacaaaaaactaaacaaaaaaaaaaaagacagtagaactaaaaaaatcctagatgtcaaagattagtcctccacatccaaatcagccattgtctcccggtctgctcctttgcttctattttaaccttcacatagcagcaggaactctgtttttttaagacctgctgctgtgatcctgttactctacttctcataaacctagagtgattcccaattactttccatgtcaagtcgtgcattttgctagagggtcctcctgaccctcctccccatcaggcttgcaacatttaaatttatacttttaggttgagctgaaaactctatttttctacccgaagatccttcccaaatgctcccttattctatgaactccctagttttctcctttaaatgcacagctccaggttcatctcaaccaggatgtcttattaggctagcccactgtattccaatcaggctagcatctgctgtaactctccattcatgccagctagtatttactgagtacttgctataggccacatgtccacatgtctttataggtgttatcatgtttaatctctacaacatgtgaggttggaattttcatctcatttaaagatgaagaaattgagatttaatgaggtgacataagttacctaagattacaaaatgagtaagtggggctgggtcagatgatgcaggaattggagaggcactgtgggacattggtttacagtgaggtgggtgcagggttgtcagaggacaatttgcaggattcctctgtatctctgcaatggaatctgacagtgtgtcttctgacagtgtatctcttttataaaaagaggcaggtggagagagaaccatcctacagtagaatagactgcctgcaaatgagtgagctcccagccctggagtgttcaagcaggggctagatggccatctataaggaattcttgccctgatgggccagatggactgcatgacaaggtctagagtcctttccaattctgagtttctggtgatttcataattatatttattacatgtctaggacagtgccatgcactgtgggtccacaaatatgtagaacatggccattgctttcaaattgtgtatgactataattaaaggggcaaggcaagataatatctaacacaatgtaaagaagactgtataagtcagagctaaactgaaatgtacagattctaagtacattaagagtttagattggggcaaatcagacatatatgatatattttaggaaggcaaatttcaagatattcagagaaaatgaatttttatatctaagaggaagaatgttcaggcttggctcaaatgagacattcagaaatgattttgtgataattcaacccaaaatgacccttatgaagaagaggtcacacaggaatcactttgatgagctcatatgtgtacaaggcagaaaggaagccacataccaaggatgactttagatgagaggtgcagacactgctccaacatctaataatccaccatagcaatccacaagtgtcaggcgctttggatagactggcttgtgcaccccgtgagtaggaggctacctctctatccttgttttgtaggtgagaatgaaagctcagataggagatcagcttttctggccccacgtcccccctactttttattccgccatgctgcttctcaaaatgtgaaatgtgccaaggctcagaggaagaaagcgtaagaaacaaggaaggcccaggtctgttaccacataatggtgaggaagctgaaaaactcagggcttcagtttgcccagctggaaagagtgtgataatcatccttgttccagcttctttatcagccagctctgtgactaggagcaaacaacttgcctctctgtactttagtttcctcattggtaaaatcggggcagtggtgcctgtcctgtctactacattatgttttcgtaaggatcaaataagataatgtaagtttacactcttttttttttttgagacagagtctcgctctgttgccaggctggagtgcagtggcgcaatctcggctcactgcaagctccgcctcccaggttcaagccattctcctgcctcagcctcccgagtaggtgggactacaggtgtgcaccaccacgcccagctaatttctgtatttttagtagagatacagtttcaccatgttggccaggatggtctccatctcttgacctcgtgatctgcctgcctcggcctcccaaaatgctaagattataggcgtgagccaccatgtctggccaagtttacactctttaacaattcttaaatattgaataactgtgaagagtttttattaaaggaagcgtcaggtcaacagagccatattaaaagctttctgaattcttcatgtaatgccttaagtaggtaataatacctttttttgacatatgccaacaatgataatggcagccacatagcataatggttaaaacatgggcttcaggccagattgcctgggtttgaggccggatgcagtggctcacacttaaaatcccagcactttgggaggctgaggcagatggatcacttgaggtcaggagttcgagaccagcctggccaacatggtaaaaccctgtctttaccaaaaatacaaaaatgacctgggtgtggtggcaggcacctgtcatcccagctactcaggaggctaaggcaggagaatcgattgaaactgggaggcagaggttgctgtgagccaagatcctgctactgcactccagcctgggtgacagagcaagactccacctcaaaaaaaacaaaaacaaaaacaaaaaaacagattgccttggtttgaatcctggctccatttccattcagtagcactttattttcaggcaagttatttaacttctctgtaccatagttttctcatctgtgaaacaggtatacagttgttttgaggttaacatgagttaatacatgtaaagcatttaagctgtacctggcatacacaataataaatgtgttcaataaatgttagtcactgttattaaagtatgaaggataacagatttgacatacttggcagtaattcaagggagcagaaggcagcatagcgcgttaattacaagcacagactctagagtcagacctgagttgaaatcctggcccttgcacttgctagttgtgtgacatcaggcaaactacttgacctctctgagccatggtatcctcatctacaaaacagagtaataattcctacctcacagaattattgtggagatgaaataaaataatgcattttaagagctcagcaggtgctgtctggaataagagttcgaagtactgtcattgagagtgtacttccaagttactgacaaaagcttgatttttagattactggtataaaccaaaaataaaattcagaggccccccaaccatctgaatggatttccttctcaaccagggctcttttaaaatttaacctgagagactgtttcaggccatgatgggaaatgggggtcaaacatgcctcagtatacctctctggcattaacatcaacacagactttaagtatgataagaaacattttacaaactctcctctctaaagcctagtacctcaaggcttcctctgcaaacagtaacttgggttgccacaatcctttatcttaacccaggcattcctttctgttgaacctaggttttttgttttttttttttctgagacagagtctcactctgtcgcccaggctggagtgtagtggcgcgatctcagctcactgcaagctccaccttccgggttcacgccattctcctgcctcatcctcccgtgtagctgggactataggtgcccgccatcatgcttggctaattttttgtagagacggggtttcaccgtgttagccaggatggtctcagtctcctgacctcatgatccacccacctcggcctcccaaagtgctgggattacaggcatgagccaccgcgcccggccgaccctaggtccttagataagctcaaccaattgtcagaaaaattttaaatcaacctataagctagaagccccctgcttcaagttgttccatctttctggaccaaaccaatgcatttcttaaatgtatttgattgaagtctcatgtttcactaaaatgtgtcaaaccgagctgcaccctgaccaccttgggcacatgttctcaggaccacctgagggctgtgtcatgggctgtggtcactcatatttggctcagaataaatctcttcagatattttacagagtttgattttttgttgacactggcaagtttatcccatgctaaacttttactatgggttgggttttgtttttttgttgttgttgtttgttttttgtgtgttttgttttgagtaacttcagtagtaaccttaacaatagtctgttttgacaggtttttgacacattcttactatagtcacctgaaccaatgaaatcctctgcctggggcatttgaaaaatctttgtaatatggctctagcccatttttctagcctcatttctccatgttctagcaacatcttgcacatagccagatgtttcagtcaaattaaattattttgattacttgtgttggcaagaagagtcaaactgcaaaatattttaagagatttattctgagcctaatatgagtgaccacagccagtgacacagccctcaggaggtccacagaacatgtgcccacggtggttggggtgcagtttggggaggcatgagacatcaatcagatacatttaagaaatacattggtttgatccagaaaggcaggacaactcaaagtgagggcttccaggctataggtaaatttaaacattttctggctgacaattggctgagtttgtttaaagacctgggatcaacagaaaggaatgtctgggttaagataaaggattgtggagacccatgttcttatttgcagaggaagccttcgggtactaggcttcagaaagaataggttgtaaaatgtttcttctcaccctgcaaaacagagtcttgctgtcacccaggctggagtgcagtggtgcaatctcggctcactgcaacctctgtctcccgggttcaagcaattctcctgcctcagcctccctagtagctgggattacaggcgcccgccaccacacctggctaatttttgtatttttagttgagacagggtttcaccatgttggtcaggctggcctcaaactcctgacctcgtgatccgcccgcctcggcctcccaaaacgctgggattacaggcatgagcaccgcacccagcctaaaatgtttatcatacttaaagtctgtgttgatattaatgccggagaggtacaatgaggcatgtcagaggcccacttcccgtcatggcctgaaacagtctctcaggttaaattttaaaagagccctggttgaggaggaagtccattcagacggttgggggggcttacaattttatttttgttttacacttgttatttctcactttcatgtctttgcttgttttattttctttgcctgaaatgtcctttacccagtgtcctcctccatgtttcaaaagccctacctttttcaaatatcttcttcattaatctttttctgatcctctccttgaattaaaatgctgttgaagcggcgtcattgtctggggtaaatatccgagatttgttgtctcaacagcaatggaaaactaggatacggacacaccagagtgaggttacgagtagaagtttaacaggcgaaagaaagagaagagctcactgcagctgacagcgttctcgaaaaaatgagttgccacctctgtggtgaaatgcaggttttatagataagcttgaggaggtggtgtctgatttacatagggcacaaaagattgattggattggtgtttcatttgcataactttcgaaaaactggttagggctaggtgtgtcatttgcattgggtgcgaaaagctggccacccccaccctaatcttttattatgcagttgggttatttacgtggccagcgccatgttgcccgtttctttactgtacacgtggtgacaaattaaagggaggacagaacctccatgttgaacatacttggcccccaggtagcctttttctattggcacagctgccggcattcaccagtgcaagcttccagcttgcctttttatttatttatttattttttttttttgagacggagtcttcctccgtcgcccagactggagtgcagtggcatgatcttggctcactgcaacctctgcctcccaggttctagtgattctcctgcctcagcctctcgagtagctgggattacaggcgctcaccacccaccaccatgcccagctaatttttgtatttttggtagagacaaggtttcactatgttggccaggctggtctcgaactcctgacctcaagtcttcctcctgccttggcctcccagagtgctgggattacaggcatgagccgctgcgccaggcctcagcttgcctatctatgtttgcagctcgatttttcaggctgctctttgttagaaaaaaataatttcttgggctgctttttattaaaagggaagttctgccgaagactcttttaccttcactatctggctaaataatttctttctagctcctgtatcactgcgtcttcctccttcgaatcctgttttcatgtgtctcttaaagcctttatcagagtactgttctgtatttcatccaatctaataggtcattgattataaaataccattgttttgtgtatcaataagaaagcaaaaaatgctgccagttacactgaaacatcatcaattataagacacaaccttagaggtgagaaaatgtgaaaaaaaaatgtaagctttagaattgatgacatatggtagttctttgtgaaagtgtctgtttcacaccttctcactggatagtaatttccctgaggggagggagggattatgatctgttcatatctgttggtgcctggcacctaagagggactcagtaagtatctgtggatttactggcccttaacacattctctcatgttgtctagcctttatgatattattagaagagttaataccctcaacagttgaccctttgaataatttcttgtgtctggcttctggacaagaggaaatcaggacaaagagctaactactgagtggatcatgattgaatgggctgctgtggtgtggcggttgaatggaatttgcaacaaatgcaattcgtagttattctttttctcctcagtacacacacagtgtttcttaatggcaataaagtttactttcctggccattagcagacttcatcattttggttcctaattgtctttttcccttgtcttctgttcagtataaatgacatcgcatttaagcctgatggaactcaactgattttggctgccggaagcagattactggtaggattttgtcttagtttcctcttaaagtgcttccctaacctccctcttgtgagtactctgaaatttgaccctttttttttttttttgagattaaaaaggcaagggtggaaaaaccttccctattactttttaatagggatggaaatgggctatttaaaacgggcaagtaaactatcagataagaacctgtgaacaataccacctttggggtcattcatctttccctttttactttgagacacccatgaaagagttgaaaacaatcacaatgcctttgaaactggactggtgtcagtttacattttgtcccccagaaaaattcaagcaacaggactgacggtgctgtgtccatgaaaagtcagatagcctgaccccaacttttaggcattggcctatctaaacagttccatatggatgttgtcctatttttcatattttcaaataacataagctccctctggaacctatccaggtatataaaagtaattttcagagaaccccttatgtttgaccaaaaaacctttgtatgatctctctttctgtctaagtctacttcctcttctctgttgtctctagatacgcagactgattaatctccattctttgtatggttaactacataatcttaaaacatggttaaattgttctgcagacttctctccagtgtaaacaatccaaactctattagtttttctacataggttatcttttccaatactctaaccatttcagaaagtttccgcttgatttctcagatggtgtgtgtgtgtgtgttttttttttttttttttttttttggagacagagtctggctctgtcgcccaggctggagtgcagtgacgcgatctcggcttactgcaagctccacctcccgggttcacaccattctcctgcctcagcctcctgagtagctgggactacaggcgcctgccgctacgctcagctaattttttgtatttttagtagagacggggtttctccgtgttagccaggatggtctcgatctcctgacctcgtaatccacccacctcggcctcccaaagtgctgggattacagaggtgagccaccgcgcccggccagatggtgtgtttttaaactctccacatagtgatagatgtcacatggctatcaaatacctaaatccatattacagctgggttttattttatttcttagagacagggttgtgctctgttgcccaagctggtgtgcagtagtgcagtcatagatcactgcagcctcaaactcctgggcttaagggatcttcccacctcagcctcccgagtagctaggactgtggacacacaccacctcgtccacctaatttttatttttttttatttttatttatttttattttttgtagagatggggtttcacttagttgcccaagctggtcttgaactcctggtttcaagcaatcctcccacttcagcctcccagagtgttgggatgacaggagtgagctaccatgcctggcctacagttgggttttataacattccctcctacttgaaagcccagagttctgtgactttcaaattcttggtagcaaatatgaaacatctattatgttgatttagtgcagagctggcattaaaatttaatcatgttgtagctggctctttttatgggctagttttatttaggagggcctgccttgatcaatcatatatccaaattcaggtaaggatgagtataaagaatttccatggagtgagtaattgaacctttggttctcaaggattggtagtatattcctggtcacatagtacatagacctgggtcctctacttcttggttacccaactttaagtcacgttgtttttggttttgcagtgcagtttttattggctacagatttagaatattgacacgtattgttataaaaacaaaaatagcagtagcaaccctgcaggaattctgactaatagatatcacatagataatctgtatttgtctcttttgccaggtttatgacacctctgatggcaccttacttcagcccctcaagggacacaaagacactgtgtactgtgtggcatatgcgaaggatggtaaaaggctgctctgggtttccattctctataatagcctcatcattgttcatttttctctttagtcactttttaattatttctagtaagctggagtacaagttgcaagttcagaagacagtgaagttgctaagacttcagtttggtcattcaatctagcaagtatttattgaggtcatctatgttccaggcactgttcaaggtgcttgagttacttcagagaaaaaaacggtggtccctccccttatggggcttctgttttatggggtggtggtgagaagtgagggaggaagaaagtatgagggaagacatacagtaaacatagtaaaaaggtaaattaagtagtatgctggaaggtgataactgttatggaagaagaaaaagtagagcagaatgagggggattgagagtgctgggcagggcagggggttgggtacagtattgaattagactagtgagggtgggctcattgagatgaggacaggtgaggaaaaagactttgaagtcaggaggcaatgagattgtgccagtgggcatcggggggaagagagctctttgcagaggaagagccattgcagaggccctcaggtgtgggtgtggctgctaggagctggatcaaagagaatcgggaattgtagaggatgaggataaagtggtaacagacatggggtggtcagatcataaagattttgattctcagtcaaaatggaactactgaaaggtcctcagcagaggagggatctgatttgatttgtattttaaaaggatccctctagttgctgagttggaaacaacctgcaagaggtgagggttaggacatctgtgtgaggaagcatcatccagacagggggtgatggtggctcagacctctgtgggggcagaggaggtgatgagaaattatcagactctggatataatgggagggtggagccaactggattgtctgacagattggatatgggctatgaagaaaaaggagtcaagtttttgacctgaggactgaaaggttggagttgccccccccactgagatggaaaagactgcaggtagagaaaagttatggttgaagatcagaaattcagttttatacatgctgaatttgagaaaagttgatgatgtcggagaggggagagaactgctggaacagagttgttgagtaggcaagaggagatgggatctagggcatagacggggtatttgctttagataggggcacagtaggaactgcagaggccagcagatggggacaatgtggtagtaggaatctaatggaaattctcaattccattttttttttcttcagtgaaataggaagcaacagcaactgagagtggcaatggggaagggaggtttcagagagttgaagagaaagggaaaaagtgtaaagtcactgcctcagagaatgggacagcgagtggacccaggaggtgtagtgagatccccggtgacatgaagggccctcttgaagattgtgatcatgaattgaaagtgagattagttggtgtgattgtgtctttttctccagcgattttgagctgcatagttgtagaggcagaagaggtgaatttaaccagaggtggttttgcaagcacatttgaagatgaagtaggagggcaagggagcagaaagtgtatacagataaataattatgtacattaaccttgaattgttggctgaataatgaagggagagaggacagcaatggagaagtagtaggttctggtggtgttgaaggattgttacagttggggtaccaggtgggttgggaaggaagggaagtggtgcatgaaactgagatttaaatttattttaaaataaatccatgttgtcccacagcataggattagtgggaagaaatgggctttggaatgagacagttgtgagttccaaccccaacccaacaccagagttctgtgagtctgagctggttattgagtctgagtcacgatttcttcatgtatcaaatggataacattgagataacattctgtagccactgccaagaagtcacaaaattgtaatgttataattcttgaatgaaccttggagattattccagtcccaggtttttaacttcttttggctgatgggcctctttgataatcagatggaagctttagaccactttctagaaagatgcaaattcttcatgtgtatgcagaatttcatgcatataattttagtctgattagtccagtctcttcactttagtcctgcataaagacataaacaattggccaggcacggtggctcatgcctataatcctactgaaatcctaaagctctgggagcctgagttgggaagattgcttaaggcaggagtttgagaccagcctgggcaacatagtgagactccctaaaatctggcctgggtgacagagctagactctgtctcttaaaaaaaaaaaaaaaagacaagtcatgtgacttgccaaggccatgcagcagattggcccaaagacaaaactaatttcttgcttcatagtcaggtgtgctgtaccatggtagtcatatttgtgtgtgtgtgtgtgtgtgtgtgtgtgtgtgtgtgtgtgtgtgcatgtttgagttcaagttcagaataatgttttagggagacctgtgaggagggagcctggagagctgaactgtttctgtctcatcctagtggctgttgaggaatgtgggtcagtccagggcccagtataaggcccagtaggtacagaagagctattgggcctctggtgcctctggtgtttataagcatagcagggctctttgacctgcaacaccattagggcacttgaggatgtcagagtgtgacccatcagtagtggcatttgcacagcactttgcagagtcctgtcacacacatctcacttgatgcttccaacaactctctgaagcaggcagcaaggggactcttatctccgctcaaagatgagaaaacagacttggagcaattacaggtgatggtggcagaggcaggcctaacccaggttctctgactgcagagtctttgttctttctagtgtatcatgctgcctcttcatgacacctgtataatgattaagaagtcttttagtcctcagaattggttttttcctcttagacctgaagattgagatacactgaattccagctttgctctttaagtctgcttgtttctgatttctcctttaagttcattaagttttttttgtttttttttttgagatgaagtctcgctctgtcgcccaggctggagtgcagtggcgcgatctcggctcatggcaacctctgactccctggttcaagtgattctcctgcctcagcctcctgagtagctgggactacaggcacgcgccaccatgcctagctaatttttgtattttcagtagagacagggtttcaccatgttggtcggcctgatctcaaactcctgacctcgtgatccgcccacctcggcctcccaaagtgctgggattacaggcgtgaaccaccatgcctggcccaagtttaataagtatttaatgagcaaccatgatataaaagtatgtaagacatagtttttttgttcaagaaaaacaatataatatgaagaaataatagaaatagctaatttttttttaattctattccaggcccagttctaagcaacataagggttaggggtgccactgcctgtgcaataaaaaatctgcatgtaatttctgaaccccccaaaactttactattaatagcctactgttgaccagaagccttacctgttacataaacagttaacacatttttaatattatatgtattatatattgtattcttaaaataagctagataaaatgttaattgagaaaaaagaaaaatatatttactcttcattaaatggaagtggatcatcataaaggtcttcatcttcattgtcttcaggttgaataggctgaggaggaggaggaggaggaggaggaggaagagggattggtgatgctgtgccagggagacagaggcaaaagaaaattcacatgtaaaagtggactcatgtagttaaaactcatgttgttcaggggtcaactgtatgtacacatgtacatacactcatttaatcttcacaccaaccatgaggtaaatactaacattgtatccatttttcaaataaggaaatgaaagctcttcagtagcttgtttgggtcatgcagctggtcagtgagatctctaggaattctgacccagagactctgagcccaaagcttatgcttttcatcaccatcacctgctacctaccaggatgagggaggagtgatggaaatagtaagagcagtttctttgtttatttagtatttgcagcaatatcatatggctcaccctaatatctactatttcagctactgtaaaaggtacttggccgggtgtggtggctcatgcttgtgatctcagcactttgggaagccaaggcgggtggatcatgaggtcaggagtttgagacaagcctggccaacacagtgaaacctcgtctgtactaaatatataaaaattagctgggcatggtggtgtgtgcctgtaatcccaactacttgggaggctgaggcaggagaattgcttgaacctgggaggcggagattgcagtgagctgagattatgccactgctctctggcctgggtgacagagctagactccgtctcaaaaagggccagtcgtggtgactcatgcctgtaatcacagcactttggaaggcggatcacctgaggtcaggagtttgagaccagcctgcccaacatggagaaaccccatctctactaaaaatacaaaaaattagccaggtgtggtggtgggcacctgtagtcccagctactcgggaggctgaggcaggataatcgcttgaacccgggagtcggaggttgcggtgagccgagatcgtgccactgcactatagcctgggcaacagagtgagacttagtctcaaaaaaaaggtactttacagatactatcttagttgactcccataaaaagactctgaggaagatactgttcctctgtgtttcagatgaaggcattgaggctcagagaacagtgacttgcccaaggtcaccttccacttgccctgtgaataaagtctaaaagtccttaagatgtacagaatgtggcacatacttacctcttaatcctcgtctctcaccagagtaggtgaagaccccgttatttgctgccatggtaccgtgatcctcttccaaatgcttataaatgtggaacagtgtaattaataacaaattacttgttatatgttgcctctctccagtctgttccttcataaagcccaagtagtatgaaaatgcgaatctgatctatcactctttgcttaaaacctttctttggcttcccattgctttaggataaagagcaaggcctctgctgtgtccctgaggtcccaagagatccttccacaacccacctcacccttccctccgttccatgatgactccgctcattccctcagacatgccaggcttttcctgcttcagggcctttgcacatctgttccatccatgtggatgggtctgtctcctctctacatctggctaagctctgctcatcctttaggtctccactgaaggatctcatccttagagaaatgttccctcatctaaattaggtcccccaggagatgttgaccaaagggtagtttcagtcagacaaaaggagtacatttttgagatctattgcacagcatggtgaccatagttaataatagcgtatatttcaaaactggcacaggaatagtttttttttttttttttttttgagatggagtctcgctctgttgcccaggctggagtgcagtggcgtgatctcggctcactgcaagccccacctcctgggttcactccattttcccacctcagcctccagagtagctgggactacaggcgcccgtcaccaggccggctaattttgtttttgtatttttagtagagacggggtttcaccgtgttggccaggatggtctcgatctcctgacctcgtgatccacccgcctcagccctccaaagtgctgggattacaggtgtgagccactgttcccggccaggaatagattttaaatgttctcactataaaaaaataagtatctgcagtgatggatatgttaattagcttaatcattcttcaatgtgtatgtatataaaataccacattgtacttcataagtagatataattattatttgtcaaaaataaaaatttaagtaaaaaagtaaatcaggttccccagttattctctttcataggatccgtgtcttaccatgttgtatttgtgttagattaatttgatgtgtacttcttacactagactgaactttatgaaagtagggatcatgtgtgttttaatcattacttaatccctagcatagaacatgacagctacatgtagtaggctcccaatacatctttgtttactcagtgtcagacaaagcaggtttggaacccaaatattctgactccaaggtcctgcctcccagtactgataagaactaggaaagaagctaacacttactaggtaccttaaagaactagttttctaaagaattctctctgggaaatgctggtttaagataaatgtaagactttccattttacaaacacttttaggcaagcgctttgcttctggatcagctgacaaaagcgttattatctggacatcaaaactggaaggcattctgaagtacacgtaagtaacttaggtgtacagtattatgagtttgatgcttattgaataattgcagcaaaagcctcttagaaaagatgtaggagaaaacttttttctcttaaattgaacttgaaattaagttgtgggtgtgtgtggttggtataggaaggttgagtagtgaataagttaatgaatatttcttggccacttactggcgtggccagcactgggctaggtgcttttatgtagctcatctcagttcatctgacattgtagactttatcccacccccaacctgtcatcttccagtgtccctgtctcagagaatggccttatatccacccagtgtcaaatgtcagaaacttggggtcagtgtgctccaggcctcctcttactattggggatctgccgtgttcttcccctgttcctctactagttggtccctatttaccctgcagatctcagactcaaatgtcagtttctttgtaaggactttcctgcctctctagactggaacaggtctctttcgaggcatttctcacaattgcagttttaggtttattctggtgactgatcagtattgctcatcggcctgtaagttccataagaacagatactgcatctattttttgttttgttttgttttgttttgagacagagtcttgctctgttgcccaggctggagtgcagtggcacgatctcggctcaccgcaagctccacctcccaggttcacgccattctcctgcctcagcctcccgagtagctgggactataggcgctcaccaccatgccaggctaattttttgtatttttagtagagatggggtttcaccatgttagctaggatggtctcgatctcctgactacatctattttttttttctcactcttgtgtccctgatacaatgcctagcccataattggtactcaccaattttccttccttccttctttccttccttccttccttccttccttccctccctccctcccttcttccttccttccttccctccctccctcccttcttccttccttccttccttccttccttccttccttccttccttccctccctccctcccttcttccttccttccttccttccttccttcctttcttttcagtcttgctctgtctcccaggctacagtgcagtggtaactagctcactgcaactacaaccttccaggctcaaataatcctcttacttcagcttcccaaatagctggaactgcaggtgcacacccccacaccaggccaatttttaaatttttttttttcttggtagagacagggtttcactttgttgcctgtactggtcttgaactcctgggctcaagcagtcctctcaaagtactgggattacagatacgagccactgcacctggcctcttttcaattgtggtaaaatatacatgacataaaatttatcatattaactactttttaagtttacagtttaatgttaaatacatttacattgttgtgcaaccaatctcccaaactcttttatcctgctaaactaaaattctatatccttcaaatacctactcacccttctctcctacccccagcccctgaaaaccagcattctactttctgtctctctgagtttgactgctttacatacctcatataagtagagtcatacaatgtttgttcttttgtggctgagttatttcatttcacgtaatgtcctcaaggctcatctgtgttgtagcatgtgtcagaatttactttctgtgttgtagcatgtgtcagaatttacttccttttttttctttattattatttttttttatgaagacgaggtctcactatgactcctgagctcaagcaatccttctcccttggccgcccaaactgctgggattacaggtgtgagccactgggctcagcttccttcctttttaagtctgaatattattccattgtatatatagaccacattttctttatccattcatctgttgatggacacttgtgttgcttctgcttcttagctattatgaataatgctgctatgaacatgggtgtacaaatcaacaaacaatttttgaaggaatgaatgaatgagtgaagttgtaagtaaagtattacccacaagtgaaggactaaaacgggttgagacgccttgcatggtacatgatttgctcagctttcattgttgtctaaggatttgtcatgtttccagatcttggtctgtgatgtcttcattgcacctccatcttccatttctgggcctccacaaaacagtaagagtaacagccacagataaagcacctaaaggccaaggtgggaggattgattgcttgaggccaagcgttcaaaaccaacctggccaaaagtgagtccccatctctacaaataagaaaacagtgggtgaggagaaggagaattaattctttaggagtaggagaattaatttctgtgctttttgttggtcacttgcagaagagcatgtggtctaaagtcagaggctgtgggctcattattaaaatcttcagttgtagccactgaaatctttgtggtttgctgcatagtaatctacagttgtttacttcccaggcacaatgatgctatacaatgtgtctcctacaatcctattactcatcaactggcatcttgttcctccagtgactttggtacgttctgattcctgatgtcctgtcctggaataactgaaaatctgggctaaaaatgctaaaatgcattcagaatatggtgattttatcctgagagagttaatactacttctctaccttcaatggctgaggggaggctgacagttattctttaaattgtgtggaaaccaagacagtgaatggtgacctttactctggtaagacatcagagactacaggaagggccccagcaaaggaaatggtaacaagattgggagggcacaggcataacttggtgttgctgcctttgggaagccttcccttggtgttgctgcctctgggaagccttccctgactcaccctggcagagacagtgcagttgtcctcacctttgtattgacccacatctatgtttatgtgaaattcttcactgttgcggttctacttcttgtgcaatttgtcgtcattactggtttaggtggctgtagctgtcctccctgaggggctgaacaccttgaggagttcatcctggccacggtcccgtgccagcattacagcactggtgtagtactggcacaaaagaggtgtcagtaaaatgtctgtggagggaggaagggagtgaaattgggcagaggcttgtaggttatttccattaatggttgattctgttttcagctctatcagtctgtgttcgttgctagtggatacaatgaagtcactagatgaggagtcagaggcctaatccctctcagtgttccagttcccttatctaaaaggagcatgctactcactgtgtctcactgatacggttctggttctgaggttcaaaagagagaatggaattgaaagccaattgtataaatacatggagaaaggcctgtcatttgtttaacatattttatagcattttcttcatgtgaagcactggtctgtgtgcttacactggaatattaaaaaggcaaaatagaatccctaccctcaaggagcttgtggtcttaggagaaggtgggattaaaaaaaatataatattaagtactagtatttattgaatgcttgcagtgtgctaggcactgttctaaggattagaaatgaatttctatttgagctttatgacagcccctgaggtgtcaggtattattctcattcccaccctactgatgaaaaagaggtagaggtcccttagctagtaagtggaggaaccagggcttggactttagaccaggtgattgcatacagagcctgctctgctaagcactgctgaaggaggcccaggaggaaggagtttcttccagcttggggctccaggcaggcttagtggaacacagataacatgtgcacacgtcaaaatgtttggaggaagcgttctggaccaggggaaaggcaaaaaataacttgtttgatgttgcacttggccatgtatttgtgcactggagttaccttcttgattgtacttcgcaacttggcaaatagaagaatttgcttatgttgtctagacatacacttgctatgaggcactgagccagggcatctgggacaggggggagcaagccttaggtgaccagtgtgccatgggagaggcacagctcagatagagtcatgtgttgtgattgagacctatgaaagaaaactagattttcagaaagcatcattgttattttaaatgctaggttatactctggttgcagtgtcaaagttataaacaatgaaactgtcatttctttgagagtcaaatccctgaaaagttggctagaactttaccaatctattttatttttcttctgaaagaatgatagattcatagtaagttacaaagatggtaccaagaagtctatgtacttttcatccagtttcccccagtggatccatcttatgtaactattatacaatatcaagaccaggaaactgagactggcacaaagtgtgtatattatatagttctgttgttttatcgcatgtgtagattgccatcagcgtgacacagaactaagccatcaccatgcagttaccacttagtgtcatatctactcaccttacctccagttatctccaaaccctggtaaccacaaatctgttctccatttctataattttgtcattcaagaatgttatataaatggaatcgtacagtatatgaccttttgagattatgttttttcattcagcataaaatcctggagatccatctaagttgttgtatgtttcaattatttgttcctttttattgctgggtagtattccaaccaatccatcttcttttatattattgtgcattgaagggttgtggtctcctgaacagaagtctgtctccaaacacaaatcaagcagcaagatcatctgctgcaggtaagtgcagctctgacgataagatttatgttccttcatcttccacacagactctcaaaatccaattatttcatgcagcagagaaggtcttgtgttaggtagttggtttaggcccctgtatttccttttttcttctttcttcgtctcctcgatgggaaagacttgtgcctttgatcatgaagcaaaagagaactacaagttgccttcatgcagttacttagcaacaagcctcaacatccagctatactgagtggaggcttgttgaaaatgtgaggctgtcattgtccaggcagcatgtgtggggaagaaagctttccctcccacactttgatgctagacctgaattagaatccagaatctctcattgacaggccatgtgacctcaggaaagttactaaatctttctgagctggagctttacgttcctcatctgacagatagggataaaaatactgacttgacgagattgttgtgaaatgcacacaaactcatgagtgtaaagcgtgcaggacagtacctggtgtacagtagacactctaaatggtagctattcttgctgttcagcttctaggagtatatcccttccgttcagcatctgttgagcaccttctacaaagcaagcactgttctaggggttggaagacaccaagtctgttcttaaggtgctctttaagtgggaggggattgagatggagagtgggaagtggtggctggcccagagatgtaggcacaagctaagggctgtcatagaggtatgtacagagggctgggggagctcagaaaaaggcaccaaatggtgccttcacttctcactgtttattacagaactaaatagcattttaagtttgatcctctgactttatgtcaggaccggcaataatgaaaccatatcccagctgttgctgcctcatcagacttttatttcaaaccaaggcatcatcctcactagttttaccttctgtggggtgcttcccctatccccatgccttttgttggttgtgtacacagctggacaaatgatggtcagtacctggcgctggggatgttcaatgggatcatcagcatacggaacaaaaatggcgaggagaaagtaaagatcgagcggccggggggctccctctcgccaatatggtccatctgctggaacccttcaaggtactcttaaagttgtcctccttctagaacaaacaccatcatgaagaagggctttttgtcttcctgaggtctccctacattcaaaggcttctcacctcacttgaatggtctgttttagaacctgtcccatttgtatggattttttttttaatagtcccgctacctgagaatgtatggaatttattaagagcctcctcaaaagttgagtttaggaatgaatcctggacattttagcaaagcagatgagctatttaggacaggccaaagtgtgtgtgtggcgtgtgtgtctgcgcacatgtgcatgcacacatgtgtacgtgtacatgtatatgagtgtgtgtgtgtgtgtgtgtgtgtgtgtgtgtgtgtgtgtgtgtgtggtgtgtgagtgatgcagcaggaccatttccttatgaatcaatagtggagctctttgctgtggctttatttttgcctttccttttttagttcttccctccaagtttgggcagaatatgtgcccacctgttaataaatagctttttcatgagcctttttttgcccttgtcagaaagtcaaaattaagtctacagacgtccctaaagcctagagatacacaaacaattggcacctaccttcttaaattttatacacactttgctttctatgtccatgtgactttgagagtaaactaattatatgctctttttttttttttttttttttttgagatggagtctcgctcggttgcccagcctggagtgcagtggcacaatctcggctcactgcaacctccacctctcgggttcacgcagttctcctgtctcagcctcctgagtagctgggattacaggtgcctgccaccacgcctggctaattttttttttttttttgagacggagtctcgctctgtcgcccaggccggactgcggactgcagtggcgcaatctcggctcactgcaagctccgcttcccgggttcacgccattctcctgcctcagcctcccgagtagctgggactacaggcgcccgccaccgcgcccggctaattttttgtatttttagtagagacggggtttcaccttgttagccaggatggtctcgatctcctgacctcatgatccacccgcctcggcctcccaaagtgctgggattacaggcgtgagccaccgcgcacgcctggctaattttttgttgccaccacacctggctaattttttgtatttttagtagagacagggtttcaccatgttggccaggctggtcttgaacttctgacctcaggttatccacccacctcagcctcccaaagtgctgagattacaggtgtgagccactgtgcctgaccctatatgctctttatatatcctataatattattaaaccatcagtatcctttacagagtcctctgagggtaaacgaaaggtcctacttgtttaccagctcaatgtcattttacagatggttgcctacttgatttagaaggttgtttggaaggttattatgcttcttcctgaataattttttttggcccatgctgtaccatgcatgtctaatgctgtcaaaggccattagcctgccccagagttcctgctgtttgatttgtggctgcagaggacttggtggctctaggctaccatttttaattcatgagaagcaggaggccctgtatacctggtggctgtcctcctccaggtagggttcagaggctccttttattttttatttttattcttttttttttttttttttttttttgagacggggtctcactctgtcacccaggctgcagtgcagtagtgcgatcttggctcactgcaacctccgcctcccaggttcaagcaatcctctcacctcagcctcccaagtagcttggatcacaggcacatgccactacacctgtctaattttttgtatttttggtagagacagggtttcaccatgttggccaggctggtcttgaactcctgatctcgagcgattcacttgcctcggcctcctgaagtgctgggattacaggcgtgagtcactgcacctggcccccaggggctccttgccaggattttaaattatagttttagtgtagttctaggcaatgtaattttgaacaactacttactgtctacagccgatgggagagtttctggatgaacagagagaatgaggatgccgaggatgtcattgtcaacagatatattcaggaaatcccttccactctgaagtcagcagtgtacagtagtcagggtagtgaggcagaggaggaagaaccagaggaagaggacgacagtcccagggacgacaacttgtgagtgtgtcccagtgagtgggaacccttctggtaagggcccaggccccacacagacttgccaggacagatgttaaactctttggccaagggagtgcagggactagggggaactgtgggtgaaagcgccttcaaaaaaaggagacatacccttaaaacttgtgtgtgggtataaagtgatcctgtgagaaactataggaaatactgaaaagactaaaggagaaagttcaacttttctgataaaaccccatcccctgaggaaatcactgttagcaatctagtgtatttctcctcagtcttttcgtgtgttcatataattaactaagtcatattctgctttttttttcacttaacattatagtgtgaaccctttccagtaacattacaaatccttcgaagaacatgatttttaatgtctgaaaagtgtgcccttttgtggatgccccatcactcgacacttcctctattactggacacgtttcttagcctgttcccacactatcccttaccttaccttgcattttctaggatgtatatcagagaggaagcccttaccttagccacagtcttcactcccaaatcctggctgtctagtcattcttctcttcagttgagattgcctgtagggaaaacatgggcaggccagagtggggaaagctggggtagccaggatatctcagtttggcagtagagatctagcttgagactttccaaactgttttacatagtacctgagtttccttggaagaatcccaccctgaggtcatgggggctgggaagtggggaccagtaaaggaggaaggtatggctttgggtccccatctcagtgcctttgattgtttcaacatgagtttttgtttcataaagaatcctactgccccaggaggtaaaagggggttgaaaatcactgatccatctcacagggactgagcccagcccagagccatatgtggcctccccaagagggctcactggtgggctgggctcctggattgtgtttggactttggacatcagtgccagtcacacaaaggtcatctgcaggctccctcattaacatccctctcggtctttgtctcttttcccttagttttgggttagtgcctatgacatttgccactcttggctgggttttacaaacaaggctttaccttgcctgcctacatatccagtggtgctaccaggttaccacaagacactgggatcagaaaagctggaattaataaacaaagaggcaacattaggtggattaagacccagcctcaagggctaggaatgcttttcttttttttttttgtgacagagtctggctctgtcacctgggctggagtgcagtggcacgatctcggctcactgcaacttccgcctcccgggttctaagcgattcttgtgcctcagcctctggaatagctgggattacagacacgcgacaccacgccgaactaattttgcattttcagtaaagatagggtttccccatgttggccaggctggtctagaactcctgacctcaggtgatccacctgcctcaacctcccaaagtgctggaattacaagcgtgagccatcacgggctgccgcttttctcttgaactagattcccaggtagcttgctctccagcctcaggcaagggagtttctcctgtgtgctggtcctacagtcccagccccacagcactgatccccataggttctcagtttcaaagacagttgtttgttttcagagcccattgctcttttttgaaaattagattcagtcagaaaccatttcacctgtgcaaggacccccgcctgcaggagaacctatttttaggtgttaattttctttcttcaggaagagcaagcaagtttcccttctattaaaaaatgtctttgtgctgcaagagatgtttctctgccatctccccacattttctagtatgtaagagaaaagcagtctcaatattgcagccttgcctatcttagtgttgctccccagtaagctctgaaatgagaggtttatcttcttcagctgcagcagtgtccccagcaccataaggtcatagcaggggactcagtgaaacagcagatcccaggaaggctgaacctcaactctgcttcatcccgtaagactgattgatgggttgggccaaattataacttttggcttcagtaaagctgtacaacatttggcaacctgaggccaggacttccttgttcctgttgtttaagcccttagagctatactcatcagcaggctgtggcccttcataacctcttttatcttctgttgattagagaggaacgtaatgacatcctggctgtggctgactggggacagaaagtttccttctaccagctgagtggaaaacaggtatgtagccctgtacaaatccaattgcagtcatgcctgttatattttcattttctgagattctgttactattaattatacattatcattgttagttcctgcttattgagcatttgctgtggtaccagatactgtgctcactgctttgcatactttatcctattttattcttataaaacccaatgaagtgggtactactttccttatcaactttttagaaatgagtaaaccagaactcagagcagtgaaattatatgcccaagatctcacacagctagtaaatggtggagcctaggagttaaacccaggttggtttgactttaaaatctagctcttaattttgaccttactttcctctattcgctttctttcattcaaccagtatttatgagtacccactcaggaaagccctttcataaaggagctgctgacatagagctgggaaagtgatagcctctacctgcaagagctcacaggctggcggagacacacttgatagcaaagagcccctgtgtggtgtggtatgtgacacaatagaaagctgtacagatagacagctttttgggacacaaaagagggtaacatcactacttggtagagatgggaggtcttgttagaggttatctttgagcaggccatctttgagttaggctaaggacattgggaatggtgtttcaggcagaaaaaaaaatagcatgtatcaaggcaggaaggaatgaaaatatatgacagttcagagaatggtgagttgtacagggtgactgcatctcagagtttgtgacctgaaaacagagctgaagaggaacatgggggtatgattttttatttatttatttatttatttatttatttttaatttttttcgagatggagtctcactctgtggcccaggctggagtgcagtggctcagtcttggctcactgcaagctccgcctcctgggttcacgccattctcctacctcagcctcctgagtagctgggactacaggcgcccaccaccacgcctggctaatattttttgtatttttagtagagacggggtttcactgtgttagccaggatggtctcaatctcctgacctcgtgatccgcccgcctcagcctcccaaagtgctgggattacaggcatgagccaccacgcccggcctatgattttttgtttgtttgttttgagacagagtctcactctgtcgcctaggctggagtgtaatggctcaatctcggttcactgcgacctctgcctcacgggttcaagagattctcctgcctcagcctcctgggtagctgggattacaggcatgtgccaccatgtccggctaattttgtatttttagtagagacggggtttctccatgttggtcaggctggtctcaagctcctgacctcaggtgatccacctgcctcagtctcccaaagtgctgggattacaggcatgagctgccaccacgcctggctggagatgtgattataaaggacctgagtagtgtgaataagaagtttgaacatcatatactgtaagtattcaggagccataggtggcaggaagtggcatcacagattcttgcttcagaagaataacttgtttccatggagggtggattaaaatatagagagcatggtagtaggatgacttattagtaggcaggaaatgccaaggattagagtaaaggtgctgggtacagatttcacaccacagccaagcaagtgagaaatgcaacctgtgcagtgaagcctttaattgcgtagcatccttattcctcaaaacatgtcatgtaagagggaagagttttagatgtgtgtagcccagcttttgggccatttcttctacccctgccttaccattggtcatttcttttgtattcgagtaaagaaaagataaagggagcagataatgaagtattttctcagtttcccatggctgatttcctaaaactctcattttaattaactatcatctagtttccctggccctctctattcatctgcttaatgtgtgtacatcatcattcaacagatacttattggcacacctactgtgtacgaggcactggatgtgggtactgaagactcttgggaacaaataaccacactgcagtgggagggaatggggtcttgttgctatggccacagaagaaaagagctcaacatggccgagggccacaggaaatatcttgcatgtatgcagccccagagctcatgttgtggcccaaagtttctgcacgatgagcaaccttaacctgctgagatggtaaccccaacttgtttgggacagtaaaattgttttcttgctgggtgtcttcccttcccaatctaggaagatttagaattcaatataggatgatgaagtaaatcaaacccatacttttgtgttagtctgaggtataatttgtgtatttttgtcatttgaagtgttagtaatacttaaggggatctggcttaataataataatagctaacatttattgaattccaggcattatataaactctttacaaggattaactcttttaatccttataacaaccctatgaggtaaatactgttatcatcaccattttacatgtacgaaaattgaagcacagagaggctcaataatttgcccaaaggcacacatttagtctgtggtccaccctgctgaaacccaggcatactggtgccagaatccatattagaatgtctatcagattagtcttgcaatgaccattcaaaagttgtattgagtaatttcatatgtctgattttatttactttttgagaaaaggcctcaccctgttacccaggctggagtgcagtggtatgatcatggttcactgcagccttgatccccctgggctcaaggaatcttcccactttggccttccaagtagctgggactacaggcacatgccaccacatcctgctaattaaaaaaaaaaattttttttttttggtagagatagggtctcctatgttgtccaggctggtctcaaactcctgggctcaaatgattcttctgccttggcttcccaaactgctgggaatacaggtgtgagccaccatatctggcctacttctgattttaagtggaaagataagaattatatttaaagtgtatattatttaaggttcctaagcaatattggaatgcttaagcaatttgttacatttttcttcttggtgttcactgagctttttgaatctacacattgatatcgttctgtctttcaccaaatgtgaaaacattttggccatgatttcttgaaatatttcttcttctccattctttcctttcctctggaactctaattacacttacattagaccttttgttactgttctccaagtcatcgaggccctgttattatttttttaaatcccttcttttccctctgatcttcagattagaggatttctgttgttcagtattaaatttcattgactcttctgcaacttccaatatttttcttaagctcattcagtgtgtatttgtttcagttattattgcatttttccttttctagaatttccatttggttcttttttcctttttattcattacaagcgtatttttctttatagccttaatcatagttataataactgttttaaaattctcatctgcagctgggcatggtggctcatgcctgtaatcttagtacttctggaggccaaggagggacgattgcttgaggccaggagttcaagactagcctgggctacatagagagactccatccctaaaaacgaacaaacaaattggccagggaggtggcaggcacccattgtcctaacaactctgtaggctgaggtgggagtattctcaagctgaggagttcaaggctgcagtgaactcttaccactgcactccagtgtgggtgacagagcaagacctgtgcccaaaaagcaaacaaaaattcttatctgctatttctaacatttgggtcgtcatggttcagtctccattgatttttttcccttgaatatggttcacattttcctgctttggggaattttgaattgtactcaatattgtgagtaatatgtcataaagactcatatccatcatgttcctctgaagattattgtgtatgtttgtgtgtatatatgtttaagcaggcagtttactttgctgggctcaaaatcaaaactccatgttttcagtggtgtcagcagctgacatctctgtgcagttctttagctgtagctaggctgcttggcatcttgtcacagtttatagttcaagggtttccagatattcagtggagtttatgtgcagaatttaagctcttactttgcttctcttttctgggatttcccacttcactttccgggtgctgtggtcctcccaaattctatactcacccagcatgatggtgaagagggctgccctcaggcaaaaacccttaaaaaaatgagaagttcacctagtgtttgttcccttcttctaaatgtgcatgtgtcttcagtttctgcctgcttttggtcgccctgaaatggttgttgtttatagttggtccagagtttattgttgttactttgtgggaagattggtccgatgggaactagtgagccatttccagaagctgctagccttccatgtcgtgattcataagaatttttagttttcttgttaggttttctagcatcagataagtgctagggaaagttttcgttgctaggcatttgaaattcctatacaggaaaggaaatttgaatgtattaaacttataattgcagtttaaattggtgtaagggaattaatttaactaagttttaaatgggactggatatttaagggattttataatctgttcaaaattggatgccttaaacagtcaaagtcaattggctgttcactttaactagatttataaataggaaaatatttgtaaattgaacttaagaacttaaggagaaaccagttccctaaagttatttcttttataaattgaatattagtttaataatgttaatcacaaatcgtctttttattcacaaaagacacccttggggcagcaaaaaactccagtggtaataaggaacttgggctttagtggggcagacctgattaaccctgtgtctacagacaacgagagaagtgcaatgggataggcgagcacaagtgctgtgggaggatgaggggatggggattggagatgttcctggaggagatgacacctggcagacaaagtgagggaaagagcattcctggctgggtctaggaatggtgtggagtgtagcacctgtgaggatgtggaggcctgaaaaagcattgcccgcttaggaaacttacaagttcattttggctgagagaatgaccttgggggctgagctcgggagtttgacctgcatcctagaagctgaggaagcaccatcaagaaagagaaaagacaacccacagaatgagagaagttttacaactcatatatctgataaaggacttgtatctggaatatataaagagctataaagacagggctgggcatggtggttcacacgtgtaatcccagtgctttgggaggcagagacagggagatcacttgagaacaggagttcaggaccaacctgggtaacagtgggaccccacctctaaaaaaatatatttttaattagctgagtgtggtggtatatgcctctagtcccagctactgggggtggtgaggggctgaggcagaggaattgagcccagaagttcaaggttgcattgagttatgatcatacgactgcattccagcctaagccacagagtgtgacatttctctgtggccaataagcacatgaaatgatgctccatatcattagccatcaggaaaatgcaaattgaaaccacaatgagataattcgcactcactaaaatggagaaattggaatcctcatacactgctaatgcaaatataaagtggtgcattcacttgaaaagtgtagcagttcctaaaaaaggttcaacgtagagtttaaaaataaaaaaatataggccaggagctatgactcactcctgtaatcccagcactttgggaggccaaggtgggtggatcatctgagctcaggagtttgagactagccgggacaacaaggagaaacaccgtctctgcaaaaaatacaaaaattagccaggcgtgttctcacacatctgtagtcccagctacttgggaggctgaggtaggaggatcacgtgaagctgggaagtggaggttgcagtaagccaagatggcgccactgcactccagcctgggcaacagagtcagaccctttttcaaaaaaaaaattttttgccaggcatggtggcactcacctatggtcccagctacttaggaggctgaggcaggaagatcgcttgagtccaggagttgaaggctgcagtgagccgtaattgcaccactgcactccagcctgggtgacagagtgagaccccatcttgaaataaacaagaattaaaaaatgaagagaagtagtatgggtgtagttgcagaataaaggacagtctttaaactgaataaactcagctttataaaatacttttttaaaaaggcggagaaaagaagctgagggaacccattgaactataggaagaactatatttgcagagggaggggggcctttgggaacaaaaccacccacagtctccatcttggcggaggagccctgacacactcctgcactcctggagcacttgggtgggactaggggaggtgccactgactccaggagctgaggtttgggctgtgtagaggatgagtagggagatgcagaggcagagaggcctgtgttcaccatgggatgacacaggagaaaaggctggccagctctccctgtcttcccaactccctctaaagttggcgagaaaaagcccttaattgtattgcaatggttatggattcggaaatggtttttcccttgctgtgtgttctttttcctcagattggaaaggatcgggcactgaactttgacccctgctgcatcagctactttactaaaggcgagtacattttgctggggggttcagacaagcaagtatctcttttcaccaaggatggagtgcggcttgggactgttggggagcagaactcctgggtgtggacgtgtcaagcgaaaccggattccaactatgtggtaagaagagaaagtttgttctgtggggccatggcttgaagaggcactgagcagccgccgtgtctcgagtcacatcactggggtttgtgtctgacaaatgggggaatgcagactttctccagagagctgggaattgacagttctctcaccccgcaggtggtcggctgccaggacggcaccatttccttctaccagcttattttcagcacagtccatgggctttacaaggaccgctatgcctacagggatagcatgactgacgtcattgtgcagcacctgatcactgagcagaaaggtaagaggcaggtccagaccttgggaagagggacaggtggaagcaggtggaaagggctggtgacagggcacttgaaatgacaggaaaaggtttctctttggcgttttgcaaacctgttagccactgggtctgtgtcttgttttcttttttttttttttttggtgggggaagtagggatgccagtctccttgaggatctcatgaaagcaataaatcctctctgaaaaatgtaccaactcagaattttgcacataatttcaaggagtacatgaatttccttagtgagggaggatgatttatgacaggttggagccaggtggttgacctgcatgggtcttcgtggacctttatcctttctggtcagagtcactctggggtgcttctccctcagccctgtctccacttgcctcctggtgggtccttctgccagagatgagcagtggaattggattggcacaggctaggtcagaagatcagagttcccggcctcgcatagtcattctaagccctaagactgcagtctctccctctgtccacttaagttgctgtgctggttaaatagactcaatccacttacttcaggtgtattcatatctggatgtgctggccttagtgcactgctaggtgcctttgcaagggatccaggttgggggttgtcttgtagattcagatgagtgtcctttggtccccctgggggaccctatctttttgaagattctggctgtggtggttggggcaaagccccttgggcagcttcacagtgtcccccttagggacattttctccacctggtctgtagtgggagtgtagagcctggtgtgtaccagaaattacatgtcttccccgtttgtcaaggaggtgggcagggagcggccagaggtgaggtcagttacttaggcaggcttctgatcaccgggggccactagtgctgtgcagaggagtttatatttgtatccagcaagtgatggtaacagtgagtagtttatttccatactcagttgtcagccttggaccatgaagattgtgtcctataggactttggatcccagggttcagcagagttgattgtatgtattagatactctaaagatttttcaatgagagtatctcactttaattgccagtagcgctaagtaaatgatggcttttaatttctctgccttgcaccttacataacaacctcttgctagaactagatatttttttctttgacagttcggattaaatgcaaagagcttgtcaagaagattgccatctacagaaatcgattggctatccaactgccagagaaaatcctcatctatgagttgtattcagaggacttatcagacatgcattaccgggtaaaggagaagattatcaagaagtttgagtgcaacctcctggtggtgtgtgccaatcacatcatcctgtgccaggtgggcagcagcatgttgaaggagttgggctgaattccatttgtgctccccccccagtgatagggtgcccacctcatggttttaaaactggtcactagaaaacaagtctgttccatcaaactaagtggtgcttattggctttcattttcctggcatctggatgaaccagactctatcagcaagtcatgagccataaactggagaatgtttttttgttttattttattattttttaaaaaatatttttcttgagacagacagggtcttgctctgttgcccaggctggaatgcagtggcacaattatggctcactgcagctttgacctcccaagctcaagcggtcttcctcctgagtagctggcaccacaggcacatgccaccacacccaactaattttttatttttagtagagacgcgaggctgtactttgggaggctaaggcgggaggaatgcttgaacccaggagtttgagacctgtccagcttcctaaagtactgggattataggtgtgagccactgtgtctagccaagaataccttgttctattgcagaacatcttgtcatactgggattagatatactttaatgacttaaaacataaattggtgtacagaatgaagatagtttttattgataagcatatacacataaaatttgtatcaactcagtaattgtcaaggaagttttaattcctgaaagattttttttcatagaaaaatatttctcaagattcttagagagtgtctaagtcaatgccaagagaagtttggaaagactttgagagaaggctagcccagcatcttggaagtagaggtggatttagttttacatagttctgttggaggtgataaaagagaagaattccttaggaatcactgtagtgtaaaatactattaaaatctctcaaaagcctagaactgggctgggtgcagtggctcatgcctgtaaatcccagcactttgggaggccaaggcaggatgattgcttgaggctagtagttcgaaagcagtctagaaaacagagaccccatctccaccaaaaaaaaaaaaaaaaaaaaaaaattatttaattagctgggtgtggtggcgcttgcctgtagtcccagctacttgggaggctgaggcaggagaattgctttagccagaaattggaggcagcagtgagctatgatagcgccactacactccagcctgggtgacagagtgagactctgtctcaaaaacaaataataaataaataatcaaagttagaactccaagcggtttagggttgctacaaattacaggatagatgtggcaagtatgtgtacttttgagtgctgcctctggcctaggctgcctgggtgggggtttgcattgaagatctgaggctgaattgggctccgtggggaagccttgcatggagtcttggattaacgatgccaatcgtggggtctacattgggttagatagatggatactgaatgtgtaggtattttctccccttagggacagaaagatctccttggggaggtctgggggcacttattctgttgaatttccatgcagagctgggtttgcttcctaggagaaacggctgcagtgcctgtccttcagcggagtgaaggagcgggagtggcagatggagtctctcattcgttacatcaaggtgatcggtggccctcctggaagagaaggcctcttagtggggctgaagaatggacaggtgagtgctccctcacgtctcctgtcaggctgataatctgcatgcacacgtgggtgacccgtctagcaatgactctgagctgggttctcagggcaggaaaagggcttctctcctccatgggtgaattgtggggcagcctgagttcagttttttgaggacagcctcaggccaaaggtgctgtggccctcacactcctagcaggcccacgttttggcagagttgagctataacctttggctacatgtagagtgtattagtggcttaaggtctccagaaggtgggagatttgttagagatgttgcttctgtggatttctagagggaggcagagatcgttacctaggtcagctcctgattagggcagcgagtggattaaggcagtgcgttccagcatgtgtcctaaagaatgctgggtcctcaagatactgatagatgtcataagcaaaatgggccctttggccagttagatgtgggatatccaggttacacaaaattctgtgtgtgtgtatacatgtgtacacgtgtgttctttgctcagcataagaaaagttctaagtaggctgctacatggaactttgaaagtgacaatgtagctgcattagcctgacagccaagctgtgcagcagatggcttatggctgaggcttgtcaggtctttgctggggatggaagtcacagggcatgagagcagtgggtgaagtcaagcagcaatgccaaggggaggaagggccgcttatttctcaggcagctctcacttccaatgggagcatggactatggggtcaggtgggccggaggtcgtgttcttacttagctactcactggctttgtcatcctgggcaggtcactttacctctgtgaggctggttttacatgaggataataccacatatttcatagggctgtcaaaaacagatatcatcagggttgggagttaaagccaatgttaaaaacaaaacaaaacaaaaaaaacaccaggggtattaaaacaggcatggtggagggtacctgttttcccagctactcaggaggctgagataggaggatcactttgagcccaggagtttgaggctgcagtgtgatatgattatacctgtgaatagccactgcgatcagcctgggcaacatagcaagaccttatctctaaaaaaaattttttttaaaccagggatatcagtaaatgatagctatcatgatcactatcatcattattataattttctaccacatgtcttgtcagtgttcatagtagctttttcctgtgttagttcgtgactcagatctctgctaggtggcatctcctaaagctgcagtttgggtaatgtcatcaacaaatccccagtccgaacagacactgaagtgagctcggcctgtctcagggctgtcattacttctgcagcctctgatgaacctcgcttctggcctcctaaggataagccattgccccccacccccctctttcttttgatgagtccttttccctgcacagagcttctggtgaaggtggtgggagttgttcttgcagagcacatgggattccaacggcctggcagtgggccaggatcttgttgccatggtgactgacactgttttcgctgaaattttgccagatcctgaagatcttcgtggacaatctctttgctatcgtcctgctgaagcaggccacagctgtgcgctgcttggacatgagtgcctcccgtaagaagctggccgtggtagatgaaaatgacacttgcctggtgtatgacatcgacaccaaggagctgctttttcaggtgaagtccctgagggggcccagggacatcatcctttgattagagactctcctctagcttcccagtccctgcaggaggctctcctgctctggcccaggcaggtctctgggaggggcaggggccaagcacatgcacagagtcccagaggccctgggccacaacctgctcctcccacacaggcacaagccgcagggcctggaccggcctctttaactttggtttccttgccaatggaaaccgaaggctctgagccagcagagcctttcttaagcgtttaccatgaacaagaaatggggcaatgactctgagaggggtgtgacgttggcactcagtgaatggggcgatggatgcacttcctttgcagaagtctgtgtctcacctgctgcaggcctgcctgtgtctatgcgcacctacagcgtgggaaggaaacaggatgttttgtcatctgaaagggggaaggggatgggcaagcctggccttctacttaattcacaagaatgctagaagagccagcagaatgcgaagtgcttggatctttggggttgtaggcgttgttcagtggagtcatccagccctgtggcctgaggaagtgtgtcaccagagaagacagcccggcagctctgtgccccgggcctggttggctttctgctgggctcgcgccattctttctctctttaggtctttgtaggtggtcaggactggttttccagagtgaagttccccccaaagctggagcccctcctgactggtttcctcggccactgcagggtttcctgatgttatgggcagattcagtccccttaccaggctcctccttgttctcagcagcagaatcgatgggggaggggtctggagtggggagcagcctcagtcaattagaaggagttacctggccacctctagcccagaggtaactccatgtcagtctcaactcactcatgtccttgagagagtagaatggtttcggggaaagagagggcatagccttcaagctgacctgggcttgggtcctgcctgcatcccttactgtgtgatcttaagttagtgagcctctctgagccttaattacttttctctaaaatgaaattagtaattgccccttacagaattgctacaggaatacactagatactacagtgcctagctcagtgttgagcacaaaatggggcctgaaatgttacttcccttctccccagcctcacctcccacctatagggggcatagctggccccaaatgtgaatcttgtgtctgagcctagaatcatacaagtgtggaagggcgtctgtgctgccccatccccactgctggctctatggcaggctaggggaggtgattctcagccctgccaggagacatcagcattcccagctgtaacattgcctgctggcttttcctcttctccactgcccctccctctacacataaaacagctatattgattttttctcattataaaaaacaatccatgctgattataaaagatttagtcattataaaagatcctaggcagaaaggtatgagcatatttcaggagaataattttttttcaaaagtaatacttgcttactcaaaaattccaacaacacgcaggtgcatggaggggcttgcctctgttcatttctcttgcctctgttcatttctttgtggtcccctttcatccttttccctccatcccactgtaagcaatttagtgggattcagtctttaagagggtattgggctgaaatgtgtgagcgctgaccaagcccagggtggttctcacaggatccccactgtccctgttccccaggaaccaaacgccaacagtgtagcttggaacacccagtgtgaggacatgctctgcttctcgggaggaggctacctcaacatcaaagccagcaccttccctgtgcaccggcagaagctgcagggctttgtggtcggctacaatggctccaagatcttctgcctccatgtcttctccatttctgccgtggaggtgccgcaggtaactgggggtgcctgtccactcttagcactggcaaggctgacaagaccagggaagctgggccctttgctggtgctttggggagagagtagcaaggagagaagaatggcagctgtgaggtcgtgggaggcagtctgggcctggaacctgccgccctgtctccactccttgcaacctgtgtgactgggggcaaacagctcaacctccctgagtatcagtttcttccttgtcccctttctgtagggatgggaggggtatgcagtgttgtcagcagcgtgtgttttgcagagagcccagcgtggggccgaatggagtgagcagcaaagccgggagtccggcagggtgtgtgtgtgagtacgtgtgtgatggtggtgatgtgtgtgtgagagagaggggagagagagaatgagtgggtggggggtgtgggctgaggtctgtgagccaataagggagcatgggactctgcacaagctctctgaaccaggaggtggccagaacagaaatggggcactgaagggtggagccacagaatgggggagggcagaaccacagacaggcgcctgagattgacctcccgaatgcaggatggtctcccctccaccttctgcaccccaggcagatggtgctcactgtagaattgccataaaacagagacgtgcatagcgagaaactgtagccttcagcatcccatcctcaggacagaatcactcttaaacatgttgaaatacatctgcttagcgcttttctacgtgtatatataatatatgcataatatacaattaggagcatgtggttttataagaacatttttaaacaaaagtggaatcacactgcaaatacttttcatgacttttatgtgtatacgtattgctacctatagatggaacctcagatttactgtattccctgagcctggcctgtaaacaagacttctcatcccttcctttatggctatcttctcatttcacctcacattcggttatggcagccccatcactgtctatgaagtgctggctgtacactagtcatctggccttttcactcaacaatctcctaaagcatcgttctgtgtcagtaaatggtaaatgttcttattctgcatggcaaaatttagggtaattgtagactcacataaattgtaggaaataatacagagatcccttaaaccctttgcctagtttcccccaacggtaacagtgtgcatagctctagagtgatcttcccacccatgttggcatgtgtaatctcccaccacagtcatggcactgaacactgccaccaccacaaggtccctggtgttgtgctttttacagccagcacccctccctcctgcctggtccccacctgccttgtatttacagctgcattttattgtgtcttgtggatgttccacagctttctttaccagtcctactggacatgtttgctgcttatagcttttttgtattattgtaaatagcaggcatctttctagctaggtccttgcacctgtcccaacttggcgccttggcataaattcctagaaatgaaattgctgggtcaaagcacgtgtacctttgaaagacttttagggaaatttccaggtttcccttccgctaggctctgtcagtctgttttccccatacaactcagcttcaggctagagcccacttcttctaagttgatgataccctcgaaactcatgactgcaagacttactggggaaatgcccatcatccatgcctgacacagatcagctattcaagaaatgttagtggaattcagatctgaggaaaaagaccagaaagcaagaggaagaagggaatgaggtgggtggaagtggcagcaggacgaggggcacgaacagcttctcctggactgtgtcctcgtcatccttgtctgccccattacaaacccacgcaccacatccaccaggaactcatctccctcaattgccccaaactagctctgcttattttattaaaaggttttctcccaagattgccatcctgacctcaaaaataaatgcagtttgctgctctctgactgtggccggccaagaggagccagaggggcagcctggggcttcctctgccaggactttaagattcagcagcaaagtcttgctgactgcaccaaggccatcctgctgacgcagcgggtcaggactgccaagggttaggaaacacattctcaagacaaaggctgttcatctgtcgcctctgcctccggccatcctgtggttttggcccagagaggagggagaaagcatcagacccagtcttggaatttttggttgcctttcgaaatttacattgtcttgtgcaagaactggtttgtcagggctgccaagtaggacaacgagccctaggagggcttctcaaggcggtggtgacttcatgtttgaaatccaacagcaagataaagtatagctcagagagtatttgttcagtggggtctatttttaaaactccactcaaattgtgcctcccaagtaagtccaagtgttagccatccatcatatgctcagctgtgatatgcctgcctgagtgcctgtcccactcacggggcagtcagcatggcaagcagttggtgtggttcggggaaggagcaccagctttcagtcctgactctgccatctcaagcagctgtaactagagcaactcatttcactctttggggcctcatttcttttctgtgaaatggggttaattatacccatctttcaggtttcgtcaagccaaatttctattattatttctccttattactgactcataaaatagcaaaaaccacaaaacacaactaaattgcaacaggctgtacttactgacggactttagaaaggaaagctcattgtgtgctttaagaaaagctttcaggagtttgagaaagcttccaggagatggtgaaacttgatctgagccctgagaggtctggaaaggaagagtggagcagggaagcttttcaaacaaagggaaaggtgggggtaggaacaagactggagagcctgggagatggtgaggagctggtgctgagaaaatacagtgaaggtaatgatcatgcctgcattttgcccagtgcttcattatttttggagcacatctctcctttgcccatggtagcctgagctgggcaggacatctaaacagaagttaatggatttacccaaaaagtcaccagcctaggatgtggctgagcctggcctgggttctaggtcacctgctccgtagcctatgcctgctgccccgctaaagggagcatttaatgtgccaatgaggagagatggcatggtggaaaagataagcacttggaagcagccatgttttgctctgagagtagacagactcaaaataaaaaaaattccttcaattctaaagctaaaaaatgggactggaaatttcaaagacagacaaaagccccaaatggagaaaacaatacttcaagctccacatttgggaaccattagcacagaggtcctggctgatttctcttccctgcccaggaagccaggagagatgcaggccactgaagcacactggctggcctaaaacaagggcaaggcctttccttgttaaagatgtcatggcccaactcaagactcattctcaggcctgcacgcacatatgcacatatacacgcgtgcatacatgtggcaggaaggggcacagaacctggagtccagtcacctctggctattgccagctatttgctgggacaggtcatttgtcctctctgagtctcggtctcctgggctgtagccagggagaaataatacctactgcacaggactgtggggacagccaaaagccttttataaacctaagaaagagaagtcgttaggaactattcatgggcactcacagcaaggcaaccccatcttgtaggagggcatctgtccccagggcagggatcaggagagctgtttccagaggcttccagggtaacttggagcaaatcacttacctttcttggactcagtccctggaagaagaggccattccagaccgcttcctcccacgaactcattcattgtgtcagcaaacgtagactggggttctgctgagggaggccgatacaacccaccactgcccacggctgtgcacggctttgctgtgggaacaggcctgtaactgcggcacaacctgcgatctggacaaagggcagaggaagctgagactctttcccctggggtgggggcttgaggggcttgggaggactctgcagaagaggtgacatttcaacagggccttgaaagccaaataggtattttccagaggcagagtggggaggggcaaaggcattccaggtgagggtgacatcctatggcgaggcaggcctgtaggtgggaaggaggggaggatgggcagagagtttgtgctgtggagcacagtagcccagtcatgagagaggtgcaggatggagcacacagggtgggctgggcaggctgggcagggtgctgattggcggctgcagggctgctccccaggcatgggtaatcatcccacgcatctggaggcaggctctgtatgcatctggttctttccatggctctgaaaacagtcttctttttttcccttgatgaaatcctgcagtccgctcccatgtaccagtacctggataggaaactgttcaaggaagcctaccagattgcttgcttgggtgtcacagacactgattggcgtgaactggccatggaagcgctagaaggtttagattttgaaacagcaaagaaggtaagcatctagccagcaggagctggagtttggtccttgtggggtcccttaagaaggcagatggggacccaggtggcacggagaggccatagactgcagcagtctctggagttaggctgacctgggcttgtatcttagccacttcctcactgtgggcctgggtaggtgacaccctttctaagattgcttctctatagacgtaggatgatgacaggccccatcctcacaaagctgtgaggatcaaatgggaggatgcctgtaaagcctgacccaggagcagcatgtcagattctggctgtcactcttattagctgttctctgtgggaagcacctgactagtagcctggcacatcacaggcactccgtaaatggcggcttttattatcggtgtagtcactggccatgatgctgcacacaatgctgcttttcttagcatctgccaactaaggtgggagagatggtcaaggtctctgattctgacagcaatgtgggcacttcccacgtaccttcatggcgggattcatggacttgattcgttgtgtcctttcctggcctagtctatgaaagctagagagatggctgaaaacatctgacccctctctgcacataaggaaaagcccaggtatgttcctgagctgtgtttccatctagaacctcagatggaggaaggaatggcttccaacctccactcccctaccccttccctctttatctccccacagtcaattaatgagctgctcattttgtccatattcccgggctgacattgaaggagtggcaaagagggacgtgatgcccgccttgggttagatcaagacttgtaggcatgaagagaggagactggaccagaccaggactaagaagcctggctgagaacgagctgtgtcacataaggggctctgggacctcaggccagccactttccttggagccccagtcctcccagttctgaaatgggggtggtgagaatgcccgctgcagtcatgaggcttaactgagatgttgtaaaggggaatttaaatcagggatggttgtgcagatgctagccattactaaacaagggaagtgatcgttgtgtaacaatgatctagattatatttttagatgtcctcagtgtaggaaagtggagatggaggaggctgtaagaattcagaggaggggccaggcgcggtggctcacgcctgtaaatcctagcactttgggaggccgaggtgtgcggatcacaaggtcaggagatcgagaccatcctggctaacacggtgaaaccccgtctctactaaaaatacaaaaaattagccgggcatggtggcaggcgcctgtagtcccagctactccggaggctgaggcaggagaatggcgtgaacctgggaggcggagcgtgcagtgagccgagatggtgccactgcactccagcctgggccatagagcaagactctgacttaaaaaaaaaaaaaaaaaagaattcagaggagggaggaggcatctctatggagggagcttccctctcctgccccacccagaaatgccagcagggagggagacgacaaatccctagaatagaaaggattgtaaaaagccacaaggtttaatatgagtgtttactgatatttttataaatatatatatttttatatatttgtttaaatattgagacggggactcactgtgttgcccaggcaggtcttgaactcctgggctcaagcagtcttcttgcctcagcctcccaaagtgctgggattacaggtataaaccaccacacccagccagatttactatagttgaaaagtaagtgtatgtggtatatatctattgtgtacaacatgctgttttgaaaaagccacatgatattgaagataggctggatgttactatttcatctaaatcccgagtaccccacctctttactctgtgccaggcactcaggctcaccagcttggatatagtggttcctagagatggacagccatccccactagatggcagagaagagctgctgagctcccgccagaccctgagcagagctgcaggttcctccctattcccaggcttccctctgctgagctcattcaggggccttgtgactctgaccaggcaccctgacgctgcaaaatgtgtcaggttgaaggaactcggaaacagatttattaatgggcaaatcctagacactagcacagctgagctacagctagaaagacccttgagagggtgtcagtagcaggcccctttccacaaagaagatggttggagcccagaagcagagaagtaggctcagagcgaggactcagacctcgaatgctcctttccctcttggccactgtgctgggctttgcagggttgccctctcaaggcgctttaaggaaacccagatctagagggtgatgtgtaagacctacagcttgggacacaggtagtcttagccctgtgttccttggcccatgtgatgcccgcattgcccttttctacgaattcctcttcacaaacacttgtttgccaggttctgactctgatgcctcccttaacgctgcctcccacccctgctcatgctcagaccattcatccgtgttctccaggcatgtggttcgtagttggagagctcttagctctgggaggtgtcatgatctgtttaattgaccagctttccctgttagaatgtggacctctgaattgtggagggggacaggggccgagacatgtttctccctgggtcctcagtctcttgacaggaagcctggtcctgtgggatgaaaagataaagttgcattgtggtcacctgcaaggcaggccggggacttgctcatctcccgaggtcttttcaggagggaggatgccatgctgctgagcagaggctgcaagtggtcaggattgctctgcgtgttcagttcaaagggctctggagctgctgcctcctctaggcacaggtcagcccattttgaatggggcaataaatggtgacagcaaagccacctgaaagcagcctgacctggtggcttgtgctcctccaaaccctgggcagaatctgaaagcagcaaaactagcttagctaacaccagtctgcttgttcctcagaaacttctagaggtccatgagttaaagtctctggctttactgtgagttcaaggcaagggctgcaattttagggtttacataaagagtttgccttccacagacttggtgggattcattccctacccctccaccttcttccagaatctgtctttataccctctcagctttcccctcctctgctccctctgtggtaccaggggctctgggtcccctgtgtctgtggcaccactgggtaggcatagctgtcccctgcattctacccatgttgccaagatgtataggcagtctctcatcagtccatgcatctcatcctctcctgctgtgatgctgcgtgaccccccagagggtcagaccggcttgttcttctttgggtctagagtctcccaaggaggcaccgccacagactgtggcatcacggttttgttttacctgatctcaaaatgactgatgcaactgggatgtctttgctgttctttacatggtccaatcccatggataaagccatgcctcgctgggtggtataacctcctgcacgcacgatgattaatctgtgcttgctcccttcctctcctctgtggctcactgtctagatagagcttgacttcccacccctagccaatcacccacttttgaagccaagaagacagcttattttattctttatttcttcgccacaggccttcatcagagtacaagacctccgatatttagagctcatcagcagcattgaggtaaaagatgaagcatttttccttctcaagaaggcatacttggggttcctgttttaggggcagcccttctaacaggcaagagccttgaggacatgggaacagagctcactggcgtctgggcatctgggccacagccttgctccgggggcagagtggccacactgggggagacaacagcaggtagtgtgagctgttgtgtgatagctgggtgaggcacatgggttccggatctctccagggttgggtttctagtctgtgaaaagggattggacctacctcacaggctgctgtgaggattcagtaggttctcaggaactggtttgcatcctcctggtggcggatagctggtcaccatcctctcagactccagtaatctgatagtgttggaggagtttcccaaatgcacatgagctgagctccattccccagaaatggacctggggagcaaggcccacagtctgaactgagcgccccagagttctggagcaacccctagccctactgtttctggctgagaatattgaccttgtcatccaaacccaataggcctgcagtgtgctaaggaagctggttgtaggtatgccatttgctgggtggtggtcaacactatgctttttttttcttttttttttttttttttctgaaacaaggtctcactctgttccccaggctcaagcgcagtggcacgatcacagcttactgcagcatagacctcccaggctcaaatgatcctcccacctagcctcccaagtagctgggaccacatgcatgtgccaccccgcctgattaattttttgtatattttttagagcagggttttcccatgttgcccaggctggtttcaaattcgtgggctcaagctattagcccaccttagcctcccaaagtgctagcattatagacttgagctaccatgcccggcccttagacactattcttaatttctgtgtatctcagtgctgtctggctgtctgttaaaaggcatatacattttttctcctgaacatatttattgtgaaggtatgggaatgtgagatacatttgaattcccagttggaaacagtgaggaaatagcaaatgtcttgtccctctcattcatttccccataataaacacctgtcatgggccagcccttgtgccgagctcagtgggcacagagctgaggaggagagaggctgacaggagctcacagcctgctaagcctcataacgtaatctgctctgtgccacatgcgtgatttatgtgaatgctgttctagatcctcacattaactgaatgaggcaggtactgttgctctccctattccatgcaggaggaaattaaggctcagcaagacgatgccacatccccatgggtccatagccaaaaacttggtggaattcaagcccagtctatttcctaagctcatgctctctcggccacataccctccctacccgcgtgttgtaaggggcatctgtatattctggggtttacctacccgcgtggtaaagggcttgttcggagctattgctcaaaatgcccagtgctgctgactttcacttgtaaatccactggcctggatctgggggtcttcacctgaagccaaggagcataattttcctctctacaaaagtaactgctgtggggtccaactattacttgtcacatcttactggggtcaaaatgtagtcctctcctcgtatgctatgagctgggaagtgcgttaaagtaaactcctaagattgtctcttgaaaaaaagtaaagtgcctttgagtgtgctctatatcgactgcctgcagacttatttgcacacatctgggtgctcagcataattccagagaactgcagatccttagtgggtgccttttggataggggagatgttcttgtcctgctgacggggggaaagaacctgcccatgttgacatgcacctgctgagtgccatagatcgtttttattggtcatggtgatatcctggggcctagaatggatatggcctgaatttcatgtctagtaaaaccttttttgtttgtttgtttgttttttttttgcagagatagagtctggctatattgaccaggctggcctacaactcctgggctcaagtgatcctcctcttttgacctcccaaagtgtagggatcacaggtgtaagccaccatgtccagccaaaatcaatcttttatctcacggcaagatttcaattcatttccaactattaggagttagtttgtttgatgagcctgagctgtgtgcaggtttttagaatgataatttctgtcagtatggaagcatgttgcctccagctgttaaaactttcaccagcttgtctaagagtttgattcaatgtcttatcgtcctccaatatgctgctctttctagaaaacaagcaaaaggaaactgctagggctcagggtttgggtgctactgagtgtttacaaatactcgagctgtagacaagcgaatgttccctgacacagaaggaagaagctttatcctagctgtgctaagtgtgtgtgtgtgtgtgtgtgtgttgttggggacatcacttgcttcaaaagactacattgtgtgatacaaggaatatctggagtcagacagaactgcgtccaaattccagctctgtctgaccctgacctgttcctcttcttgagtctcagcgtccttcactctaacacttgggtagtgagacctaccctgagggtcactgagaggaataaaggggccatgtgtgtataaagtatatacccagaacctagtggatgttcagcatgcgggatttcttaccttctctttagaagtagggatatcgtaagacttgtcatcctattttattggtctccctcttgggcagaaaccctaaacattctcctgctctgtcatccccatgagccacaactctgccaaacggggcctgcggatttgggagatcttgggagcttaggggtcatggatgagtcagagcacacactattcaaactattccgtcatagccttggaatacacaggaaagcaaccctgaggaatttccattaaacaaacaaaggtttgcatctttttttgatctttgcttgtctggtaaaagcctgcttttgttgtcaagccttcccagcgggaacctaggggagagagacaacagccaggagccaagcccaggttccagtaggaaggcccaggggcctcacttgaaatagccacatctaacctttgtaaaggctgcttcctgcccatggctgcagaggccatttcctttgcttctaatttttccaggagaggaagaagcggggagagaccaacaatgacctgtttctggcagatgtgttttcctaccaggggaagttccatgaggccgccaaactgtacaagaggagtgggcacgagaacctcgcgcttgaaatgtacaccgacctctgcatgtttgagtatgccaaggtaacctaccctgtcccaggcccaagctccagcttggagcccactggtattctcacgtgcggtgtccaagttattttccccaagagtgctgcggacaaaaactagcaatggtctcagaaaggatgtggggaaactggtaaacaaaggacccatctacagccactggttgaaactcacctaaaactgacctttaaggctgacaccaagggggcagactatggcagttcagaccttcatcagtgacagggctggatggctgtgggtctacaccagcacaatcccttcattgagttgagggctcagggcttcagggctgtcccccacaaatcctctcaatccttgtcaggagccgccaagaatcggtgtcttcaggcaggagccggtcctgccgatcatgcaggacgacatggtgcctgccagccaagtttcccatagcacctgctgattgtcctggacttctcactgggcttctgggaagtcaggcagagcctccgccctcccatgttagcgcagcatgcctcacgcctgccggctgcagagtggctaccatgtggttgcagtgggtgatggcagagattcccttttgcattgggacggcccccatgaaccttactccccagcagagctgggccttttaaggcaggtgtaggagaggagcttcctggaccaggctcctgatggcttctgtgggaaggagttgcactaaggagcccagagcagtcaagacatttgcagttcagtctaagcaaggttcaaagaggcttcggtacactgggcaatgagggtcttccttccatcaaggggctttgttaacctgccttttctggaagtgtcaaaagtggctctcagtatgttatgaagtgactcatcagccataacctattggtgggctactaatggtagttctccagctcacaagttcaagatggaaaatcttccccacttttttctgcttttctattcctgaagatggctgtgctcttccaccacctgttcgaccctggggctgaaggtgtgtttggtggcctgtgatgttgcccaggacctattgttcatcaggacttggacgagctcctgggccccagcctgtcttttcaccttagtgatttcttcactccgtacctgagacccagggtgttcaggctccctctactttttcctcgtcacctttcctaccctccctcaggccccaccaaagacacctagaagatttcataacacattcatactgagatcaccagagtcagtgcatctctgcttccggggataacaaaattttaactcaggatgaacccttaagggatcaagaccctagaggtagaatttagggttgggaacccctgaggcctcctcaaggaggcagctgtgctgcagtagaaaatgcctgaccaggctgggcatggtggctcaaacctgtaatactagcactttgggaggctgaagtgggtggattgcttgagctcaggaggtcgagaccagcctgggcaatatggtgaaaccctctctctaccaaaaatgcaaaaaattagctggtgcctgtagtcccagctactgggaggctaaggtggaaagattgcttgagccccagaggtggaagttgcagtgagccaagatcacgccactgcattccagcctgggtgacagagcaagacccatgtcaaaaaaaaataataaaatgcctggccttggtgccccagagctggtgtgagtgcagtttctttctgtgggatgacctggggaaaggctcttcggtttgccaaacctcccttcccttctcagatggtaatagcgacagctcagtttagtcatgagatttgcacagaataatgtataggaaagcgcattagaaatgccaacctgtagaaagattaggaagatgagaggggccacacgtgaccacagagtggattttcatacctctctccctggctggccccactcctgcccctgctctgaggcccctccttacactgtggtggacttcgtgtgcccacagcctcccaccagaactgcagcccatttacacactccatttgctccgtctctctatgaaggtaaatactctgggacttgtttttggttttagtttttgatcactattccaaggaggttggttccttttcaatcccccctgcccccacctggtagtctgaatttgagaaatatgtacctacacattatgtggggggtgggggagatctagtcctgattaacgtggcatatttttgtttacttgaaaattgcttcccaagattcaatctggttttcagaaaattttaaaattacattcccacgtacaaataaattgtatgctttctggataagtgacatgtttatatggtgataaagggaattataatgctcttaactcttatgtagtatgttcttatcaaaatcaccaagcatgagaacactgtttagtctcattcatcactcagcacagcctctttctgtccacttcagggccaagtctttgccatggccccagataatgtgtaacttagcttcaggaaagcaaaaagcctttgaatttccagtttgctgagccttgaaggaagcttttagacccagcttcaatgaagtcacagctccctgagtgaccagctggcctaggcttatggctccctctcagcctctcacccttgccgtggtcacccctggtcccctgagcactcactgaagtccctttgaaggacatttctagtctcctaagatgcctgttttcctccagctgccaccctcatttcaccagccaggtaggcagggtttccagcttcgtgctggcatagagaatccgcgccatagcagctgccagaaggaaaggtgtgtctgtaaaggcccaaactaggcggggacagcggctgctttccaagccccttccctttgtcagctccagggagaaccaaaggccagccagggggcctgtcttctattgggtcccagcatcagggtatacaatgcgctttcctccccttcttaaaatgtatcatatattaggccgacctaatactctgaaagcacatttaccctgaaagcaaatgagggaaaaaagcgagctaattgttcaagtggatttttagcatacattgactgtacttttctgacacatgagtgttaatcatggggaaaggagtgctttttttgttctcagtgaggctgacacaaagtactctccacagggtacattattcctgagacaaaccacttcttaccagtaacatagacctgggctgtaagtgctcccagtttccctttttgaaaagctccacctttaaaagctgcctcaattctggcaaactcccacgtgtgtattttgggtaactactctgaaaagaggtggtgttctgaggctgtttctcacacattgtagggccagcccagagaagctgggcataccacttcagaggtatgctgaggccgaaggaacacaggccctaggcctgatctctgagcctccaggaccacagccatctcttccttctcaggtcctctcctgagcaccttccctgcctcagattcccccatggcctcctgctgtcccactgtcggatcaggttctcacccctgcagacctgacctcagcacaggatccctaaccattcagctgagaagcaactaaccagagagatgtttgcttgttatctgttccaggaaagtaactggggcaaagacaatgtgatgattctctagttcagggcacagaatgtttgctggtgactcagagagggcatggagggcacggagggccggcaaacactgtaagtcattttgtttgtgtaagtttaggggaacccatgctcagcctcactctgaagcatgtggtatcacccatatgatctgaataagatgacaggtctcgatatgtggaattgtgcaccaggttgtctcattgctgtttaggaacagtcctgtattgaccaaactatgtgagagagagacagcctgatcatgaacccccgaccctgcagacttcatgtgcagtgccccaaatagtctagaaagtgttgtttagccgatgaacaaatgcccatttgtgagacgggaaggaagcactgggggccagcgtccctgatgctgtcccaggatcccccaggaacacctgcagggcagcctgagatcactcttcccgagacctgggactcccccaactcagcccctcagggccgggccctgcctacctcctggttgcctgcttcagccatgtggagcccgcccttgctgctagaaaagcctgatgtaacgctggcacaggaagttctgatccagagtgtttttgtttgttgtgcttcctcaggatttccttggatctggagaccccaaagaaacaaagatgctaatcaccaaacaggctgactgggccagaaatatcaaggagcccaaagccgccgtggagatgtacatctcagcaggagagcacgtcaaggccatcgagatctgtggtgaccatggctgggttgacatgtaggttttggtccctgccccgagaagcatttggcagcatgtcatcacatgtcacctcttgactgacaagggaaccaatagtgcttttctaattatctaaagctaatgtgatagtggctaggttcttcaggagacacagagattgcacaaggcagtggctgccttccaggagcttgtggagtcactaggggaagggatggtggggaccagggaagaggagacaccgggacatcacagctgccatttgctgagcgctcactacaacccagacgctgtgataaccttccaggcattaggttttccacctatgccatcagggctggtgtctcctcgcccaccttgcagatgatgaaacagaagctaaagggacaagttattcccaaagtccagatagctggaaagttgtagagctgagctttagcctctgatctgctggatgtcgatgccaactacgcgtgtaatggtaggaacaaaaacaaaacaagttccaaatccatcagggaagaattcttatgggaggaaccatggatatcttctcttaggagacactctttccatgaagggaccttaaagaattccaagaggtaaatagagatggcgggaaaggatatgcaggcaggaagtacagcagaaacacagcgagttggctctggttggaataaaagacgtgtgggaatgggagggtgaaggacatgggctgtgggttgggggaagtgggctggccacactggaagggcctccgatgccaaacggaggtgcttagatttgccaatagtgagtgaccacctacagtcagacaccccctcaggcaggcaggtagaatggagaccagataactggctagtgcagtagagcaggagggaacttggtagctgagggcatgagagagaagtagcagtgttagaaccaagtggcccatcccagggtgttggggcagtggtgagtgtcaggctggctttgctctgtggctgctggtgggttacaccattcgtcaaggtggacaacagggagaggagggggttggggtggggcagcactgagacaggatggattcagccttgggactcagcacaccggaccttgagggggaaggctttgtcctcccagtcagtgagcttcaggctcaagcatgtgcacacacacgtgcacatgctgctgcggtaggcaaaggacacgatgggacaagctcctgagggtggctcaggctgggtcctaaaggctgttgattcttctggaaacaacgttgtggtctacaggtagcagtggcccagccaggatttggggatatggaagaggctggttaatgattaaattgtttccttgggtgctgccatatattaataattggtgtgtgggcccctcacaaagggaccttgatggatgtcctaccaccccatctttttcttgtccgatagtaatttttttaaagacagaggcacagattttgttccccacattattctttaaatgaaggggttcatatagaagagagccaggcagatttagggtgctctgttctctcttctggtttttcttgtcactttcatttgtaagtgctatagtatcaggttaccctgagggtacttgagtaattcaagaaacacattaagcatgttctgcttgctttccagatgtggctataaaaggtgtctttcctccagggacgttgggtgtgatgggtgggaaggtttctaaggctgtaagggctgtctatgccacctttccctaaaaacgtgtcctttttctgctgagcagtgttatttttagatgccattattattctaagtgtagactgacaggcctccgtgccttgcctgtctccagacagggattcgttacagctgcttctccttcctttctcaccaagactagcctgggtagaaccctttctcctgggagagttagtttgactccaaattccagcctgaccagagagaacaagcgcattctatccaggcctcatgtccccatgagtgatgggagggctgctcaccatggggaagcagtggtgagccagtgggtccctgcagctcctccctctttggtcagcacgttggccaggaggacagggaagacttcctgcaggcctttgtccagagctcagagcaggccccacactcacctcttcctttagagggcagtcattgaggtattcttatgccttggcatccacttttccgtgagaattcctgcacccgtggtggaaagagtgctgggcccagtcttgggctgggtgcttcaccttccccacagactttattcttctcatctgagagatggaaataatcatgcccacctcttagggtggtgaagattctgatttcacgcatgggaaagctcatggcgtcatctgggtacctggtaggggattaggagataattgtttctataccctgctggatagctcagtgacttccgagaaagacacacaaggtggctgacaggatcctgtaaaggccacctctcccagatcctggtgatgtttctggagtgtgtattcatgcatttaataactacccactgagcaactcccatgggccatggcatagtatcaacactggggaccacagaatgaatggacatacggcttgccgttgacaagacccagagcccaccctcctacctgccccttccctctccaggttgatcgacatcgcccgcaaactggacaaggctgagcgcgagcccctgctgctgtgcgctacctacctcaagaagctggacagccctggctatgctgctgagacctacctgaagatgggtgacctcaagtccctggtgcagctgcacgtggagacccagcgctgggatgaggtgaggggaaagcaggcctcatgggctggggccccacctgagccctgggacacaggcgggtgggtacaggggccctttggggttcagatggagagaagctgccctcgtgatggaaggaacattgggctggcagtcaggtaacttaacctcgaattctctgagccacagaatcgtggagggcctttccacttgtcccttcattcagtcattgagaaaatcgttactgacagccagctctgccagggtggtgacaggcaccggggatgttagtgtgaacacgacagctccagtgcctgctgttgggctgagctgcctctgaccagcaccacaggctcagacacatggctgatgtggagatgcacctgcgtgacatttaaaacctgctgggtagcattttggcagaaagcaccatctgtgctttccagatccagactgtgagagccatttcaggggccagttttttccctcccttctctgcccccaccccacaaccactacttctctctggtgtcaggggctgtaaagaattagccaggtcagcgagaaaggtggccagcctcaggctggcagaagcagctgatgctgccccttctatggctcaacccccaccctccagctcactggctccctgttccctgcagagaaatccatccccgagaggattaggagctgtgccaagatcctcccccgactcacccacccacccatcatggtccattttagagtgaaagcaaagccttcactgagaggagccgtctgactgttgtctgctctctgaacagctccattggtgaggtgatgaggtcagtcatgagaaaaggtggggctagggacagaggcaatggtggcttctcaagagaaatttattagatttcccaagcagcatagattagagcatcttagaatgactcagacctcgctgtgcatcaggcagactttctcaccatggctcatgtccggttctcctggcctgacaggtggttctggggcttaggtgagaagcagtcagtgggtccatacagcacgaagcccacagtcatctttgacaactgataagaagtggtgatgatgataatgtcaattctgtttccttaggtgtcgcccgcaattaaaagaaatctgtttgcagcactacaggagcccacgcaaaccctcaaaataaaatgtttccgattctgtgccgcttctgtggtccagaaacagactgtgttgttactgaatccagtcgcttgcatattgctgttaattgccttttgttttcgaagagctgatttgtttttgcatttctgtgggtagttttttgggggaggcactctccccctctgagttgtcaggctggcaaaatatgatgtccctaatggattcagccaagtacagtgttttcatgggggctgcaggggcagctttattaagacttcatttgctccttcccccaggcctttgctttgggtgagaagcatcctgagtttaaggatgacatctacatgccgtatgctcagtggctagcagagaacgatcgctttgaggaagcccagaaaggtaggcaacacagactgtcaccttctagaaggagcaggagaagttactgccaagacatacatttcaggaaggctaccaagcccttcccatctgtagatcccaagatagatgacttcatcctggggatgtgattgtttggtggtgaaagactgtggagcatggaaagaccattggccttggagtcacaccctcctgggccacactcacttgccacaggcccttaagaggtgctgcctcctctccaagcctctgtggttactgagcaaagtgctgtgcactgcagtgtatcttcccgtttaatcctcgcaacagccctatggtatagctaccatcattatgattcccattttgcagatgagaaaactgaagggtaaagaggtgaagaaatttgcctgaagtttcatagctaggaagtggcagggaggtaatgtgagccagggtaccatgaggacaataagggaggattgccacacagtgtgaggcatggtctctactgagaatagaaactcagcttctatttctggctcagataaacgggtgacttctgctcctcaagaattctgttggtaaaatgggctgcacacagcgtacaacagcatctgaaataggagttaaagcaagtatagaactttcgctgatgttattaatcatattttttaaagttgacttccctctctgtgtcaggccctggctgagcacttaacctatgtaaccttgaatcttgccaacagctgtgcaaggacgaagaggctaaatgtgccatgccaagtcacaaatctagtcagcagcagagccagaattggaccagtacctctctgactggggaacctgatttttctgttttgctgcctatttagccttctaatggaagttgggtgtttgatgttccatagcatctgatttacgcttctatatggtaaccgttgccctctctggacacattgcagaacaaatgtctccctgttggagcccctcaaccgaaagccctcattgaaggttagcgcattctctgctgcttcagcatttccagagcacccagttgctgaagtatctgcatgtttgggcaaaacacatcaacctatccatctgtctgtgtctgcccttccaagaatccatcaccatagtaacttggtactcagacaagaggttgtagatgagaacggaacaaaggccagaccttctccttctctgaaggcggaggattaggatcatttgagtgctctcatatggcaagtgtcatggctacaagtgcttcactggcagccaccaacatctcaaggggctggccacgtagtaggtactcagaaaatatctgttaaacagtataggaacgattgagagtttttttgcttgttttcacaaatggttgtgataactgaggcagatccttcaaagtggtcattgaaaagcagtcatttgaagacaaactgaggacttgagttgggcttggttctgggaccttgggtgtgacactttacctccattttgcaaagcccatttcattgctcataaaaagggggataattttccttcttcataagtctgtggtgaggatccagtgaggtgattagcaacaaaagcattttacctccaagtgcagtaaagtggcaggtcctgtttctatcaccttaggagtcacaaaactttgccctggaatgagcagggggcagaacctcactgaagatgagcaagtttcactcttagactttgccctggaatttggcccctccagtttttcctttctgcatgcttttcaaagtcagtcgccttttcccagccaaaaaggaatttatctcactgtactttttccaggatgtagccttggttatttagagaagcgccatcccagcaacgaagcactgcagatgctccaatgagtgtcctacttccaaagcagccctgtgcaagccccacagagctccatcctgcctcctgtgtgacttcctaaatagcatgtgcttttttcctccctccaccactcctacagcgttccacaaggctgggcgacagagagaagcggtccaggtgctggagcagctcacaaacaatgccgtggcggagagcaggtttaatgatgctgcctattattactggatgctgtccatgcagtgcctcgatatagctcaaggtgtgtaaacatcagccagaccactgttttcccaagccccactctgacaccaagataaacatcagaagagctgggacattttaattaaagccctgggcttgtttattgggtgtattgtccataagcctgccttgcagtggcgtaatctggtgtatcatctttttccagtttgcccatcagaatggtatgaggaccgtcctggggttatggttggcaggtccagccctgcattgctaattcagagcatatctctcccctgctacctgggagcccatagctggacctgggtgagcactgggttttaaatttttttaattaaatgagaagatgaacgagagatggctttacagtaacacactccagattcttactcatcccagccaggaaaacagtttcaatattgctttctttcacaagacttcccatgatgtactgaaggagtagtggaagtggaagagacaaggagatgttcttctccactggacaaggccacatgcaggggtgggaaaaacactggcatggaagctgcaggtgacttgtagcaagtcacaatccttcctgagctctgcatgcccatctgtcctgtgggagtcccttgtcctggtccctttggttgctgggagcctcacagagtcatgcttacagtttgaaaattgtcaagcctaggtgtaaggtcgcatttttctgtttgggccagtgccttatgcttctgataggagcagcagagggaagaggcataagatgagcatgaatacagttggtgtctgcctgcctttgtcccagcaggctcttccgacacatcttgggtcttgctgcagctgtcgctcccccaggggaataatctgggagggtgcagtgagagatctggaaaaaatatcctcaaactccctggccttatgccctgtccacctaagaattcaccatcctggagtggccctactcctaagcagagtggctttcccctcactacactttgtccctcaccctggcacagacactgtgtggtgggagaactgatgctgggaaaagtactgttgcctggcccctcctcctggggccagttggcagccacagacactgtttgacacgtttcccctcccacccgctgcacacagcagatcctgcccagaaggacacaatgcttggcaagttctaccacttccagcgtttggcagagctgtaccatggttaccatgccatccatcgccacacggtaaggtggctgggtcaccagcacctgagggtaccatctcctgagctaggggtcccgggcatatctaaagagcagcagactggatggaatgtaacccactggtcacagtgaactgctgaggaatcttggtctcctctgggaagaaaaagtttgagtttctttgattgactgtttgtctgccatgcatcaagcagtgggctcctgaattgtgatccagagctggaatgggccttgctagttcctcagtgcaggctttgatgactcagggaaactctgcattaaccagcaagaggggtgggagttccatgaggccctctccttcagtagggcgaaggcccagattaaccaaaggctcgagatccctccctggccctgtcagtgatttgtgtgttcttcagcaattcactttccctctctgtccctcagtttccttctctgtgaaactagagtgttggcttggtctccagaaacccaagtagttctttttagtcactccctgattcctttgagaaagccattttaaatctctctggtggcaatggggaacaggtgatgggttgtcaacagcctcttcatccactgtatctcctcaatcacccaacagatgttgagcacttagtacctagtaggcaatgtactgagggcttcattgtatcaagtcatttcctcctttcaaccacactttgagggaaggactgtcacccccatgttacagatgagaatgaagccctagacagagaggtctcagaggttattaggttggtgcaaaagtaattgcggtttcagactgaattttaaatcattataactaggctcaaacacatctttattaattaaaataggaaccattatgatcaacacatttttgccaatgagaaataagtctgtttatttctgtagcataaaaatccatactttgggatttgacgaactcttggaaagcattttctgcatcctgctggttgtggaagcattttccctgcaaaaagttgttgagatggttgaagaagtggtagttggttagcaagaggtcaggtgaatattgcgatgaggcaaaattttgaagtattggttgtgtgatgtgcagtcaggtgggtggagaagaattgggccctttctgtgaaccagtgccagctgcaggtgttgcagttttcggtgcatctcctcgatttgctgagcatacttctcaaatgtaatcatttcaccaggatcagacaactgtagtggatcagaccagcagcagaccaccaaacagtgatcatgacctttttttggtgcaagtttggctttgggaactgctttggagctttttctcagtccagccgtggagctggtcatcacggttgtcatgtaaagtccactttttgtcacacctcacatctgattgagaaatgttttgttgttgttgcatagaataagaaaagacaacacttcaaaacgactatattttcattttctatcagctcatgaggcacccacttatcaagctttttcaccttcccaatttgcttcaaatgccaaacaaccgtagaatggttgacattgagttcttcggcaacttctcctgtagttgtgagaggatcagcttcgatgattgctctcggttgttgtcaacttccagtggccggccactatgctcctcatcttcaagcctctcatctcctttgcaaaacttcttgaaccaccactgcactgtatgtttgttagcagttcctgggccaaatgcgttgtcgatgttacgagttgtctctgttgctttatgacccattttgaactcaaataagaaaactgcttgaatttgttttttgtctaacatcatttgcatagtctaaaataaacagtaagtaataactcattagcaaaaaaacataaagcgagaaatgcccgttgaaatgatgtataacataaccacatttaagaatgtattctactatcaaacagcaaattccagagccaatatgtgagtctcagtagtctggcactggagcctgtgttcctagcctttccctccctgtctccttttagagaaagcaggctagtatgttggtttagtgggtaaactcgagagtcctcacacacaaatgacactgtgttacttatcttctctggccttcagcttctttctctataaaatagggataacagcactatgtacttgatgggattgttttgaggattagacgagttaatattggaagagtacctagcacagagtgaccctaggtggcagctatccttactgctgctccaggcaaggcttcacgccagctttccctgacctgctccctccagctgggcatctagcatttctcttttttcagagatgaggtctctgtcgcccaaggtggagtgcagtgtcatgatcatagctcatggcagcctcaaactgctggactcaagtgatcctcctgcctgagcctcccagagcactgggattacaggcatgagccaccacgcccagccttcccgccgttctttgacctctcaaatgccctgccttccaccttgggcatttctttccctctaatctgtgctgacttctcagcacattttttgcctcttgggaaagtctggcaagaaggactcctgacaggctctgtgcatgccgtcagtctagtgttacatctcttcccacagcagggtcagtggtctcaagggacctcatcttcccttacagtctttggctttcctgaaacgagaccccctcagggtccctcatctttatcaggtgctcacctggagagaaaccaccacaaaaggagcccagactcaacttaggctggaagtcagggcccagctcagcctcactttgcccaagccactccagagcctggctctcagctccttccctcagacttttctctcgctgctccctgtcctcttcctcacctggggcatggggctgagggctcctgtctctaacagctgagctctgctccaggacctacatgggactaggagctaaggggcctcagaccagctggggccctggctcttatcccagctgaatcttattaattgggccattccttcattcaataaatgcctactacgtgacagaccctgtgatgagacctggtgacacggtggtgaacaaaacgttgtccctgcagtcagtcccagtctagcaaacaggacaatccctcaggggaaacgtttagaggcctgtgaagagacttcctggaggaggtgtcctctcagccagaaggagggagagaataaaaatggggcaagtgaagtggaggaggattaggaagggtgtttgtggcaaaggtcacagcctgtgcaaaggcctggaggtgagtggtagtttgtggttcagcatccagggcccagcagagcagcactgattcagggcaagactggaaagggaagttcaggtccttcctggatacatggcatctttcccagaggaaaggactcccctgctacctattctctctgggacgttacttagcttccctacctagtgcagtagaaccacaggcagagttcatcttgttcttaccctggaaaggatgtggtctcaggttttcttgggttcttggagctaacaaaaggtatagaaatttacgtgtgaactaaatagaaaatgctaagctctgaactgaagaagtgtagagcaaagtgagtcctcaggagttcagaccaattaggggttaagctttggtggctcagtgatgagtagggcctcacaagacccttcttaagtgctcacaagaaagaggagttactggcctgctgtaatcctcaccatctaaagctttattagaaatgggcaatctcagtttatatacagtgtgccagatgccttcaaaataaggtattcttaaccttttgtagaccctcacacagaaaattccttatttgtctgctgagcttctggcagcctctaggtacgaagaccaatcactaatctgtgctaactgcctcctgttagtgcctatgccaggagccagggaaatgggtcagcagttgaggaactccgcatgtgtgctcgtttggtggcacatcagtcaagctgctgttggaaagcacagaagaggcatgtgggttcatgctggagagggctaaatgcctctgttgaaagacaggcttatatgaatcagtggttatgtcctaagctgcatagaaggtcttctcttttagagctaattggagacaacttgagtagttcagagaaatggaataattaccaactccagaggcagtacagcttggaagaaagacattcttgggctttggaatcagacctgggtttgaacagcagctcagctctgttctagttggtgacttgggcaaatcatctatctaggtgtcggtttcctcatcagtactgtgaggataaaaatgcataccacaaggttattatgttaaagaccagatgagacagtggctatatggcgctcagcacacagtaggagtaggtgctcaataatcagagccgctcttgttgatgtcactcagaattattggtgtctgccttttggcctggcccagcagcagctcttgaagaactcaatccctgtttgcttttctctcactgcaggaagatccgttcagtgtccatcgtcctgaaactcttttcaacatctccaggttcctgctgcacagcctgcccaaggacaccccctcgggcatctctaaagtgtatcctttctcttatccctcctccgtcccaccaccgttcttgtctaatggccccaagaaattccttccagagcactttcctggcagaaccttcctctctcagcaaccctcagggaagacagagaactcaccctcccgctgctgtttggctatagaggctcagcagggaggcccaggggcccaggccaagagaagatgagttttcagggctctctgagctgaacccagcagtgggtctctggccaacacactgtcccaatccctcctagaacccacagatgagggtgtgactgaaatggaagaagcaccaggccttcaggcttggaaccttgggcacttctccagactggggaggagggagtgtttgttcagcccaggtatacatagcaccttctgtgccccaagccctgggccaggcaccaggtggcaaagctgccatcaaagagggaggtcacaagttagggtctggtttggtggatgtgtgctgtgtctgagggtggaatgaagctgaggtcagggccatggtcagggaagtttacctggaggaggagatgtccatcatgcaagctgaggcagccagggaagatggccaagtggatgttccaggggaggacccagcatatggagaggcaagcaaggcatgtgggagagggtgaggggaccctgggtgggaggggccggagaggcagcaggacccaaggcctgagagcctacctttgggttttcctctcttctgtagccatcgagggccacagtggtaccataagcagagcaggtgcctgaagggcctgtgcagccagatactggatcattaccaggcaatgatccagatttttaaggtcttggatgtcaggagacataattgtccctgttcttttctaaatctcactgtactctcagctccttcccagccgcagccccaccttccctctgtaaggaaaacccactccactggagaagacccagagctccttgttgtaagaattggcctcgctagaggattccaggcccattatgtacatttcaggggaaataccctcaaatcaaggggtgccttcctggagtcagacctctgctgcatgcgtctccgtctttccccgtaggagcagtcagggctatgcctgtgggggctgagcacctgtactcatcctttccagcaagttctgtttgagtcaacagcttgatagaacctctaccctgagccttaccctgtgccatcccctggggacctggaaatggctcctgacagtccctgactttgaggagtcatgctggagacacagaaggaaactctccacagaactgctgaagtggacggggctgcactgcagacggcgggagcaggaacactgggagagatgcgggaggaagggcaggagggcctgggggcagccaacatcggaggtgacctgagaggagagcacaaaggctcgtcagcctctggctgaggagcttcaagggggccccagagcacaggctgccgctcagaaactgcccaccaggccctcggggaagggtgtgcagacagagtggggtacacccaggggcctcagagcagggttgagggtggctccccagggagtctggaccaggccccacctggcagggtgagagcagagtgccctttgtgccaggcatcctaggagggcctggctggcaggtttggtgaggcaggaagagccattttggcctagtcagggtataagatgagccatcagcaggcccagagatgctaagcaaggttaaagtattaatggaaactacgctgtttttatctttggaaaaattcctgggccttgccatccgagaagtacactcacctctcacaagcgcacagagccttcctcacggtctttcctctgccttcccggcaccagcacaagctgtgttccagcctggggctcactccaaggacaggcagtgccagctcctgggcctggtgttgcccctgctgtccttaaccctgttcacggcaggaaaatactcttcaccttggccaagcagagcaaggccctcggtgcctacaggctggcccggcacgcctatgacaagctgcgtggcctgtacatccctgccagattccaaaagtccattgagctgggtaccctgaccatccgcgccaagcccttccacgacagtgaggtgaggatgcagcacccttgggcaggtggcttctcctctcccttgaggccatctcatgccttcttgcctggcctgggttccgtttgaagagagacagctgcagctccctctaggctctgtgccccctgctcaagcctggccatgccagctcccctgtgcttccctgtccacctcctgttctccccgcagtccacctggcgcccgctcacagcccccggccccggcctcagccctcagcctggcctcccttgctccttgccctcccctaggcaagccccacacctctgtgcccaggtggctctgcctttaccccaggcctggccccagagctgactcttactctagaaacctctgccctttctggaaccaggctgtagttctccagcaaatctaccccacactcccaacccacattccttcaacccagccagcttccttctttcacacatcctccctcaagctcagagcaaggacttggttcagacagacctgggttcacatcccggctccaccctctcctagctctgtctccatctttctgcaccttgggttccccctttcccacaggtagttgtgaggctaaatgagccagtatagtccacgtgctccgcacggtgcccggagcatggtaaatggctggctaatggtggcagcggccactgtcattcctgccaggggaaaagtgccgttgagcgctgcctgtgcaggtgtcttgggcacggggacccaagtgacagggcttgggtatttcggcaggcctttatcctgcttccccatggcatggagctcctgggcccggcgccccttccctgcctgcccacccgggtggcctttcctcttggcagccaggccccaggggcctgaagccagagtccagggggaggaggacacgtgcctgccccggcccctcgggagtccgtggctgttttgtaggagttggtgcccttgtgctaccgctgctccaccaacaacccgctgctcaacaacctgggcaacgtctgcatcaactgccgccagcccttcatcttctccgcctcttcctacggtgagtccctgcatcctgagcatgtgggtgggacagcctgtggacagccaggctcactccactgctctctggcctcaggacgttgggcaagggccaaaggcctctgaatgtccctgtttatgaaatgaggacactctgacgcccacctacctgacacaaggagtcactgtcggtgttcccagagataggacccactgctgcccaaagctgaagcacccactctgggaacctggcgcagggctttacataaccaaatgccccagaaagagagtccgatggctttgcattcagaccaggaggctgagataggttatcaaggcccagctcctttgatgttgacagaggatcagaagccccttcccaggagctgagcagaggccacacacacacacagacacacacgcacacacagactgcccctgcacacacacacatacagaaactgcccctgcacacacacacacagactgtccctgaacacacacacagactgctcctgcacacacacacacagactgcccctgcacacacagagactgcccctgcacacacacacagagaccgcccctgcacacacacacacagaaaccgcccctgcacacacacggagactgcctctgcacacacacacagactgcccctgcgtgcacacacagactgcccctacacacacacagattgctcctgcacacacacacacacacacacagagactgcccctgcacacacacagagactgcccctgcacacacacacagagactgcccctgcacacacacacagagactgctcctgcacacacatacagagactgcccctgcacacacacacagactgcccctgcccacacacacagagaccgcccctgcacacacacatggagactgcccctgcacacacacatggagactgcccctgcgtgcacacacagagactgcccctgcacacacacagattgctcctgcacacacacacacacagagagactgcccctgcacacacacagagactgcccctgcacacacacacacacacggagactgcccctacacacacacacagaaactgcccctgcacacacacagattgctcctgcacacacacacacacacacacacacacacacagagagactgcccctgcacacacacacacagactgcccctgcacacagacacacagagaccgctcctgcacacacacagagactgcccctgcacacacacacagagactgcccctgcacacacacacacacagaggctgcccctgcacacacacagaccgctcctgcacacagacacacagagaccgctcctgcacacacacggagactgcccctgcacacacacagagactgcccctacacacacacacacagactgcccctgcacacacacacacacagaaactgcccctgcacacacacagattgctcctgcacacacacacacacacacacagactgcccctgcacacacacacagagactgcccctgcacacagacacacagagaccgctcctgcacacacacatggagactgcccctgcacacacacggagactgcctctgcacacacacagagactgcccctacacacacacacagactgcccctgcacacacacacacacagaaactgcccctgcacacacacacattgctcctgcacacacacacacacacacacacacacacacacagagactgctcctgcacacacatacagagactgcccctgctgcctcttcttgcttttggtgaagctgccagtgggttgagaagcaactctgtggtcaccccacctgcctggcggcaagtcctttgcaaggcctccagccccctcagccctttctctatgccctccagacgtgctacacctggttgagttctacctggaggaagggatcactgatgaagaagccatctccctcatcgacctggaggtgctgagacccaagcgggatgacagacagctagagattgcaaacaacagtatccatgcccttggccagagcctgtgtgtgcggctgtgtgaggggtctggggacaggcgggaagtaggagggcccagtcccaggggatcgcgggccatgctgagcctggccctgtgttcccagagagattggagaggcccacatgggacagggacagggatcagagatgggcagacagctggccagggcctaaggacccagaagtggcaagtggcaccttggtcttcccgtgtgggtctcccaccctcccctgacccctaaaaggcactggctgtgcctctgtctgtgcatagctcctgcatagccaacatgggacatgatgtcatgatgtcggtgttggcccccagctcttccactcaagtcactttcgcatgcaagtgacagagtccaaaactgacaagctgaacaagcaaagggtgtgcaaggaagccccaagcaggagaggaagcttcctggcccagcgctcagtctggtcggtcacaggctggctctgcctctcttggccgcactgtcctctgggcaacttcattctttggcagccccgtggtgcccccataacacagagatgtcaggagcagtgccagccccacatcccctcagccttatagcccccagaaacagccagctttcctctcagctgtggcagtgaaagccccggggcacagctcagcctgccccttggccaggaggatgcaccagggcagttgtccagggcaggccacacttgcaggctggacatgggaggggcttctggcagggaacagcacacacgtggcctgaggcctcgctcccttgcactgactgagtctgcaggcctgggggctgtaagcctgccttccttgcagctcccaggtgctgccacccccaggggccacactgggaggagggaagctcagagagctgcttgctgaaggaaagacggacccatctctgccacccaggctccctcaggtgccacagatgatatgtgctatggtgctggcaggtgggtgctgtgcccactccaacttggtaccagcagtccccatgtcctgggcctccctgcaggacccctgctggcctctgttaccagccccaccactgtgggagaggggcggtttccagggacctccaggtgagtctgacccgccctggggtcagcagggactctcgcccctgtctgctccatcacaagtgcccgcagacccccagcagccactgaatgtttctccaggatccctgggcccatcccctccgtgcctacccgcagtggctcacagggcccgcatgtgcttcccactggccctgggagctatggtgtgtgtggcctgcgaggggaatgggtgagggcagcagggccagcagagtcccttccttctgattccttggcctgagccccctctgttcctccacctggaaaactcttccactggtctggctgcccttgagtcttctcacaggggtgtagggtggaggctagggtctgtctccatctctgcttctgattccatccttgaccagatccctccaggctcccagattctgcggctagtggagaccaaggactccatcggagatgaggacccgttcacagctaagctgagctttgaggtgagggtgcctctctgggtgacctgcaggagggcagcctccatcccttctcctgtgcacatggggaccctcagctagcgcagtggtggaggaggattggccagaacttccagatgtggtggcacgaaggaggggcaggaccccttcctgtggggtgtgggagccatggctgcccccgagggaccatggccaagggcgcaggtctgtggacagggaggcagcttcagctctggtgggaggagcttgccactgttagggtcacctgggtttaggaagcaggtcctctctcaccactgccaaagattccaggatcataatccacacagatgtctcactgtggctgagtgaggacactgtgcctccttcccgcccaccctgcagcaaggtggctcagagttcgtgccagtggtggtgagccggctggtgctgcgctccatgagccgccgggatgtcctcatcaagcgatggcccccacccctgaggtggcaatacttccgctcactgctgcctgacgcctccattaccatgtgcccctcctgcttccaggtaggtggccaccctggtagctcacatgtgcttctcttggccacttttcccttgcccaaatgtccctctgggaggcgtggcccctgggaggaggggcacatccatggctccaagttgggacagaggcttgtctgtcctctcccctgcttgcattccatgtgcatctaaagtggacttcactggcccctgcgctgtccacatcctccccaaatcctgggggcccagcaagcgtgatgtgcccttgaccttcactcagaaaacaagaaaccccacagccccctcccatctccccttccagccctcaaacaaaggtgctgcaggtctgtgtccagccctgaccactgccaagccccctccccttgagaggcagtgcgtcctggccccaggcgtagggctgatgagcactagggcttcagcctggtcttacagctgtcttcccttagatgttccattctgaggactatgagttgctggtgcttcagcatggctgctgcccctactgccgcaggtgcaaggatgaccctggcccatgaccagcatcctggggacggcctgcaccctctgcccgccttggggtctgctgggctgtgaaggagaataaagagttaaactgtcagaatgtg

SEQ ID NO: 15630 - DNA, 70486 bp, Homo sapiens
gtataaatgacatcgcatttaagcctgatggaactcaactgattttggctgccggaagcagattactggtaggattttgtcttagtttcctcttaaagtgcttccctaacctccctcttgtgagtactctgaaatttgaccctttttttttttttttgagattaaaaaggcaagggtggaaaaaccttccctattactttttaatagggatggaaatgggctatttaaaacgggcaagtaaactatcagataagaacctgtgaacaataccacctttggggtcattcatctttccctttttactttgagacacccatgaaagagttgaaaacaatcacaatgcctttgaaactggactggtgtcagtttacattttgtcccccagaaaaattcaagcaacaggactgacggtgctgtgtccatgaaaagtcagatagcctgaccccaacttttaggcattggcctatctaaacagttccatatggatgttgtcctatttttcatattttcaaataacataagctccctctggaacctatccaggtatataaaagtaattttcagagaaccccttatgtttgaccaaaaaacctttgtatgatctctctttctgtctaagtctacttcctcttctctgttgtctctagatacgcagactgattaatctccattctttgtatggttaactacataatcttaaaacatggttaaattgttctgcagacttctctccagtgtaaacaatccaaactctattagtttttctacataggttatcttttccaatactctaaccatttcagaaagtttccgcttgatttctcagatggtgtgtgtgtgtgtgttttttttttttttttttttttttggagacagagtctggctctgtcgcccaggctggagtgcagtgacgcgatctcggcttactgcaagctccacctcccgggttcacaccattctcctgcctcagcctcctgagtagctgggactacaggcgcctgccgctacgctcagctaattttttgtatttttagtagagacggggtttctccgtgttagccaggatggtctcgatctcctgacctcgtaatccacccacctcggcctcccaaagtgctgggattacagaggtgagccaccgcgcccggccagatggtgtgtttttaaactctccacatagtgatagatgtcacatggctatcaaatacctaaatccatattacagctgggttttattttatttcttagagacagggttgtgctctgttgcccaagctggtgtgcagtagtgcagtcatagatcactgcagcctcaaactcctgggcttaagggatcttcccacctcagcctcccgagtagctaggactgtggacacacaccacctcgtccacctaatttttatttttttttatttttatttatttttattttttgtagagatggggtttcacttagttgcccaagctggtcttgaactcctggtttcaagcaatcctcccacttcagcctcccagagtgttgggatgacaggagtgagctaccatgcctggcctacagttgggttttataacattccctcctacttgaaagcccagagttctgtgactttcaaattcttggtagcaaatatgaaacatctattatgttgatttagtgcagagctggcattaaaatttaatcatgttgtagctggctctttttatgggctagttttatttaggagggcctgccttgatcaatcatatatccaaattcaggtaaggatgagtataaagaatttccatggagtgagtaattgaacctttggttctcaaggattggtagtatattcctggtcacatagtacatagacctgggtcctctacttcttggttacccaactttaagtcacgttgtttttggttttgcagtgcagtttttattggctacagatttagaatattgacacgtattgttataaaaacaaaaatagcagtagcaaccctgcaggaattctgactaatagatatcacatagataatctgtatttgtctcttttgccaggtttatgacacctctgatggcaccttacttcagcccctcaagggacacaaagacactgtgtactgtgtggcatatgcgaaggatggtaaaaggctgctctgggtttccattctctataatagcctcatcattgttcatttttctctttagtcactttttaattatttctagtaagctggagtacaagttgcaagttcagaagacagtgaagttgctaagacttcagtttggtcattcaatctagcaagtatttattgaggtcatctatgttccaggcactgttcaaggtgcttgagttacttcagagaaaaaaacggtggtccctccccttatggggcttctgttttatggggtggtggtgagaagtgagggaggaagaaagtatgagggaagacatacagtaaacatagtaaaaaggtaaattaagtagtatgctggaaggtgataactgttatggaagaagaaaaagtagagcagaatgagggggattgagagtgctgggcagggcagggggttgggtacagtattgaattagactagtgagggtgggctcattgagatgaggacaggtgaggaaaaagactttgaagtcaggaggcaatgagattgtgccagtgggcatcggggggaagagagctctttgcagaggaagagccattgcagaggccctcaggtgtgggtgtggctgctaggagctggatcaaagagaatcgggaattgtagaggatgaggataaagtggtaacagacatggggtggtcagatcataaagattttgattctcagtcaaaatggaactactgaaaggtcctcagcagaggagggatctgatttgatttgtattttaaaaggatccctctagttgctgagttggaaacaacctgcaagaggtgagggttaggacatctgtgtgaggaagcatcatccagacagggggtgatggtggctcagacctctgtgggggcagaggaggtgatgagaaattatcagactctggatataatgggagggtggagccaactggattgtctgacagattggatatgggctatgaagaaaaaggagtcaagtttttgacctgaggactgaaaggttggagttgccccccccactgagatggaaaagactgcaggtagagaaaagttatggttgaagatcagaaattcagttttatacatgctgaatttgagaaaagttgatgatgtcggagaggggagagaactgctggaacagagttgttgagtaggcaagaggagatgggatctagggcatagacggggtatttgctttagataggggcacagtaggaactgcagaggccagcagatggggacaatgtggtagtaggaatctaatggaaattctcaattccattttttttttcttcagtgaaataggaagcaacagcaactgagagtggcaatggggaagggaggtttcagagagttgaagagaaagggaaaaagtgtaaagtcactgcctcagagaatgggacagcgagtggacccaggaggtgtagtgagatccccggtgacatgaagggccctcttgaagattgtgatcatgaattgaaagtgagattagttggtgtgattgtgtctttttctccagcgattttgagctgcatagttgtagaggcagaagaggtgaatttaaccagaggtggttttgcaagcacatttgaagatgaagtaggagggcaagggagcagaaagtgtatacagataaataattatgtacattaaccttgaattgttggctgaataatgaagggagagaggacagcaatggagaagtagtaggttctggtggtgttgaaggattgttacagttggggtaccaggtgggttgggaaggaagggaagtggtgcatgaaactgagatttaaatttattttaaaataaatccatgttgtcccacagcataggattagtgggaagaaatgggctttggaatgagacagttgtgagttccaaccccaacccaacaccagagttctgtgagtctgagctggttattgagtctgagtcacgatttcttcatgtatcaaatggataacattgagataacattctgtagccactgccaagaagtcacaaaattgtaatgttataattcttgaatgaaccttggagattattccagtcccaggtttttaacttcttttggctgatgggcctctttgataatcagatggaagctttagaccactttctagaaagatgcaaattcttcatgtgtatgcagaatttcatgcatataattttagtctgattagtccagtctcttcactttagtcctgcataaagacataaacaattggccaggcacggtggctcatgcctataatcctactgaaatcctaaagctctgggagcctgagttgggaagattgcttaaggcaggagtttgagaccagcctgggcaacatagtgagactccctaaaatctggcctgggtgacagagctagactctgtctcttaaaaaaaaaaaaaaaagacaagtcatgtgacttgccaaggccatgcagcagattggcccaaagacaaaactaatttcttgcttcatagtcaggtgtgctgtaccatggtagtcatatttgtgtgtgtgtgtgtgtgtgtgtgtgtgtgtgtgtgtgtgtgtgcatgtttgagttcaagttcagaataatgttttagggagacctgtgaggagggagcctggagagctgaactgtttctgtctcatcctagtggctgttgaggaatgtgggtcagtccagggcccagtataaggcccagtaggtacagaagagctattgggcctctggtgcctctggtgtttataagcatagcagggctctttgacctgcaacaccattagggcacttgaggatgtcagagtgtgacccatcagtagtggcatttgcacagcactttgcagagtcctgtcacacacatctcacttgatgcttccaacaactctctgaagcaggcagcaaggggactcttatctccgctcaaagatgagaaaacagacttggagcaattacaggtgatggtggcagaggcaggcctaacccaggttctctgactgcagagtctttgttctttctagtgtatcatgctgcctcttcatgacacctgtataatgattaagaagtcttttagtcctcagaattggttttttcctcttagacctgaagattgagatacactgaattccagctttgctctttaagtctgcttgtttctgatttctcctttaagttcattaagttttttttgtttttttttttgagatgaagtctcgctctgtcgcccaggctggagtgcagtggcgcgatctcggctcatggcaacctctgactccctggttcaagtgattctcctgcctcagcctcctgagtagctgggactacaggcacgcgccaccatgcctagctaatttttgtattttcagtagagacagggtttcaccatgttggtcggcctgatctcaaactcctgacctcgtgatccgcccacctcggcctcccaaagtgctgggattacaggcgtgaaccaccatgcctggcccaagtttaataagtatttaatgagcaaccatgatataaaagtatgtaagacatagtttttttgttcaagaaaaacaatataatatgaagaaataatagaaatagctaatttttttttaattctattccaggcccagttctaagcaacataagggttaggggtgccactgcctgtgcaataaaaaatctgcatgtaatttctgaaccccccaaaactttactattaatagcctactgttgaccagaagccttacctgttacataaacagttaacacatttttaatattatatgtattatatattgtattcttaaaataagctagataaaatgttaattgagaaaaaagaaaaatatatttactcttcattaaatggaagtggatcatcataaaggtcttcatcttcattgtcttcaggttgaataggctgaggaggaggaggaggaggaggaggaggaagagggattggtgatgctgtgccagggagacagaggcaaaagaaaattcacatgtaaaagtggactcatgtagttaaaactcatgttgttcaggggtcaactgtatgtacacatgtacatacactcatttaatcttcacaccaaccatgaggtaaatactaacattgtatccatttttcaaataaggaaatgaaagctcttcagtagcttgtttgggtcatgcagctggtcagtgagatctctaggaattctgacccagagactctgagcccaaagcttatgcttttcatcaccatcacctgctacctaccaggatgagggaggagtgatggaaatagtaagagcagtttctttgtttatttagtatttgcagcaatatcatatggctcaccctaatatctactatttcagctactgtaaaaggtacttggccgggtgtggtggctcatgcttgtgatctcagcactttgggaagccaaggcgggtggatcatgaggtcaggagtttgagacaagcctggccaacacagtgaaacctcgtctgtactaaatatataaaaattagctgggcatggtggtgtgtgcctgtaatcccaactacttgggaggctgaggcaggagaattgcttgaacctgggaggcggagattgcagtgagctgagattatgccactgctctctggcctgggtgacagagctagactccgtctcaaaaagggccagtcgtggtgactcatgcctgtaatcacagcactttggaaggcggatcacctgaggtcaggagtttgagaccagcctgcccaacatggagaaaccccatctctactaaaaatacaaaaaattagccaggtgtggtggtgggcacctgtagtcccagctactcgggaggctgaggcaggataatcgcttgaacccgggagtcggaggttgcggtgagccgagatcgtgccactgcactatagcctgggcaacagagtgagacttagtctcaaaaaaaaggtactttacagatactatcttagttgactcccataaaaagactctgaggaagatactgttcctctgtgtttcagatgaaggcattgaggctcagagaacagtgacttgcccaaggtcaccttccacttgccctgtgaataaagtctaaaagtccttaagatgtacagaatgtggcacatacttacctcttaatcctcgtctctcaccagagtaggtgaagaccccgttatttgctgccatggtaccgtgatcctcttccaaatgcttataaatgtggaacagtgtaattaataacaaattacttgttatatgttgcctctctccagtctgttccttcataaagcccaagtagtatgaaaatgcgaatctgatctatcactctttgcttaaaacctttctttggcttcccattgctttaggataaagagcaaggcctctgctgtgtccctgaggtcccaagagatccttccacaacccacctcacccttccctccgttccatgatgactccgctcattccctcagacatgccaggcttttcctgcttcagggcctttgcacatctgttccatccatgtggatgggtctgtctcctctctacatctggctaagctctgctcatcctttaggtctccactgaaggatctcatccttagagaaatgttccctcatctaaattaggtcccccaggagatgttgaccaaagggtagtttcagtcagacaaaaggagtacatttttgagatctattgcacagcatggtgaccatagttaataatagcgtatatttcaaaactggcacaggaatagtttttttttttttttttttttgagatggagtctcgctctgttgcccaggctggagtgcagtggcgtgatctcggctcactgcaagccccacctcctgggttcactccattttcccacctcagcctccagagtagctgggactacaggcgcccgtcaccaggccggctaattttgtttttgtatttttagtagagacggggtttcaccgtgttggccaggatggtctcgatctcctgacctcgtgatccacccgcctcagccctccaaagtgctgggattacaggtgtgagccactgttcccggccaggaatagattttaaatgttctcactataaaaaaataagtatctgcagtgatggatatgttaattagcttaatcattcttcaatgtgtatgtatataaaataccacattgtacttcataagtagatataattattatttgtcaaaaataaaaatttaagtaaaaaagtaaatcaggttccccagttattctctttcataggatccgtgtcttaccatgttgtatttgtgttagattaatttgatgtgtacttcttacactagactgaactttatgaaagtagggatcatgtgtgttttaatcattacttaatccctagcatagaacatgacagctacatgtagtaggctcccaatacatctttgtttactcagtgtcagacaaagcaggtttggaacccaaatattctgactccaaggtcctgcctcccagtactgataagaactaggaaagaagctaacacttactaggtaccttaaagaactagttttctaaagaattctctctgggaaatgctggtttaagataaatgtaagactttccattttacaaacacttttaggcaagcgctttgcttctggatcagctgacaaaagcgttattatctggacatcaaaactggaaggcattctgaagtacacgtaagtaacttaggtgtacagtattatgagtttgatgcttattgaataattgcagcaaaagcctcttagaaaagatgtaggagaaaacttttttctcttaaattgaacttgaaattaagttgtgggtgtgtgtggttggtataggaaggttgagtagtgaataagttaatgaatatttcttggccacttactggcgtggccagcactgggctaggtgcttttatgtagctcatctcagttcatctgacattgtagactttatcccacccccaacctgtcatcttccagtgtccctgtctcagagaatggccttatatccacccagtgtcaaatgtcagaaacttggggtcagtgtgctccaggcctcctcttactattggggatctgccgtgttcttcccctgttcctctactagttggtccctatttaccctgcagatctcagactcaaatgtcagtttctttgtaaggactttcctgcctctctagactggaacaggtctctttcgaggcatttctcacaattgcagttttaggtttattctggtgactgatcagtattgctcatcggcctgtaagttccataagaacagatactgcatctattttttgttttgttttgttttgttttgagacagagtcttgctctgttgcccaggctggagtgcagtggcacgatctcggctcaccgcaagctccacctcccaggttcacgccattctcctgcctcagcctcccgagtagctgggactataggcgctcaccaccatgccaggctaattttttgtatttttagtagagatggggtttcaccatgttagctaggatggtctcgatctcctgactacatctattttttttttctcactcttgtgtccctgatacaatgcctagcccataattggtactcaccaattttccttccttccttctttccttccttccttccttccttccttccctccctccctcccttcttccttccttccttccctccctccctcccttcttccttccttccttccttccttccttccttccttccttccttccctccctccctcccttcttccttccttccttccttccttccttcctttcttttcagtcttgctctgtctcccaggctacagtgcagtggtaactagctcactgcaactacaaccttccaggctcaaataatcctcttacttcagcttcccaaatagctggaactgcaggtgcacacccccacaccaggccaatttttaaatttttttttttcttggtagagacagggtttcactttgttgcctgtactggtcttgaactcctgggctcaagcagtcctctcaaagtactgggattacagatacgagccactgcacctggcctcttttcaattgtggtaaaatatacatgacataaaatttatcatattaactactttttaagtttacagtttaatgttaaatacatttacattgttgtgcaaccaatctcccaaactcttttatcctgctaaactaaaattctatatccttcaaatacctactcacccttctctcctacccccagcccctgaaaaccagcattctactttctgtctctctgagtttgactgctttacatacctcatataagtagagtcatacaatgtttgttcttttgtggctgagttatttcatttcacgtaatgtcctcaaggctcatctgtgttgtagcatgtgtcagaatttactttctgtgttgtagcatgtgtcagaatttacttccttttttttctttattattatttttttttatgaagacgaggtctcactatgactcctgagctcaagcaatccttctcccttggccgcccaaactgctgggattacaggtgtgagccactgggctcagcttccttcctttttaagtctgaatattattccattgtatatatagaccacattttctttatccattcatctgttgatggacacttgtgttgcttctgcttcttagctattatgaataatgctgctatgaacatgggtgtacaaatcaacaaacaatttttgaaggaatgaatgaatgagtgaagttgtaagtaaagtattacccacaagtgaaggactaaaacgggttgagacgccttgcatggtacatgatttgctcagctttcattgttgtctaaggatttgtcatgtttccagatcttggtctgtgatgtcttcattgcacctccatcttccatttctgggcctccacaaaacagtaagagtaacagccacagataaagcacctaaaggccaaggtgggaggattgattgcttgaggccaagcgttcaaaaccaacctggccaaaagtgagtccccatctctacaaataagaaaacagtgggtgaggagaaggagaattaattctttaggagtaggagaattaatttctgtgctttttgttggtcacttgcagaagagcatgtggtctaaagtcagaggctgtgggctcattattaaaatcttcagttgtagccactgaaatctttgtggtttgctgcatagtaatctacagttgtttacttcccaggcacaatgatgctatacaatgtgtctcctacaatcctattactcatcaactggcatcttgttcctccagtgactttggtacgttctgattcctgatgtcctgtcctggaataactgaaaatctgggctaaaaatgctaaaatgcattcagaatatggtgattttatcctgagagagttaatactacttctctaccttcaatggctgaggggaggctgacagttattctttaaattgtgtggaaaccaagacagtgaatggtgacctttactctggtaagacatcagagactacaggaagggccccagcaaaggaaatggtaacaagattgggagggcacaggcataacttggtgttgctgcctttgggaagccttcccttggtgttgctgcctctgggaagccttccctgactcaccctggcagagacagtgcagttgtcctcacctttgtattgacccacatctatgtttatgtgaaattcttcactgttgcggttctacttcttgtgcaatttgtcgtcattactggtttaggtggctgtagctgtcctccctgaggggctgaacaccttgaggagttcatcctggccacggtcccgtgccagcattacagcactggtgtagtactggcacaaaagaggtgtcagtaaaatgtctgtggagggaggaagggagtgaaattgggcagaggcttgtaggttatttccattaatggttgattctgttttcagctctatcagtctgtgttcgttgctagtggatacaatgaagtcactagatgaggagtcagaggcctaatccctctcagtgttccagttcccttatctaaaaggagcatgctactcactgtgtctcactgatacggttctggttctgaggttcaaaagagagaatggaattgaaagccaattgtataaatacatggagaaaggcctgtcatttgtttaacatattttatagcattttcttcatgtgaagcactggtctgtgtgcttacactggaatattaaaaaggcaaaatagaatccctaccctcaaggagcttgtggtcttaggagaaggtgggattaaaaaaaatataatattaagtactagtatttattgaatgcttgcagtgtgctaggcactgttctaaggattagaaatgaatttctatttgagctttatgacagcccctgaggtgtcaggtattattctcattcccaccctactgatgaaaaagaggtagaggtcccttagctagtaagtggaggaaccagggcttggactttagaccaggtgattgcatacagagcctgctctgctaagcactgctgaaggaggcccaggaggaaggagtttcttccagcttggggctccaggcaggcttagtggaacacagataacatgtgcacacgtcaaaatgtttggaggaagcgttctggaccaggggaaaggcaaaaaataacttgtttgatgttgcacttggccatgtatttgtgcactggagttaccttcttgattgtacttcgcaacttggcaaatagaagaatttgcttatgttgtctagacatacacttgctatgaggcactgagccagggcatctgggacaggggggagcaagccttaggtgaccagtgtgccatgggagaggcacagctcagatagagtcatgtgttgtgattgagacctatgaaagaaaactagattttcagaaagcatcattgttattttaaatgctaggttatactctggttgcagtgtcaaagttataaacaatgaaactgtcatttctttgagagtcaaatccctgaaaagttggctagaactttaccaatctattttatttttcttctgaaagaatgatagattcatagtaagttacaaagatggtaccaagaagtctatgtacttttcatccagtttcccccagtggatccatcttatgtaactattatacaatatcaagaccaggaaactgagactggcacaaagtgtgtatattatatagttctgttgttttatcgcatgtgtagattgccatcagcgtgacacagaactaagccatcaccatgcagttaccacttagtgtcatatctactcaccttacctccagttatctccaaaccctggtaaccacaaatctgttctccatttctataattttgtcattcaagaatgttatataaatggaatcgtacagtatatgaccttttgagattatgttttttcattcagcataaaatcctggagatccatctaagttgttgtatgtttcaattatttgttcctttttattgctgggtagtattccaaccaatccatcttcttttatattattgtgcattgaagggttgtggtctcctgaacagaagtctgtctccaaacacaaatcaagcagcaagatcatctgctgcaggtaagtgcagctctgacgataagatttatgttccttcatcttccacacagactctcaaaatccaattatttcatgcagcagagaaggtcttgtgttaggtagttggtttaggcccctgtatttccttttttcttctttcttcgtctcctcgatgggaaagacttgtgcctttgatcatgaagcaaaagagaactacaagttgccttcatgcagttacttagcaacaagcctcaacatccagctatactgagtggaggcttgttgaaaatgtgaggctgtcattgtccaggcagcatgtgtggggaagaaagctttccctcccacactttgatgctagacctgaattagaatccagaatctctcattgacaggccatgtgacctcaggaaagttactaaatctttctgagctggagctttacgttcctcatctgacagatagggataaaaatactgacttgacgagattgttgtgaaatgcacacaaactcatgagtgtaaagcgtgcaggacagtacctggtgtacagtagacactctaaatggtagctattcttgctgttcagcttctaggagtatatcccttccgttcagcatctgttgagcaccttctacaaagcaagcactgttctaggggttggaagacaccaagtctgttcttaaggtgctctttaagtgggaggggattgagatggagagtgggaagtggtggctggcccagagatgtaggcacaagctaagggctgtcatagaggtatgtacagagggctgggggagctcagaaaaaggcaccaaatggtgccttcacttctcactgtttattacagaactaaatagcattttaagtttgatcctctgactttatgtcaggaccggcaataatgaaaccatatcccagctgttgctgcctcatcagacttttatttcaaaccaaggcatcatcctcactagttttaccttctgtggggtgcttcccctatccccatgccttttgttggttgtgtacacagctggacaaatgatggtcagtacctggcgctggggatgttcaatgggatcatcagcatacggaacaaaaatggcgaggagaaagtaaagatcgagcggccggggggctccctctcgccaatatggtccatctgctggaacccttcaaggtactcttaaagttgtcctccttctagaacaaacaccatcatgaagaagggctttttgtcttcctgaggtctccctacattcaaaggcttctcacctcacttgaatggtctgttttagaacctgtcccatttgtatggattttttttttaatagtcccgctacctgagaatgtatggaatttattaagagcctcctcaaaagttgagtttaggaatgaatcctggacattttagcaaagcagatgagctatttaggacaggccaaagtgtgtgtgtggcgtgtgtgtctgcgcacatgtgcatgcacacatgtgtacgtgtacatgtatatgagtgtgtgtgtgtgtgtgtgtgtgtgtgtgtgtgtgtgtgtgtgtgtggtgtgtgagtgatgcagcaggaccatttccttatgaatcaatagtggagctctttgctgtggctttatttttgcctttccttttttagttcttccctccaagtttgggcagaatatgtgcccacctgttaataaatagctttttcatgagcctttttttgcccttgtcagaaagtcaaaattaagtctacagacgtccctaaagcctagagatacacaaacaattggcacctaccttcttaaattttatacacactttgctttctatgtccatgtgactttgagagtaaactaattatatgctctttttttttttttttttttttttgagatggagtctcgctcggttgcccagcctggagtgcagtggcacaatctcggctcactgcaacctccacctctcgggttcacgcagttctcctgtctcagcctcctgagtagctgggattacaggtgcctgccaccacgcctggctaattttttttttttttttgagacggagtctcgctctgtcgcccaggccggactgcggactgcagtggcgcaatctcggctcactgcaagctccgcttcccgggttcacgccattctcctgcctcagcctcccgagtagctgggactacaggcgcccgccaccgcgcccggctaattttttgtatttttagtagagacggggtttcaccttgttagccaggatggtctcgatctcctgacctcatgatccacccgcctcggcctcccaaagtgctgggattacaggcgtgagccaccgcgcacgcctggctaattttttgttgccaccacacctggctaattttttgtatttttagtagagacagggtttcaccatgttggccaggctggtcttgaacttctgacctcaggttatccacccacctcagcctcccaaagtgctgagattacaggtgtgagccactgtgcctgaccctatatgctctttatatatcctataatattattaaaccatcagtatcctttacagagtcctctgagggtaaacgaaaggtcctacttgtttaccagctcaatgtcattttacagatggttgcctacttgatttagaaggttgtttggaaggttattatgcttcttcctgaataattttttttggcccatgctgtaccatgcatgtctaatgctgtcaaaggccattagcctgccccagagttcctgctgtttgatttgtggctgcagaggacttggtggctctaggctaccatttttaattcatgagaagcaggaggccctgtatacctggtggctgtcctcctccaggtagggttcagaggctccttttattttttatttttattcttttttttttttttttttttttttgagacggggtctcactctgtcacccaggctgcagtgcagtagtgcgatcttggctcactgcaacctccgcctcccaggttcaagcaatcctctcacctcagcctcccaagtagcttggatcacaggcacatgccactacacctgtctaattttttgtatttttggtagagacagggtttcaccatgttggccaggctggtcttgaactcctgatctcgagcgattcacttgcctcggcctcctgaagtgctgggattacaggcgtgagtcactgcacctggcccccaggggctccttgccaggattttaaattatagttttagtgtagttctaggcaatgtaattttgaacaactacttactgtctacagccgatgggagagtttctggatgaacagagagaatgaggatgccgaggatgtcattgtcaacagatatattcaggaaatcccttccactctgaagtcagcagtgtacagtagtcagggtagtgaggcagaggaggaagaaccagaggaagaggacgacagtcccagggacgacaacttgtgagtgtgtcccagtgagtgggaacccttctggtaagggcccaggccccacacagacttgccaggacagatgttaaactctttggccaagggagtgcagggactagggggaactgtgggtgaaagcgccttcaaaaaaaggagacatacccttaaaacttgtgtgtgggtataaagtgatcctgtgagaaactataggaaatactgaaaagactaaaggagaaagttcaacttttctgataaaaccccatcccctgaggaaatcactgttagcaatctagtgtatttctcctcagtcttttcgtgtgttcatataattaactaagtcatattctgctttttttttcacttaacattatagtgtgaaccctttccagtaacattacaaatccttcgaagaacatgatttttaatgtctgaaaagtgtgcccttttgtggatgccccatcactcgacacttcctctattactggacacgtttcttagcctgttcccacactatcccttaccttaccttgcattttctaggatgtatatcagagaggaagcccttaccttagccacagtcttcactcccaaatcctggctgtctagtcattcttctcttcagttgagattgcctgtagggaaaacatgggcaggccagagtggggaaagctggggtagccaggatatctcagtttggcagtagagatctagcttgagactttccaaactgttttacatagtacctgagtttccttggaagaatcccaccctgaggtcatgggggctgggaagtggggaccagtaaaggaggaaggtatggctttgggtccccatctcagtgcctttgattgtttcaacatgagtttttgtttcataaagaatcctactgccccaggaggtaaaagggggttgaaaatcactgatccatctcacagggactgagcccagcccagagccatatgtggcctccccaagagggctcactggtgggctgggctcctggattgtgtttggactttggacatcagtgccagtcacacaaaggtcatctgcaggctccctcattaacatccctctcggtctttgtctcttttcccttagttttgggttagtgcctatgacatttgccactcttggctgggttttacaaacaaggctttaccttgcctgcctacatatccagtggtgctaccaggttaccacaagacactgggatcagaaaagctggaattaataaacaaagaggcaacattaggtggattaagacccagcctcaagggctaggaatgcttttcttttttttttttgtgacagagtctggctctgtcacctgggctggagtgcagtggcacgatctcggctcactgcaacttccgcctcccgggttctaagcgattcttgtgcctcagcctctggaatagctgggattacagacacgcgacaccacgccgaactaattttgcattttcagtaaagatagggtttccccatgttggccaggctggtctagaactcctgacctcaggtgatccacctgcctcaacctcccaaagtgctggaattacaagcgtgagccatcacgggctgccgcttttctcttgaactagattcccaggtagcttgctctccagcctcaggcaagggagtttctcctgtgtgctggtcctacagtcccagccccacagcactgatccccataggttctcagtttcaaagacagttgtttgttttcagagcccattgctcttttttgaaaattagattcagtcagaaaccatttcacctgtgcaaggacccccgcctgcaggagaacctatttttaggtgttaattttctttcttcaggaagagcaagcaagtttcccttctattaaaaaatgtctttgtgctgcaagagatgtttctctgccatctccccacattttctagtatgtaagagaaaagcagtctcaatattgcagccttgcctatcttagtgttgctccccagtaagctctgaaatgagaggtttatcttcttcagctgcagcagtgtccccagcaccataaggtcatagcaggggactcagtgaaacagcagatcccaggaaggctgaacctcaactctgcttcatcccgtaagactgattgatgggttgggccaaattataacttttggcttcagtaaagctgtacaacatttggcaacctgaggccaggacttccttgttcctgttgtttaagcccttagagctatactcatcagcaggctgtggcccttcataacctcttttatcttctgttgattagagaggaacgtaatgacatcctggctgtggctgactggggacagaaagtttccttctaccagctgagtggaaaacaggtatgtagccctgtacaaatccaattgcagtcatgcctgttatattttcattttctgagattctgttactattaattatacattatcattgttagttcctgcttattgagcatttgctgtggtaccagatactgtgctcactgctttgcatactttatcctattttattcttataaaacccaatgaagtgggtactactttccttatcaactttttagaaatgagtaaaccagaactcagagcagtgaaattatatgcccaagatctcacacagctagtaaatggtggagcctaggagttaaacccaggttggtttgactttaaaatctagctcttaattttgaccttactttcctctattcgctttctttcattcaaccagtatttatgagtacccactcaggaaagccctttcataaaggagctgctgacatagagctgggaaagtgatagcctctacctgcaagagctcacaggctggcggagacacacttgatagcaaagagcccctgtgtggtgtggtatgtgacacaatagaaagctgtacagatagacagctttttgggacacaaaagagggtaacatcactacttggtagagatgggaggtcttgttagaggttatctttgagcaggccatctttgagttaggctaaggacattgggaatggtgtttcaggcagaaaaaaaaatagcatgtatcaaggcaggaaggaatgaaaatatatgacagttcagagaatggtgagttgtacagggtgactgcatctcagagtttgtgacctgaaaacagagctgaagaggaacatgggggtatgattttttatttatttatttatttatttatttatttttaatttttttcgagatggagtctcactctgtggcccaggctggagtgcagtggctcagtcttggctcactgcaagctccgcctcctgggttcacgccattctcctacctcagcctcctgagtagctgggactacaggcgcccaccaccacgcctggctaatattttttgtatttttagtagagacggggtttcactgtgttagccaggatggtctcaatctcctgacctcgtgatccgcccgcctcagcctcccaaagtgctgggattacaggcatgagccaccacgcccggcctatgattttttgtttgtttgttttgagacagagtctcactctgtcgcctaggctggagtgtaatggctcaatctcggttcactgcgacctctgcctcacgggttcaagagattctcctgcctcagcctcctgggtagctgggattacaggcatgtgccaccatgtccggctaattttgtatttttagtagagacggggtttctccatgttggtcaggctggtctcaagctcctgacctcaggtgatccacctgcctcagtctcccaaagtgctgggattacaggcatgagctgccaccacgcctggctggagatgtgattataaaggacctgagtagtgtgaataagaagtttgaacatcatatactgtaagtattcaggagccataggtggcaggaagtggcatcacagattcttgcttcagaagaataacttgtttccatggagggtggattaaaatatagagagcatggtagtaggatgacttattagtaggcaggaaatgccaaggattagagtaaaggtgctgggtacagatttcacaccacagccaagcaagtgagaaatgcaacctgtgcagtgaagcctttaattgcgtagcatccttattcctcaaaacatgtcatgtaagagggaagagttttagatgtgtgtagcccagcttttgggccatttcttctacccctgccttaccattggtcatttcttttgtattcgagtaaagaaaagataaagggagcagataatgaagtattttctcagtttcccatggctgatttcctaaaactctcattttaattaactatcatctagtttccctggccctctctattcatctgcttaatgtgtgtacatcatcattcaacagatacttattggcacacctactgtgtacgaggcactggatgtgggtactgaagactcttgggaacaaataaccacactgcagtgggagggaatggggtcttgttgctatggccacagaagaaaagagctcaacatggccgagggccacaggaaatatcttgcatgtatgcagccccagagctcatgttgtggcccaaagtttctgcacgatgagcaaccttaacctgctgagatggtaaccccaacttgtttgggacagtaaaattgttttcttgctgggtgtcttcccttcccaatctaggaagatttagaattcaatataggatgatgaagtaaatcaaacccatacttttgtgttagtctgaggtataatttgtgtatttttgtcatttgaagtgttagtaatacttaaggggatctggcttaataataataatagctaacatttattgaattccaggcattatataaactctttacaaggattaactcttttaatccttataacaaccctatgaggtaaatactgttatcatcaccattttacatgtacgaaaattgaagcacagagaggctcaataatttgcccaaaggcacacatttagtctgtggtccaccctgctgaaacccaggcatactggtgccagaatccatattagaatgtctatcagattagtcttgcaatgaccattcaaaagttgtattgagtaatttcatatgtctgattttatttactttttgagaaaaggcctcaccctgttacccaggctggagtgcagtggtatgatcatggttcactgcagccttgatccccctgggctcaaggaatcttcccactttggccttccaagtagctgggactacaggcacatgccaccacatcctgctaattaaaaaaaaaaattttttttttttggtagagatagggtctcctatgttgtccaggctggtctcaaactcctgggctcaaatgattcttctgccttggcttcccaaactgctgggaatacaggtgtgagccaccatatctggcctacttctgattttaagtggaaagataagaattatatttaaagtgtatattatttaaggttcctaagcaatattggaatgcttaagcaatttgttacatttttcttcttggtgttcactgagctttttgaatctacacattgatatcgttctgtctttcaccaaatgtgaaaacattttggccatgatttcttgaaatatttcttcttctccattctttcctttcctctggaactctaattacacttacattagaccttttgttactgttctccaagtcatcgaggccctgttattatttttttaaatcccttcttttccctctgatcttcagattagaggatttctgttgttcagtattaaatttcattgactcttctgcaacttccaatatttttcttaagctcattcagtgtgtatttgtttcagttattattgcatttttccttttctagaatttccatttggttcttttttcctttttattcattacaagcgtatttttctttatagccttaatcatagttataataactgttttaaaattctcatctgcagctgggcatggtggctcatgcctgtaatcttagtacttctggaggccaaggagggacgattgcttgaggccaggagttcaagactagcctgggctacatagagagactccatccctaaaaacgaacaaacaaattggccagggaggtggcaggcacccattgtcctaacaactctgtaggctgaggtgggagtattctcaagctgaggagttcaaggctgcagtgaactcttaccactgcactccagtgtgggtgacagagcaagacctgtgcccaaaaagcaaacaaaaattcttatctgctatttctaacatttgggtcgtcatggttcagtctccattgatttttttcccttgaatatggttcacattttcctgctttggggaattttgaattgtactcaatattgtgagtaatatgtcataaagactcatatccatcatgttcctctgaagattattgtgtatgtttgtgtgtatatatgtttaagcaggcagtttactttgctgggctcaaaatcaaaactccatgttttcagtggtgtcagcagctgacatctctgtgcagttctttagctgtagctaggctgcttggcatcttgtcacagtttatagttcaagggtttccagatattcagtggagtttatgtgcagaatttaagctcttactttgcttctcttttctgggatttcccacttcactttccgggtgctgtggtcctcccaaattctatactcacccagcatgatggtgaagagggctgccctcaggcaaaaacccttaaaaaaatgagaagttcacctagtgtttgttcccttcttctaaatgtgcatgtgtcttcagtttctgcctgcttttggtcgccctgaaatggttgttgtttatagttggtccagagtttattgttgttactttgtgggaagattggtccgatgggaactagtgagccatttccagaagctgctagccttccatgtcgtgattcataagaatttttagttttcttgttaggttttctagcatcagataagtgctagggaaagttttcgttgctaggcatttgaaattcctatacaggaaaggaaatttgaatgtattaaacttataattgcagtttaaattggtgtaagggaattaatttaactaagttttaaatgggactggatatttaagggattttataatctgttcaaaattggatgccttaaacagtcaaagtcaattggctgttcactttaactagatttataaataggaaaatatttgtaaattgaacttaagaacttaaggagaaaccagttccctaaagttatttcttttataaattgaatattagtttaataatgttaatcacaaatcgtctttttattcacaaaagacacccttggggcagcaaaaaactccagtggtaataaggaacttgggctttagtggggcagacctgattaaccctgtgtctacagacaacgagagaagtgcaatgggataggcgagcacaagtgctgtgggaggatgaggggatggggattggagatgttcctggaggagatgacacctggcagacaaagtgagggaaagagcattcctggctgggtctaggaatggtgtggagtgtagcacctgtgaggatgtggaggcctgaaaaagcattgcccgcttaggaaacttacaagttcattttggctgagagaatgaccttgggggctgagctcgggagtttgacctgcatcctagaagctgaggaagcaccatcaagaaagagaaaagacaacccacagaatgagagaagttttacaactcatatatctgataaaggacttgtatctggaatatataaagagctataaagacagggctgggcatggtggttcacacgtgtaatcccagtgctttgggaggcagagacagggagatcacttgagaacaggagttcaggaccaacctgggtaacagtgggaccccacctctaaaaaaatatatttttaattagctgagtgtggtggtatatgcctctagtcccagctactgggggtggtgaggggctgaggcagaggaattgagcccagaagttcaaggttgcattgagttatgatcatacgactgcattccagcctaagccacagagtgtgacatttctctgtggccaataagcacatgaaatgatgctccatatcattagccatcaggaaaatgcaaattgaaaccacaatgagataattcgcactcactaaaatggagaaattggaatcctcatacactgctaatgcaaatataaagtggtgcattcacttgaaaagtgtagcagttcctaaaaaaggttcaacgtagagtttaaaaataaaaaaatataggccaggagctatgactcactcctgtaatcccagcactttgggaggccaaggtgggtggatcatctgagctcaggagtttgagactagccgggacaacaaggagaaacaccgtctctgcaaaaaatacaaaaattagccaggcgtgttctcacacatctgtagtcccagctacttgggaggctgaggtaggaggatcacgtgaagctgggaagtggaggttgcagtaagccaagatggcgccactgcactccagcctgggcaacagagtcagaccctttttcaaaaaaaaaattttttgccaggcatggtggcactcacctatggtcccagctacttaggaggctgaggcaggaagatcgcttgagtccaggagttgaaggctgcagtgagccgtaattgcaccactgcactccagcctgggtgacagagtgagaccccatcttgaaataaacaagaattaaaaaatgaagagaagtagtatgggtgtagttgcagaataaaggacagtctttaaactgaataaactcagctttataaaatacttttttaaaaaggcggagaaaagaagctgagggaacccattgaactataggaagaactatatttgcagagggaggggggcctttgggaacaaaaccacccacagtctccatcttggcggaggagccctgacacactcctgcactcctggagcacttgggtgggactaggggaggtgccactgactccaggagctgaggtttgggctgtgtagaggatgagtagggagatgcagaggcagagaggcctgtgttcaccatgggatgacacaggagaaaaggctggccagctctccctgtcttcccaactccctctaaagttggcgagaaaaagcccttaattgtattgcaatggttatggattcggaaatggtttttcccttgctgtgtgttctttttcctcagattggaaaggatcgggcactgaactttgacccctgctgcatcagctactttactaaaggcgagtacattttgctggggggttcagacaagcaagtatctcttttcaccaaggatggagtgcggcttgggactgttggggagcagaactcctgggtgtggacgtgtcaagcgaaaccggattccaactatgtggtaagaagagaaagtttgttctgtggggccatggcttgaagaggcactgagcagccgccgtgtctcgagtcacatcactggggtttgtgtctgacaaatgggggaatgcagactttctccagagagctgggaattgacagttctctcaccccgcaggtggtcggctgccaggacggcaccatttccttctaccagcttattttcagcacagtccatgggctttacaaggaccgctatgcctacagggatagcatgactgacgtcattgtgcagcacctgatcactgagcagaaaggtaagaggcaggtccagaccttgggaagagggacaggtggaagcaggtggaaagggctggtgacagggcacttgaaatgacaggaaaaggtttctctttggcgttttgcaaacctgttagccactgggtctgtgtcttgttttcttttttttttttttttggtgggggaagtagggatgccagtctccttgaggatctcatgaaagcaataaatcctctctgaaaaatgtaccaactcagaattttgcacataatttcaaggagtacatgaatttccttagtgagggaggatgatttatgacaggttggagccaggtggttgacctgcatgggtcttcgtggacctttatcctttctggtcagagtcactctggggtgcttctccctcagccctgtctccacttgcctcctggtgggtccttctgccagagatgagcagtggaattggattggcacaggctaggtcagaagatcagagttcccggcctcgcatagtcattctaagccctaagactgcagtctctccctctgtccacttaagttgctgtgctggttaaatagactcaatccacttacttcaggtgtattcatatctggatgtgctggccttagtgcactgctaggtgcctttgcaagggatccaggttgggggttgtcttgtagattcagatgagtgtcctttggtccccctgggggaccctatctttttgaagattctggctgtggtggttggggcaaagccccttgggcagcttcacagtgtcccccttagggacattttctccacctggtctgtagtgggagtgtagagcctggtgtgtaccagaaattacatgtcttccccgtttgtcaaggaggtgggcagggagcggccagaggtgaggtcagttacttaggcaggcttctgatcaccgggggccactagtgctgtgcagaggagtttatatttgtatccagcaagtgatggtaacagtgagtagtttatttccatactcagttgtcagccttggaccatgaagattgtgtcctataggactttggatcccagggttcagcagagttgattgtatgtattagatactctaaagatttttcaatgagagtatctcactttaattgccagtagcgctaagtaaatgatggcttttaatttctctgccttgcaccttacataacaacctcttgctagaactagatatttttttctttgacagttcggattaaatgcaaagagcttgtcaagaagattgccatctacagaaatcgattggctatccaactgccagagaaaatcctcatctatgagttgtattcagaggacttatcagacatgcattaccgggtaaaggagaagattatcaagaagtttgagtgcaacctcctggtggtgtgtgccaatcacatcatcctgtgccaggtgggcagcagcatgttgaaggagttgggctgaattccatttgtgctccccccccagtgatagggtgcccacctcatggttttaaaactggtcactagaaaacaagtctgttccatcaaactaagtggtgcttattggctttcattttcctggcatctggatgaaccagactctatcagcaagtcatgagccataaactggagaatgtttttttgttttattttattattttttaaaaaatatttttcttgagacagacagggtcttgctctgttgcccaggctggaatgcagtggcacaattatggctcactgcagctttgacctcccaagctcaagcggtcttcctcctgagtagctggcaccacaggcacatgccaccacacccaactaattttttatttttagtagagacgcgaggctgtactttgggaggctaaggcgggaggaatgcttgaacccaggagtttgagacctgtccagcttcctaaagtactgggattataggtgtgagccactgtgtctagccaagaataccttgttctattgcagaacatcttgtcatactgggattagatatactttaatgacttaaaacataaattggtgtacagaatgaagatagtttttattgataagcatatacacataaaatttgtatcaactcagtaattgtcaaggaagttttaattcctgaaagattttttttcatagaaaaatatttctcaagattcttagagagtgtctaagtcaatgccaagagaagtttggaaagactttgagagaaggctagcccagcatcttggaagtagaggtggatttagttttacatagttctgttggaggtgataaaagagaagaattccttaggaatcactgtagtgtaaaatactattaaaatctctcaaaagcctagaactgggctgggtgcagtggctcatgcctgtaaatcccagcactttgggaggccaaggcaggatgattgcttgaggctagtagttcgaaagcagtctagaaaacagagaccccatctccaccaaaaaaaaaaaaaaaaaaaaaaaattatttaattagctgggtgtggtggcgcttgcctgtagtcccagctacttgggaggctgaggcaggagaattgctttagccagaaattggaggcagcagtgagctatgatagcgccactacactccagcctgggtgacagagtgagactctgtctcaaaaacaaataataaataaataatcaaagttagaactccaagcggtttagggttgctacaaattacaggatagatgtggcaagtatgtgtacttttgagtgctgcctctggcctaggctgcctgggtgggggtttgcattgaagatctgaggctgaattgggctccgtggggaagccttgcatggagtcttggattaacgatgccaatcgtggggtctacattgggttagatagatggatactgaatgtgtaggtattttctccccttagggacagaaagatctccttggggaggtctgggggcacttattctgttgaatttccatgcagagctgggtttgcttcctaggagaaacggctgcagtgcctgtccttcagcggagtgaaggagcgggagtggcagatggagtctctcattcgttacatcaaggtgatcggtggccctcctggaagagaaggcctcttagtggggctgaagaatggacaggtgagtgctccctcacgtctcctgtcaggctgataatctgcatgcacacgtgggtgacccgtctagcaatgactctgagctgggttctcagggcaggaaaagggcttctctcctccatgggtgaattgtggggcagcctgagttcagttttttgaggacagcctcaggccaaaggtgctgtggccctcacactcctagcaggcccacgttttggcagagttgagctataacctttggctacatgtagagtgtattagtggcttaaggtctccagaaggtgggagatttgttagagatgttgcttctgtggatttctagagggaggcagagatcgttacctaggtcagctcctgattagggcagcgagtggattaaggcagtgcgttccagcatgtgtcctaaagaatgctgggtcctcaagatactgatagatgtcataagcaaaatgggccctttggccagttagatgtgggatatccaggttacacaaaattctgtgtgtgtgtatacatgtgtacacgtgtgttctttgctcagcataagaaaagttctaagtaggctgctacatggaactttgaaagtgacaatgtagctgcattagcctgacagccaagctgtgcagcagatggcttatggctgaggcttgtcaggtctttgctggggatggaagtcacagggcatgagagcagtgggtgaagtcaagcagcaatgccaaggggaggaagggccgcttatttctcaggcagctctcacttccaatgggagcatggactatggggtcaggtgggccggaggtcgtgttcttacttagctactcactggctttgtcatcctgggcaggtcactttacctctgtgaggctggttttacatgaggataataccacatatttcatagggctgtcaaaaacagatatcatcagggttgggagttaaagccaatgttaaaaacaaaacaaaacaaaaaaaacaccaggggtattaaaacaggcatggtggagggtacctgttttcccagctactcaggaggctgagataggaggatcactttgagcccaggagtttgaggctgcagtgtgatatgattatacctgtgaatagccactgcgatcagcctgggcaacatagcaagaccttatctctaaaaaaaattttttttaaaccagggatatcagtaaatgatagctatcatgatcactatcatcattattataattttctaccacatgtcttgtcagtgttcatagtagctttttcctgtgttagttcgtgactcagatctctgctaggtggcatctcctaaagctgcagtttgggtaatgtcatcaacaaatccccagtccgaacagacactgaagtgagctcggcctgtctcagggctgtcattacttctgcagcctctgatgaacctcgcttctggcctcctaaggataagccattgccccccacccccctctttcttttgatgagtccttttccctgcacagagcttctggtgaaggtggtgggagttgttcttgcagagcacatgggattccaacggcctggcagtgggccaggatcttgttgccatggtgactgacactgttttcgctgaaattttgccagatcctgaagatcttcgtggacaatctctttgctatcgtcctgctgaagcaggccacagctgtgcgctgcttggacatgagtgcctcccgtaagaagctggccgtggtagatgaaaatgacacttgcctggtgtatgacatcgacaccaaggagctgctttttcaggtgaagtccctgagggggcccagggacatcatcctttgattagagactctcctctagcttcccagtccctgcaggaggctctcctgctctggcccaggcaggtctctgggaggggcaggggccaagcacatgcacagagtcccagaggccctgggccacaacctgctcctcccacacaggcacaagccgcagggcctggaccggcctctttaactttggtttccttgccaatggaaaccgaaggctctgagccagcagagcctttcttaagcgtttaccatgaacaagaaatggggcaatgactctgagaggggtgtgacgttggcactcagtgaatggggcgatggatgcacttcctttgcagaagtctgtgtctcacctgctgcaggcctgcctgtgtctatgcgcacctacagcgtgggaaggaaacaggatgttttgtcatctgaaagggggaaggggatgggcaagcctggccttctacttaattcacaagaatgctagaagagccagcagaatgcgaagtgcttggatctttggggttgtaggcgttgttcagtggagtcatccagccctgtggcctgaggaagtgtgtcaccagagaagacagcccggcagctctgtgccccgggcctggttggctttctgctgggctcgcgccattctttctctctttaggtctttgtaggtggtcaggactggttttccagagtgaagttccccccaaagctggagcccctcctgactggtttcctcggccactgcagggtttcctgatgttatgggcagattcagtccccttaccaggctcctccttgttctcagcagcagaatcgatgggggaggggtctggagtggggagcagcctcagtcaattagaaggagttacctggccacctctagcccagaggtaactccatgtcagtctcaactcactcatgtccttgagagagtagaatggtttcggggaaagagagggcatagccttcaagctgacctgggcttgggtcctgcctgcatcccttactgtgtgatcttaagttagtgagcctctctgagccttaattacttttctctaaaatgaaattagtaattgccccttacagaattgctacaggaatacactagatactacagtgcctagctcagtgttgagcacaaaatggggcctgaaatgttacttcccttctccccagcctcacctcccacctatagggggcatagctggccccaaatgtgaatcttgtgtctgagcctagaatcatacaagtgtggaagggcgtctgtgctgccccatccccactgctggctctatggcaggctaggggaggtgattctcagccctgccaggagacatcagcattcccagctgtaacattgcctgctggcttttcctcttctccactgcccctccctctacacataaaacagctatattgattttttctcattataaaaaacaatccatgctgattataaaagatttagtcattataaaagatcctaggcagaaaggtatgagcatatttcaggagaataattttttttcaaaagtaatacttgcttactcaaaaattccaacaacacgcaggtgcatggaggggcttgcctctgttcatttctcttgcctctgttcatttctttgtggtcccctttcatccttttccctccatcccactgtaagcaatttagtgggattcagtctttaagagggtattgggctgaaatgtgtgagcgctgaccaagcccagggtggttctcacaggatccccactgtccctgttccccaggaaccaaacgccaacagtgtagcttggaacacccagtgtgaggacatgctctgcttctcgggaggaggctacctcaacatcaaagccagcaccttccctgtgcaccggcagaagctgcagggctttgtggtcggctacaatggctccaagatcttctgcctccatgtcttctccatttctgccgtggaggtgccgcaggtaactgggggtgcctgtccactcttagcactggcaaggctgacaagaccagggaagctgggccctttgctggtgctttggggagagagtagcaaggagagaagaatggcagctgtgaggtcgtgggaggcagtctgggcctggaacctgccgccctgtctccactccttgcaacctgtgtgactgggggcaaacagctcaacctccctgagtatcagtttcttccttgtcccctttctgtagggatgggaggggtatgcagtgttgtcagcagcgtgtgttttgcagagagcccagcgtggggccgaatggagtgagcagcaaagccgggagtccggcagggtgtgtgtgtgagtacgtgtgtgatggtggtgatgtgtgtgtgagagagaggggagagagagaatgagtgggtggggggtgtgggctgaggtctgtgagccaataagggagcatgggactctgcacaagctctctgaaccaggaggtggccagaacagaaatggggcactgaagggtggagccacagaatgggggagggcagaaccacagacaggcgcctgagattgacctcccgaatgcaggatggtctcccctccaccttctgcaccccaggcagatggtgctcactgtagaattgccataaaacagagacgtgcatagcgagaaactgtagccttcagcatcccatcctcaggacagaatcactcttaaacatgttgaaatacatctgcttagcgcttttctacgtgtatatataatatatgcataatatacaattaggagcatgtggttttataagaacatttttaaacaaaagtggaatcacactgcaaatacttttcatgacttttatgtgtatacgtattgctacctatagatggaacctcagatttactgtattccctgagcctggcctgtaaacaagacttctcatcccttcctttatggctatcttctcatttcacctcacattcggttatggcagccccatcactgtctatgaagtgctggctgtacactagtcatctggccttttcactcaacaatctcctaaagcatcgttctgtgtcagtaaatggtaaatgttcttattctgcatggcaaaatttagggtaattgtagactcacataaattgtaggaaataatacagagatcccttaaaccctttgcctagtttcccccaacggtaacagtgtgcatagctctagagtgatcttcccacccatgttggcatgtgtaatctcccaccacagtcatggcactgaacactgccaccaccacaaggtccctggtgttgtgctttttacagccagcacccctccctcctgcctggtccccacctgccttgtatttacagctgcattttattgtgtcttgtggatgttccacagctttctttaccagtcctactggacatgtttgctgcttatagcttttttgtattattgtaaatagcaggcatctttctagctaggtccttgcacctgtcccaacttggcgccttggcataaattcctagaaatgaaattgctgggtcaaagcacgtgtacctttgaaagacttttagggaaatttccaggtttcccttccgctaggctctgtcagtctgttttccccatacaactcagcttcaggctagagcccacttcttctaagttgatgataccctcgaaactcatgactgcaagacttactggggaaatgcccatcatccatgcctgacacagatcagctattcaagaaatgttagtggaattcagatctgaggaaaaagaccagaaagcaagaggaagaagggaatgaggtgggtggaagtggcagcaggacgaggggcacgaacagcttctcctggactgtgtcctcgtcatccttgtctgccccattacaaacccacgcaccacatccaccaggaactcatctccctcaattgccccaaactagctctgcttattttattaaaaggttttctcccaagattgccatcctgacctcaaaaataaatgcagtttgctgctctctgactgtggccggccaagaggagccagaggggcagcctggggcttcctctgccaggactttaagattcagcagcaaagtcttgctgactgcaccaaggccatcctgctgacgcagcgggtcaggactgccaagggttaggaaacacattctcaagacaaaggctgttcatctgtcgcctctgcctccggccatcctgtggttttggcccagagaggagggagaaagcatcagacccagtcttggaatttttggttgcctttcgaaatttacattgtcttgtgcaagaactggtttgtcagggctgccaagtaggacaacgagccctaggagggcttctcaaggcggtggtgacttcatgtttgaaatccaacagcaagataaagtatagctcagagagtatttgttcagtggggtctatttttaaaactccactcaaattgtgcctcccaagtaagtccaagtgttagccatccatcatatgctcagctgtgatatgcctgcctgagtgcctgtcccactcacggggcagtcagcatggcaagcagttggtgtggttcggggaaggagcaccagctttcagtcctgactctgccatctcaagcagctgtaactagagcaactcatttcactctttggggcctcatttcttttctgtgaaatggggttaattatacccatctttcaggtttcgtcaagccaaatttctattattatttctccttattactgactcataaaatagcaaaaaccacaaaacacaactaaattgcaacaggctgtacttactgacggactttagaaaggaaagctcattgtgtgctttaagaaaagctttcaggagtttgagaaagcttccaggagatggtgaaacttgatctgagccctgagaggtctggaaaggaagagtggagcagggaagcttttcaaacaaagggaaaggtgggggtaggaacaagactggagagcctgggagatggtgaggagctggtgctgagaaaatacagtgaaggtaatgatcatgcctgcattttgcccagtgcttcattatttttggagcacatctctcctttgcccatggtagcctgagctgggcaggacatctaaacagaagttaatggatttacccaaaaagtcaccagcctaggatgtggctgagcctggcctgggttctaggtcacctgctccgtagcctatgcctgctgccccgctaaagggagcatttaatgtgccaatgaggagagatggcatggtggaaaagataagcacttggaagcagccatgttttgctctgagagtagacagactcaaaataaaaaaaattccttcaattctaaagctaaaaaatgggactggaaatttcaaagacagacaaaagccccaaatggagaaaacaatacttcaagctccacatttgggaaccattagcacagaggtcctggctgatttctcttccctgcccaggaagccaggagagatgcaggccactgaagcacactggctggcctaaaacaagggcaaggcctttccttgttaaagatgtcatggcccaactcaagactcattctcaggcctgcacgcacatatgcacatatacacgcgtgcatacatgtggcaggaaggggcacagaacctggagtccagtcacctctggctattgccagctatttgctgggacaggtcatttgtcctctctgagtctcggtctcctgggctgtagccagggagaaataatacctactgcacaggactgtggggacagccaaaagccttttataaacctaagaaagagaagtcgttaggaactattcatgggcactcacagcaaggcaaccccatcttgtaggagggcatctgtccccagggcagggatcaggagagctgtttccagaggcttccagggtaacttggagcaaatcacttacctttcttggactcagtccctggaagaagaggccattccagaccgcttcctcccacgaactcattcattgtgtcagcaaacgtagactggggttctgctgagggaggccgatacaacccaccactgcccacggctgtgcacggctttgctgtgggaacaggcctgtaactgcggcacaacctgcgatctggacaaagggcagaggaagctgagactctttcccctggggtgggggcttgaggggcttgggaggactctgcagaagaggtgacatttcaacagggccttgaaagccaaataggtattttccagaggcagagtggggaggggcaaaggcattccaggtgagggtgacatcctatggcgaggcaggcctgtaggtgggaaggaggggaggatgggcagagagtttgtgctgtggagcacagtagcccagtcatgagagaggtgcaggatggagcacacagggtgggctgggcaggctgggcagggtgctgattggcggctgcagggctgctccccaggcatgggtaatcatcccacgcatctggaggcaggctctgtatgcatctggttctttccatggctctgaaaacagtcttctttttttcccttgatgaaatcctgcagtccgctcccatgtaccagtacctggataggaaactgttcaaggaagcctaccagattgcttgcttgggtgtcacagacactgattggcgtgaactggccatggaagcgctagaaggtttagattttgaaacagcaaagaaggtaagcatctagccagcaggagctggagtttggtccttgtggggtcccttaagaaggcagatggggacccaggtggcacggagaggccatagactgcagcagtctctggagttaggctgacctgggcttgtatcttagccacttcctcactgtgggcctgggtaggtgacaccctttctaagattgcttctctatagacgtaggatgatgacaggccccatcctcacaaagctgtgaggatcaaatgggaggatgcctgtaaagcctgacccaggagcagcatgtcagattctggctgtcactcttattagctgttctctgtgggaagcacctgactagtagcctggcacatcacaggcactccgtaaatggcggcttttattatcggtgtagtcactggccatgatgctgcacacaatgctgcttttcttagcatctgccaactaaggtgggagagatggtcaaggtctctgattctgacagcaatgtgggcacttcccacgtaccttcatggcgggattcatggacttgattcgttgtgtcctttcctggcctagtctatgaaagctagagagatggctgaaaacatctgacccctctctgcacataaggaaaagcccaggtatgttcctgagctgtgtttccatctagaacctcagatggaggaaggaatggcttccaacctccactcccctaccccttccctctttatctccccacagtcaattaatgagctgctcattttgtccatattcccgggctgacattgaaggagtggcaaagagggacgtgatgcccgccttgggttagatcaagacttgtaggcatgaagagaggagactggaccagaccaggactaagaagcctggctgagaacgagctgtgtcacataaggggctctgggacctcaggccagccactttccttggagccccagtcctcccagttctgaaatgggggtggtgagaatgcccgctgcagtcatgaggcttaactgagatgttgtaaaggggaatttaaatcagggatggttgtgcagatgctagccattactaaacaagggaagtgatcgttgtgtaacaatgatctagattatatttttagatgtcctcagtgtaggaaagtggagatggaggaggctgtaagaattcagaggaggggccaggcgcggtggctcacgcctgtaaatcctagcactttgggaggccgaggtgtgcggatcacaaggtcaggagatcgagaccatcctggctaacacggtgaaaccccgtctctactaaaaatacaaaaaattagccgggcatggtggcaggcgcctgtagtcccagctactccggaggctgaggcaggagaatggcgtgaacctgggaggcggagcgtgcagtgagccgagatggtgccactgcactccagcctgggccatagagcaagactctgacttaaaaaaaaaaaaaaaaaagaattcagaggagggaggaggcatctctatggagggagcttccctctcctgccccacccagaaatgccagcagggagggagacgacaaatccctagaatagaaaggattgtaaaaagccacaaggtttaatatgagtgtttactgatatttttataaatatatatatttttatatatttgtttaaatattgagacggggactcactgtgttgcccaggcaggtcttgaactcctgggctcaagcagtcttcttgcctcagcctcccaaagtgctgggattacaggtataaaccaccacacccagccagatttactatagttgaaaagtaagtgtatgtggtatatatctattgtgtacaacatgctgttttgaaaaagccacatgatattgaagataggctggatgttactatttcatctaaatcccgagtaccccacctctttactctgtgccaggcactcaggctcaccagcttggatatagtggttcctagagatggacagccatccccactagatggcagagaagagctgctgagctcccgccagaccctgagcagagctgcaggttcctccctattcccaggcttccctctgctgagctcattcaggggccttgtgactctgaccaggcaccctgacgctgcaaaatgtgtcaggttgaaggaactcggaaacagatttattaatgggcaaatcctagacactagcacagctgagctacagctagaaagacccttgagagggtgtcagtagcaggcccctttccacaaagaagatggttggagcccagaagcagagaagtaggctcagagcgaggactcagacctcgaatgctcctttccctcttggccactgtgctgggctttgcagggttgccctctcaaggcgctttaaggaaacccagatctagagggtgatgtgtaagacctacagcttgggacacaggtagtcttagccctgtgttccttggcccatgtgatgcccgcattgcccttttctacgaattcctcttcacaaacacttgtttgccaggttctgactctgatgcctcccttaacgctgcctcccacccctgctcatgctcagaccattcatccgtgttctccaggcatgtggttcgtagttggagagctcttagctctgggaggtgtcatgatctgtttaattgaccagctttccctgttagaatgtggacctctgaattgtggagggggacaggggccgagacatgtttctccctgggtcctcagtctcttgacaggaagcctggtcctgtgggatgaaaagataaagttgcattgtggtcacctgcaaggcaggccggggacttgctcatctcccgaggtcttttcaggagggaggatgccatgctgctgagcagaggctgcaagtggtcaggattgctctgcgtgttcagttcaaagggctctggagctgctgcctcctctaggcacaggtcagcccattttgaatggggcaataaatggtgacagcaaagccacctgaaagcagcctgacctggtggcttgtgctcctccaaaccctgggcagaatctgaaagcagcaaaactagcttagctaacaccagtctgcttgttcctcagaaacttctagaggtccatgagttaaagtctctggctttactgtgagttcaaggcaagggctgcaattttagggtttacataaagagtttgccttccacagacttggtgggattcattccctacccctccaccttcttccagaatctgtctttataccctctcagctttcccctcctctgctccctctgtggtaccaggggctctgggtcccctgtgtctgtggcaccactgggtaggcatagctgtcccctgcattctacccatgttgccaagatgtataggcagtctctcatcagtccatgcatctcatcctctcctgctgtgatgctgcgtgaccccccagagggtcagaccggcttgttcttctttgggtctagagtctcccaaggaggcaccgccacagactgtggcatcacggttttgttttacctgatctcaaaatgactgatgcaactgggatgtctttgctgttctttacatggtccaatcccatggataaagccatgcctcgctgggtggtataacctcctgcacgcacgatgattaatctgtgcttgctcccttcctctcctctgtggctcactgtctagatagagcttgacttcccacccctagccaatcacccacttttgaagccaagaagacagcttattttattctttatttcttcgccacaggccttcatcagagtacaagacctccgatatttagagctcatcagcagcattgaggtaaaagatgaagcatttttccttctcaagaaggcatacttggggttcctgttttaggggcagcccttctaacaggcaagagccttgaggacatgggaacagagctcactggcgtctgggcatctgggccacagccttgctccgggggcagagtggccacactgggggagacaacagcaggtagtgtgagctgttgtgtgatagctgggtgaggcacatgggttccggatctctccagggttgggtttctagtctgtgaaaagggattggacctacctcacaggctgctgtgaggattcagtaggttctcaggaactggtttgcatcctcctggtggcggatagctggtcaccatcctctcagactccagtaatctgatagtgttggaggagtttcccaaatgcacatgagctgagctccattccccagaaatggacctggggagcaaggcccacagtctgaactgagcgccccagagttctggagcaacccctagccctactgtttctggctgagaatattgaccttgtcatccaaacccaataggcctgcagtgtgctaaggaagctggttgtaggtatgccatttgctgggtggtggtcaacactatgctttttttttcttttttttttttttttttctgaaacaaggtctcactctgttccccaggctcaagcgcagtggcacgatcacagcttactgcagcatagacctcccaggctcaaatgatcctcccacctagcctcccaagtagctgggaccacatgcatgtgccaccccgcctgattaattttttgtatattttttagagcagggttttcccatgttgcccaggctggtttcaaattcgtgggctcaagctattagcccaccttagcctcccaaagtgctagcattatagacttgagctaccatgcccggcccttagacactattcttaatttctgtgtatctcagtgctgtctggctgtctgttaaaaggcatatacattttttctcctgaacatatttattgtgaaggtatgggaatgtgagatacatttgaattcccagttggaaacagtgaggaaatagcaaatgtcttgtccctctcattcatttccccataataaacacctgtcatgggccagcccttgtgccgagctcagtgggcacagagctgaggaggagagaggctgacaggagctcacagcctgctaagcctcataacgtaatctgctctgtgccacatgcgtgatttatgtgaatgctgttctagatcctcacattaactgaatgaggcaggtactgttgctctccctattccatgcaggaggaaattaaggctcagcaagacgatgccacatccccatgggtccatagccaaaaacttggtggaattcaagcccagtctatttcctaagctcatgctctctcggccacataccctccctacccgcgtgttgtaaggggcatctgtatattctggggtttacctacccgcgtggtaaagggcttgttcggagctattgctcaaaatgcccagtgctgctgactttcacttgtaaatccactggcctggatctgggggtcttcacctgaagccaaggagcataattttcctctctacaaaagtaactgctgtggggtccaactattacttgtcacatcttactggggtcaaaatgtagtcctctcctcgtatgctatgagctgggaagtgcgttaaagtaaactcctaagattgtctcttgaaaaaaagtaaagtgcctttgagtgtgctctatatcgactgcctgcagacttatttgcacacatctgggtgctcagcataattccagagaactgcagatccttagtgggtgccttttggataggggagatgttcttgtcctgctgacggggggaaagaacctgcccatgttgacatgcacctgctgagtgccatagatcgtttttattggtcatggtgatatcctggggcctagaatggatatggcctgaatttcatgtctagtaaaaccttttttgtttgtttgtttgttttttttttgcagagatagagtctggctatattgaccaggctggcctacaactcctgggctcaagtgatcctcctcttttgacctcccaaagtgtagggatcacaggtgtaagccaccatgtccagccaaaatcaatcttttatctcacggcaagatttcaattcatttccaactattaggagttagtttgtttgatgagcctgagctgtgtgcaggtttttagaatgataatttctgtcagtatggaagcatgttgcctccagctgttaaaactttcaccagcttgtctaagagtttgattcaatgtcttatcgtcctccaatatgctgctctttctagaaaacaagcaaaaggaaactgctagggctcagggtttgggtgctactgagtgtttacaaatactcgagctgtagacaagcgaatgttccctgacacagaaggaagaagctttatcctagctgtgctaagtgtgtgtgtgtgtgtgtgtgtgttgttggggacatcacttgcttcaaaagactacattgtgtgatacaaggaatatctggagtcagacagaactgcgtccaaattccagctctgtctgaccctgacctgttcctcttcttgagtctcagcgtccttcactctaacacttgggtagtgagacctaccctgagggtcactgagaggaataaaggggccatgtgtgtataaagtatatacccagaacctagtggatgttcagcatgcgggatttcttaccttctctttagaagtagggatatcgtaagacttgtcatcctattttattggtctccctcttgggcagaaaccctaaacattctcctgctctgtcatccccatgagccacaactctgccaaacggggcctgcggatttgggagatcttgggagcttaggggtcatggatgagtcagagcacacactattcaaactattccgtcatagccttggaatacacaggaaagcaaccctgaggaatttccattaaacaaacaaaggtttgcatctttttttgatctttgcttgtctggtaaaagcctgcttttgttgtcaagccttcccagcgggaacctaggggagagagacaacagccaggagccaagcccaggttccagtaggaaggcccaggggcctcacttgaaatagccacatctaacctttgtaaaggctgcttcctgcccatggctgcagaggccatttcctttgcttctaatttttccaggagaggaagaagcggggagagaccaacaatgacctgtttctggcagatgtgttttcctaccaggggaagttccatgaggccgccaaactgtacaagaggagtgggcacgagaacctcgcgcttgaaatgtacaccgacctctgcatgtttgagtatgccaaggtaacctaccctgtcccaggcccaagctccagcttggagcccactggtattctcacgtgcggtgtccaagttattttccccaagagtgctgcggacaaaaactagcaatggtctcagaaaggatgtggggaaactggtaaacaaaggacccatctacagccactggttgaaactcacctaaaactgacctttaaggctgacaccaagggggcagactatggcagttcagaccttcatcagtgacagggctggatggctgtgggtctacaccagcacaatcccttcattgagttgagggctcagggcttcagggctgtcccccacaaatcctctcaatccttgtcaggagccgccaagaatcggtgtcttcaggcaggagccggtcctgccgatcatgcaggacgacatggtgcctgccagccaagtttcccatagcacctgctgattgtcctggacttctcactgggcttctgggaagtcaggcagagcctccgccctcccatgttagcgcagcatgcctcacgcctgccggctgcagagtggctaccatgtggttgcagtgggtgatggcagagattcccttttgcattgggacggcccccatgaaccttactccccagcagagctgggccttttaaggcaggtgtaggagaggagcttcctggaccaggctcctgatggcttctgtgggaaggagttgcactaaggagcccagagcagtcaagacatttgcagttcagtctaagcaaggttcaaagaggcttcggtacactgggcaatgagggtcttccttccatcaaggggctttgttaacctgccttttctggaagtgtcaaaagtggctctcagtatgttatgaagtgactcatcagccataacctattggtgggctactaatggtagttctccagctcacaagttcaagatggaaaatcttccccacttttttctgcttttctattcctgaagatggctgtgctcttccaccacctgttcgaccctggggctgaaggtgtgtttggtggcctgtgatgttgcccaggacctattgttcatcaggacttggacgagctcctgggccccagcctgtcttttcaccttagtgatttcttcactccgtacctgagacccagggtgttcaggctccctctactttttcctcgtcacctttcctaccctccctcaggccccaccaaagacacctagaagatttcataacacattcatactgagatcaccagagtcagtgcatctctgcttccggggataacaaaattttaactcaggatgaacccttaagggatcaagaccctagaggtagaatttagggttgggaacccctgaggcctcctcaaggaggcagctgtgctgcagtagaaaatgcctgaccaggctgggcatggtggctcaaacctgtaatactagcactttgggaggctgaagtgggtggattgcttgagctcaggaggtcgagaccagcctgggcaatatggtgaaaccctctctctaccaaaaatgcaaaaaattagctggtgcctgtagtcccagctactgggaggctaaggtggaaagattgcttgagccccagaggtggaagttgcagtgagccaagatcacgccactgcattccagcctgggtgacagagcaagacccatgtcaaaaaaaaataataaaatgcctggccttggtgccccagagctggtgtgagtgcagtttctttctgtgggatgacctggggaaaggctcttcggtttgccaaacctcccttcccttctcagatggtaatagcgacagctcagtttagtcatgagatttgcacagaataatgtataggaaagcgcattagaaatgccaacctgtagaaagattaggaagatgagaggggccacacgtgaccacagagtggattttcatacctctctccctggctggccccactcctgcccctgctctgaggcccctccttacactgtggtggacttcgtgtgcccacagcctcccaccagaactgcagcccatttacacactccatttgctccgtctctctatgaaggtaaatactctgggacttgtttttggttttagtttttgatcactattccaaggaggttggttccttttcaatcccccctgcccccacctggtagtctgaatttgagaaatatgtacctacacattatgtggggggtgggggagatctagtcctgattaacgtggcatatttttgtttacttgaaaattgcttcccaagattcaatctggttttcagaaaattttaaaattacattcccacgtacaaataaattgtatgctttctggataagtgacatgtttatatggtgataaagggaattataatgctcttaactcttatgtagtatgttcttatcaaaatcaccaagcatgagaacactgtttagtctcattcatcactcagcacagcctctttctgtccacttcagggccaagtctttgccatggccccagataatgtgtaacttagcttcaggaaagcaaaaagcctttgaatttccagtttgctgagccttgaaggaagcttttagacccagcttcaatgaagtcacagctccctgagtgaccagctggcctaggcttatggctccctctcagcctctcacccttgccgtggtcacccctggtcccctgagcactcactgaagtccctttgaaggacatttctagtctcctaagatgcctgttttcctccagctgccaccctcatttcaccagccaggtaggcagggtttccagcttcgtgctggcatagagaatccgcgccatagcagctgccagaaggaaaggtgtgtctgtaaaggcccaaactaggcggggacagcggctgctttccaagccccttccctttgtcagctccagggagaaccaaaggccagccagggggcctgtcttctattgggtcccagcatcagggtatacaatgcgctttcctccccttcttaaaatgtatcatatattaggccgacctaatactctgaaagcacatttaccctgaaagcaaatgagggaaaaaagcgagctaattgttcaagtggatttttagcatacattgactgtacttttctgacacatgagtgttaatcatggggaaaggagtgctttttttgttctcagtgaggctgacacaaagtactctccacagggtacattattcctgagacaaaccacttcttaccagtaacatagacctgggctgtaagtgctcccagtttccctttttgaaaagctccacctttaaaagctgcctcaattctggcaaactcccacgtgtgtattttgggtaactactctgaaaagaggtggtgttctgaggctgtttctcacacattgtagggccagcccagagaagctgggcataccacttcagaggtatgctgaggccgaaggaacacaggccctaggcctgatctctgagcctccaggaccacagccatctcttccttctcaggtcctctcctgagcaccttccctgcctcagattcccccatggcctcctgctgtcccactgtcggatcaggttctcacccctgcagacctgacctcagcacaggatccctaaccattcagctgagaagcaactaaccagagagatgtttgcttgttatctgttccaggaaagtaactggggcaaagacaatgtgatgattctctagttcagggcacagaatgtttgctggtgactcagagagggcatggagggcacggagggccggcaaacactgtaagtcattttgtttgtgtaagtttaggggaacccatgctcagcctcactctgaagcatgtggtatcacccatatgatctgaataagatgacaggtctcgatatgtggaattgtgcaccaggttgtctcattgctgtttaggaacagtcctgtattgaccaaactatgtgagagagagacagcctgatcatgaacccccgaccctgcagacttcatgtgcagtgccccaaatagtctagaaagtgttgtttagccgatgaacaaatgcccatttgtgagacgggaaggaagcactgggggccagcgtccctgatgctgtcccaggatcccccaggaacacctgcagggcagcctgagatcactcttcccgagacctgggactcccccaactcagcccctcagggccgggccctgcctacctcctggttgcctgcttcagccatgtggagcccgcccttgctgctagaaaagcctgatgtaacgctggcacaggaagttctgatccagagtgtttttgtttgttgtgcttcctcaggatttccttggatctggagaccccaaagaaacaaagatgctaatcaccaaacaggctgactgggccagaaatatcaaggagcccaaagccgccgtggagatgtacatctcagcaggagagcacgtcaaggccatcgagatctgtggtgaccatggctgggttgacatgtaggttttggtccctgccccgagaagcatttggcagcatgtcatcacatgtcacctcttgactgacaagggaaccaatagtgcttttctaattatctaaagctaatgtgatagtggctaggttcttcaggagacacagagattgcacaaggcagtggctgccttccaggagcttgtggagtcactaggggaagggatggtggggaccagggaagaggagacaccgggacatcacagctgccatttgctgagcgctcactacaacccagacgctgtgataaccttccaggcattaggttttccacctatgccatcagggctggtgtctcctcgcccaccttgcagatgatgaaacagaagctaaagggacaagttattcccaaagtccagatagctggaaagttgtagagctgagctttagcctctgatctgctggatgtcgatgccaactacgcgtgtaatggtaggaacaaaaacaaaacaagttccaaatccatcagggaagaattcttatgggaggaaccatggatatcttctcttaggagacactctttccatgaagggaccttaaagaattccaagaggtaaatagagatggcgggaaaggatatgcaggcaggaagtacagcagaaacacagcgagttggctctggttggaataaaagacgtgtgggaatgggagggtgaaggacatgggctgtgggttgggggaagtgggctggccacactggaagggcctccgatgccaaacggaggtgcttagatttgccaatagtgagtgaccacctacagtcagacaccccctcaggcaggcaggtagaatggagaccagataactggctagtgcagtagagcaggagggaacttggtagctgagggcatgagagagaagtagcagtgttagaaccaagtggcccatcccagggtgttggggcagtggtgagtgtcaggctggctttgctctgtggctgctggtgggttacaccattcgtcaaggtggacaacagggagaggagggggttggggtggggcagcactgagacaggatggattcagccttgggactcagcacaccggaccttgagggggaaggctttgtcctcccagtcagtgagcttcaggctcaagcatgtgcacacacacgtgcacatgctgctgcggtaggcaaaggacacgatgggacaagctcctgagggtggctcaggctgggtcctaaaggctgttgattcttctggaaacaacgttgtggtctacaggtagcagtggcccagccaggatttggggatatggaagaggctggttaatgattaaattgtttccttgggtgctgccatatattaataattggtgtgtgggcccctcacaaagggaccttgatggatgtcctaccaccccatctttttcttgtccgatagtaatttttttaaagacagaggcacagattttgttccccacattattctttaaatgaaggggttcatatagaagagagccaggcagatttagggtgctctgttctctcttctggtttttcttgtcactttcatttgtaagtgctatagtatcaggttaccctgagggtacttgagtaattcaagaaacacattaagcatgttctgcttgctttccagatgtggctataaaaggtgtctttcctccagggacgttgggtgtgatgggtgggaaggtttctaaggctgtaagggctgtctatgccacctttccctaaaaacgtgtcctttttctgctgagcagtgttatttttagatgccattattattctaagtgtagactgacaggcctccgtgccttgcctgtctccagacagggattcgttacagctgcttctccttcctttctcaccaagactagcctgggtagaaccctttctcctgggagagttagtttgactccaaattccagcctgaccagagagaacaagcgcattctatccaggcctcatgtccccatgagtgatgggagggctgctcaccatggggaagcagtggtgagccagtgggtccctgcagctcctccctctttggtcagcacgttggccaggaggacagggaagacttcctgcaggcctttgtccagagctcagagcaggccccacactcacctcttcctttagagggcagtcattgaggtattcttatgccttggcatccacttttccgtgagaattcctgcacccgtggtggaaagagtgctgggcccagtcttgggctgggtgcttcaccttccccacagactttattcttctcatctgagagatggaaataatcatgcccacctcttagggtggtgaagattctgatttcacgcatgggaaagctcatggcgtcatctgggtacctggtaggggattaggagataattgtttctataccctgctggatagctcagtgacttccgagaaagacacacaaggtggctgacaggatcctgtaaaggccacctctcccagatcctggtgatgtttctggagtgtgtattcatgcatttaataactacccactgagcaactcccatgggccatggcatagtatcaacactggggaccacagaatgaatggacatacggcttgccgttgacaagacccagagcccaccctcctacctgccccttccctctccaggttgatcgacatcgcccgcaaactggacaaggctgagcgcgagcccctgctgctgtgcgctacctacctcaagaagctggacagccctggctatgctgctgagacctacctgaagatgggtgacctcaagtccctggtgcagctgcacgtggagacccagcgctgggatgaggtgaggggaaagcaggcctcatgggctggggccccacctgagccctgggacacaggcgggtgggtacaggggccctttggggttcagatggagagaagctgccctcgtgatggaaggaacattgggctggcagtcaggtaacttaacctcgaattctctgagccacagaatcgtggagggcctttccacttgtcccttcattcagtcattgagaaaatcgttactgacagccagctctgccagggtggtgacaggcaccggggatgttagtgtgaacacgacagctccagtgcctgctgttgggctgagctgcctctgaccagcaccacaggctcagacacatggctgatgtggagatgcacctgcgtgacatttaaaacctgctgggtagcattttggcagaaagcaccatctgtgctttccagatccagactgtgagagccatttcaggggccagttttttccctcccttctctgcccccaccccacaaccactacttctctctggtgtcaggggctgtaaagaattagccaggtcagcgagaaaggtggccagcctcaggctggcagaagcagctgatgctgccccttctatggctcaacccccaccctccagctcactggctccctgttccctgcagagaaatccatccccgagaggattaggagctgtgccaagatcctcccccgactcacccacccacccatcatggtccattttagagtgaaagcaaagccttcactgagaggagccgtctgactgttgtctgctctctgaacagctccattggtgaggtgatgaggtcagtcatgagaaaaggtggggctagggacagaggcaatggtggcttctcaagagaaatttattagatttcccaagcagcatagattagagcatcttagaatgactcagacctcgctgtgcatcaggcagactttctcaccatggctcatgtccggttctcctggcctgacaggtggttctggggcttaggtgagaagcagtcagtgggtccatacagcacgaagcccacagtcatctttgacaactgataagaagtggtgatgatgataatgtcaattctgtttccttaggtgtcgcccgcaattaaaagaaatctgtttgcagcactacaggagcccacgcaaaccctcaaaataaaatgtttccgattctgtgccgcttctgtggtccagaaacagactgtgttgttactgaatccagtcgcttgcatattgctgttaattgccttttgttttcgaagagctgatttgtttttgcatttctgtgggtagttttttgggggaggcactctccccctctgagttgtcaggctggcaaaatatgatgtccctaatggattcagccaagtacagtgttttcatgggggctgcaggggcagctttattaagacttcatttgctccttcccccaggcctttgctttgggtgagaagcatcctgagtttaaggatgacatctacatgccgtatgctcagtggctagcagagaacgatcgctttgaggaagcccagaaaggtaggcaacacagactgtcaccttctagaaggagcaggagaagttactgccaagacatacatttcaggaaggctaccaagcccttcccatctgtagatcccaagatagatgacttcatcctggggatgtgattgtttggtggtgaaagactgtggagcatggaaagaccattggccttggagtcacaccctcctgggccacactcacttgccacaggcccttaagaggtgctgcctcctctccaagcctctgtggttactgagcaaagtgctgtgcactgcagtgtatcttcccgtttaatcctcgcaacagccctatggtatagctaccatcattatgattcccattttgcagatgagaaaactgaagggtaaagaggtgaagaaatttgcctgaagtttcatagctaggaagtggcagggaggtaatgtgagccagggtaccatgaggacaataagggaggattgccacacagtgtgaggcatggtctctactgagaatagaaactcagcttctatttctggctcagataaacgggtgacttctgctcctcaagaattctgttggtaaaatgggctgcacacagcgtacaacagcatctgaaataggagttaaagcaagtatagaactttcgctgatgttattaatcatattttttaaagttgacttccctctctgtgtcaggccctggctgagcacttaacctatgtaaccttgaatcttgccaacagctgtgcaaggacgaagaggctaaatgtgccatgccaagtcacaaatctagtcagcagcagagccagaattggaccagtacctctctgactggggaacctgatttttctgttttgctgcctatttagccttctaatggaagttgggtgtttgatgttccatagcatctgatttacgcttctatatggtaaccgttgccctctctggacacattgcagaacaaatgtctccctgttggagcccctcaaccgaaagccctcattgaaggttagcgcattctctgctgcttcagcatttccagagcacccagttgctgaagtatctgcatgtttgggcaaaacacatcaacctatccatctgtctgtgtctgcccttccaagaatccatcaccatagtaacttggtactcagacaagaggttgtagatgagaacggaacaaaggccagaccttctccttctctgaaggcggaggattaggatcatttgagtgctctcatatggcaagtgtcatggctacaagtgcttcactggcagccaccaacatctcaaggggctggccacgtagtaggtactcagaaaatatctgttaaacagtataggaacgattgagagtttttttgcttgttttcacaaatggttgtgataactgaggcagatccttcaaagtggtcattgaaaagcagtcatttgaagacaaactgaggacttgagttgggcttggttctgggaccttgggtgtgacactttacctccattttgcaaagcccatttcattgctcataaaaagggggataattttccttcttcataagtctgtggtgaggatccagtgaggtgattagcaacaaaagcattttacctccaagtgcagtaaagtggcaggtcctgtttctatcaccttaggagtcacaaaactttgccctggaatgagcagggggcagaacctcactgaagatgagcaagtttcactcttagactttgccctggaatttggcccctccagtttttcctttctgcatgcttttcaaagtcagtcgccttttcccagccaaaaaggaatttatctcactgtactttttccaggatgtagccttggttatttagagaagcgccatcccagcaacgaagcactgcagatgctccaatgagtgtcctacttccaaagcagccctgtgcaagccccacagagctccatcctgcctcctgtgtgacttcctaaatagcatgtgcttttttcctccctccaccactcctacagcgttccacaaggctgggcgacagagagaagcggtccaggtgctggagcagctcacaaacaatgccgtggcggagagcaggtttaatgatgctgcctattattactggatgctgtccatgcagtgcctcgatatagctcaaggtgtgtaaacatcagccagaccactgttttcccaagccccactctgacaccaagataaacatcagaagagctgggacattttaattaaagccctgggcttgtttattgggtgtattgtccataagcctgccttgcagtggcgtaatctggtgtatcatctttttccagtttgcccatcagaatggtatgaggaccgtcctggggttatggttggcaggtccagccctgcattgctaattcagagcatatctctcccctgctacctgggagcccatagctggacctgggtgagcactgggttttaaatttttttaattaaatgagaagatgaacgagagatggctttacagtaacacactccagattcttactcatcccagccaggaaaacagtttcaatattgctttctttcacaagacttcccatgatgtactgaaggagtagtggaagtggaagagacaaggagatgttcttctccactggacaaggccacatgcaggggtgggaaaaacactggcatggaagctgcaggtgacttgtagcaagtcacaatccttcctgagctctgcatgcccatctgtcctgtgggagtcccttgtcctggtccctttggttgctgggagcctcacagagtcatgcttacagtttgaaaattgtcaagcctaggtgtaaggtcgcatttttctgtttgggccagtgccttatgcttctgataggagcagcagagggaagaggcataagatgagcatgaatacagttggtgtctgcctgcctttgtcccagcaggctcttccgacacatcttgggtcttgctgcagctgtcgctcccccaggggaataatctgggagggtgcagtgagagatctggaaaaaatatcctcaaactccctggccttatgccctgtccacctaagaattcaccatcctggagtggccctactcctaagcagagtggctttcccctcactacactttgtccctcaccctggcacagacactgtgtggtgggagaactgatgctgggaaaagtactgttgcctggcccctcctcctggggccagttggcagccacagacactgtttgacacgtttcccctcccacccgctgcacacagcagatcctgcccagaaggacacaatgcttggcaagttctaccacttccagcgtttggcagagctgtaccatggttaccatgccatccatcgccacacggtaaggtggctgggtcaccagcacctgagggtaccatctcctgagctaggggtcccgggcatatctaaagagcagcagactggatggaatgtaacccactggtcacagtgaactgctgaggaatcttggtctcctctgggaagaaaaagtttgagtttctttgattgactgtttgtctgccatgcatcaagcagtgggctcctgaattgtgatccagagctggaatgggccttgctagttcctcagtgcaggctttgatgactcagggaaactctgcattaaccagcaagaggggtgggagttccatgaggccctctccttcagtagggcgaaggcccagattaaccaaaggctcgagatccctccctggccctgtcagtgatttgtgtgttcttcagcaattcactttccctctctgtccctcagtttccttctctgtgaaactagagtgttggcttggtctccagaaacccaagtagttctttttagtcactccctgattcctttgagaaagccattttaaatctctctggtggcaatggggaacaggtgatgggttgtcaacagcctcttcatccactgtatctcctcaatcacccaacagatgttgagcacttagtacctagtaggcaatgtactgagggcttcattgtatcaagtcatttcctcctttcaaccacactttgagggaaggactgtcacccccatgttacagatgagaatgaagccctagacagagaggtctcagaggttattaggttggtgcaaaagtaattgcggtttcagactgaattttaaatcattataactaggctcaaacacatctttattaattaaaataggaaccattatgatcaacacatttttgccaatgagaaataagtctgtttatttctgtagcataaaaatccatactttgggatttgacgaactcttggaaagcattttctgcatcctgctggttgtggaagcattttccctgcaaaaagttgttgagatggttgaagaagtggtagttggttagcaagaggtcaggtgaatattgcgatgaggcaaaattttgaagtattggttgtgtgatgtgcagtcaggtgggtggagaagaattgggccctttctgtgaaccagtgccagctgcaggtgttgcagttttcggtgcatctcctcgatttgctgagcatacttctcaaatgtaatcatttcaccaggatcagacaactgtagtggatcagaccagcagcagaccaccaaacagtgatcatgacctttttttggtgcaagtttggctttgggaactgctttggagctttttctcagtccagccgtggagctggtcatcacggttgtcatgtaaagtccactttttgtcacacctcacatctgattgagaaatgttttgttgttgttgcatagaataagaaaagacaacacttcaaaacgactatattttcattttctatcagctcatgaggcacccacttatcaagctttttcaccttcccaatttgcttcaaatgccaaacaaccgtagaatggttgacattgagttcttcggcaacttctcctgtagttgtgagaggatcagcttcgatgattgctctcggttgttgtcaacttccagtggccggccactatgctcctcatcttcaagcctctcatctcctttgcaaaacttcttgaaccaccactgcactgtatgtttgttagcagttcctgggccaaatgcgttgtcgatgttacgagttgtctctgttgctttatgacccattttgaactcaaataagaaaactgcttgaatttgttttttgtctaacatcatttgcatagtctaaaataaacagtaagtaataactcattagcaaaaaaacataaagcgagaaatgcccgttgaaatgatgtataacataaccacatttaagaatgtattctactatcaaacagcaaattccagagccaatatgtgagtctcagtagtctggcactggagcctgtgttcctagcctttccctccctgtctccttttagagaaagcaggctagtatgttggtttagtgggtaaactcgagagtcctcacacacaaatgacactgtgttacttatcttctctggccttcagcttctttctctataaaatagggataacagcactatgtacttgatgggattgttttgaggattagacgagttaatattggaagagtacctagcacagagtgaccctaggtggcagctatccttactgctgctccaggcaaggcttcacgccagctttccctgacctgctccctccagctgggcatctagcatttctcttttttcagagatgaggtctctgtcgcccaaggtggagtgcagtgtcatgatcatagctcatggcagcctcaaactgctggactcaagtgatcctcctgcctgagcctcccagagcactgggattacaggcatgagccaccacgcccagccttcccgccgttctttgacctctcaaatgccctgccttccaccttgggcatttctttccctctaatctgtgctgacttctcagcacattttttgcctcttgggaaagtctggcaagaaggactcctgacaggctctgtgcatgccgtcagtctagtgttacatctcttcccacagcagggtcagtggtctcaagggacctcatcttcccttacagtctttggctttcctgaaacgagaccccctcagggtccctcatctttatcaggtgctcacctggagagaaaccaccacaaaaggagcccagactcaacttaggctggaagtcagggcccagctcagcctcactttgcccaagccactccagagcctggctctcagctccttccctcagacttttctctcgctgctccctgtcctcttcctcacctggggcatggggctgagggctcctgtctctaacagctgagctctgctccaggacctacatgggactaggagctaaggggcctcagaccagctggggccctggctcttatcccagctgaatcttattaattgggccattccttcattcaataaatgcctactacgtgacagaccctgtgatgagacctggtgacacggtggtgaacaaaacgttgtccctgcagtcagtcccagtctagcaaacaggacaatccctcaggggaaacgtttagaggcctgtgaagagacttcctggaggaggtgtcctctcagccagaaggagggagagaataaaaatggggcaagtgaagtggaggaggattaggaagggtgtttgtggcaaaggtcacagcctgtgcaaaggcctggaggtgagtggtagtttgtggttcagcatccagggcccagcagagcagcactgattcagggcaagactggaaagggaagttcaggtccttcctggatacatggcatctttcccagaggaaaggactcccctgctacctattctctctgggacgttacttagcttccctacctagtgcagtagaaccacaggcagagttcatcttgttcttaccctggaaaggatgtggtctcaggttttcttgggttcttggagctaacaaaaggtatagaaatttacgtgtgaactaaatagaaaatgctaagctctgaactgaagaagtgtagagcaaagtgagtcctcaggagttcagaccaattaggggttaagctttggtggctcagtgatgagtagggcctcacaagacccttcttaagtgctcacaagaaagaggagttactggcctgctgtaatcctcaccatctaaagctttattagaaatgggcaatctcagtttatatacagtgtgccagatgccttcaaaataaggtattcttaaccttttgtagaccctcacacagaaaattccttatttgtctgctgagcttctggcagcctctaggtacgaagaccaatcactaatctgtgctaactgcctcctgttagtgcctatgccaggagccagggaaatgggtcagcagttgaggaactccgcatgtgtgctcgtttggtggcacatcagtcaagctgctgttggaaagcacagaagaggcatgtgggttcatgctggagagggctaaatgcctctgttgaaagacaggcttatatgaatcagtggttatgtcctaagctgcatagaaggtcttctcttttagagctaattggagacaacttgagtagttcagagaaatggaataattaccaactccagaggcagtacagcttggaagaaagacattcttgggctttggaatcagacctgggtttgaacagcagctcagctctgttctagttggtgacttgggcaaatcatctatctaggtgtcggtttcctcatcagtactgtgaggataaaaatgcataccacaaggttattatgttaaagaccagatgagacagtggctatatggcgctcagcacacagtaggagtaggtgctcaataatcagagccgctcttgttgatgtcactcagaattattggtgtctgccttttggcctggcccagcagcagctcttgaagaactcaatccctgtttgcttttctctcactgcaggaagatccgttcagtgtccatcgtcctgaaactcttttcaacatctccaggttcctgctgcacagcctgcccaaggacaccccctcgggcatctctaaagtgtatcctttctcttatccctcctccgtcccaccaccgttcttgtctaatggccccaagaaattccttccagagcactttcctggcagaaccttcctctctcagcaaccctcagggaagacagagaactcaccctcccgctgctgtttggctatagaggctcagcagggaggcccaggggcccaggccaagagaagatgagttttcagggctctctgagctgaacccagcagtgggtctctggccaacacactgtcccaatccctcctagaacccacagatgagggtgtgactgaaatggaagaagcaccaggccttcaggcttggaaccttgggcacttctccagactggggaggagggagtgtttgttcagcccaggtatacatagcaccttctgtgccccaagccctgggccaggcaccaggtggcaaagctgccatcaaagagggaggtcacaagttagggtctggtttggtggatgtgtgctgtgtctgagggtggaatgaagctgaggtcagggccatggtcagggaagtttacctggaggaggagatgtccatcatgcaagctgaggcagccagggaagatggccaagtggatgttccaggggaggacccagcatatggagaggcaagcaaggcatgtgggagagggtgaggggaccctgggtgggaggggccggagaggcagcaggacccaaggcctgagagcctacctttgggttttcctctcttctgtagccatcgagggccacagtggtaccataagcagagcaggtgcctgaagggcctgtgcagccagatactggatcattaccaggcaatgatccagatttttaaggtcttggatgtcaggagacataattgtccctgttcttttctaaatctcactgtactctcagctccttcccagccgcagccccaccttccctctgtaaggaaaacccactccactggagaagacccagagctccttgttgtaagaattggcctcgctagaggattccaggcccattatgtacatttcaggggaaataccctcaaatcaaggggtgccttcctggagtcagacctctgctgcatgcgtctccgtctttccccgtaggagcagtcagggctatgcctgtgggggctgagcacctgtactcatcctttccagcaagttctgtttgagtcaacagcttgatagaacctctaccctgagccttaccctgtgccatcccctggggacctggaaatggctcctgacagtccctgactttgaggagtcatgctggagacacagaaggaaactctccacagaactgctgaagtggacggggctgcactgcagacggcgggagcaggaacactgggagagatgcgggaggaagggcaggagggcctgggggcagccaacatcggaggtgacctgagaggagagcacaaaggctcgtcagcctctggctgaggagcttcaagggggccccagagcacaggctgccgctcagaaactgcccaccaggccctcggggaagggtgtgcagacagagtggggtacacccaggggcctcagagcagggttgagggtggctccccagggagtctggaccaggccccacctggcagggtgagagcagagtgccctttgtgccaggcatcctaggagggcctggctggcaggtttggtgaggcaggaagagccattttggcctagtcagggtataagatgagccatcagcaggcccagagatgctaagcaaggttaaagtattaatggaaactacgctgtttttatctttggaaaaattcctgggccttgccatccgagaagtacactcacctctcacaagcgcacagagccttcctcacggtctttcctctgccttcccggcaccagcacaagctgtgttccagcctggggctcactccaaggacaggcagtgccagctcctgggcctggtgttgcccctgctgtccttaaccctgttcacggcaggaaaatactcttcaccttggccaagcagagcaaggccctcggtgcctacaggctggcccggcacgcctatgacaagctgcgtggcctgtacatccctgccagattccaaaagtccattgagctgggtaccctgaccatccgcgccaagcccttccacgacagtgaggtgaggatgcagcacccttgggcaggtggcttctcctctcccttgaggccatctcatgccttcttgcctggcctgggttccgtttgaagagagacagctgcagctccctctaggctctgtgccccctgctcaagcctggccatgccagctcccctgtgcttccctgtccacctcctgttctccccgcagtccacctggcgcccgctcacagcccccggccccggcctcagccctcagcctggcctcccttgctccttgccctcccctaggcaagccccacacctctgtgcccaggtggctctgcctttaccccaggcctggccccagagctgactcttactctagaaacctctgccctttctggaaccaggctgtagttctccagcaaatctaccccacactcccaacccacattccttcaacccagccagcttccttctttcacacatcctccctcaagctcagagcaaggacttggttcagacagacctgggttcacatcccggctccaccctctcctagctctgtctccatctttctgcaccttgggttccccctttcccacaggtagttgtgaggctaaatgagccagtatagtccacgtgctccgcacggtgcccggagcatggtaaatggctggctaatggtggcagcggccactgtcattcctgccaggggaaaagtgccgttgagcgctgcctgtgcaggtgtcttgggcacggggacccaagtgacagggcttgggtatttcggcaggcctttatcctgcttccccatggcatggagctcctgggcccggcgccccttccctgcctgcccacccgggtggcctttcctcttggcagccaggccccaggggcctgaagccagagtccagggggaggaggacacgtgcctgccccggcccctcgggagtccgtggctgttttgtaggagttggtgcccttgtgctaccgctgctccaccaacaacccgctgctcaacaacctgggcaacgtctgcatcaactgccgccagcccttcatcttctccgcctcttcctacggtgagtccctgcatcctgagcatgtgggtgggacagcctgtggacagccaggctcactccactgctctctggcctcaggacgttgggcaagggccaaaggcctctgaatgtccctgtttatgaaatgaggacactctgacgcccacctacctgacacaaggagtcactgtcggtgttcccagagataggacccactgctgcccaaagctgaagcacccactctgggaacctggcgcagggctttacataaccaaatgccccagaaagagagtccgatggctttgcattcagaccaggaggctgagataggttatcaaggcccagctcctttgatgttgacagaggatcagaagccccttcccaggagctgagcagaggccacacacacacacagacacacacgcacacacagactgcccctgcacacacacacatacagaaactgcccctgcacacacacacacagactgtccctgaacacacacacagactgctcctgcacacacacacacagactgcccctgcacacacagagactgcccctgcacacacacacagagaccgcccctgcacacacacacacagaaaccgcccctgcacacacacggagactgcctctgcacacacacacagactgcccctgcgtgcacacacagactgcccctacacacacacagattgctcctgcacacacacacacacacacacagagactgcccctgcacacacacagagactgcccctgcacacacacacagagactgcccctgcacacacacacagagactgctcctgcacacacatacagagactgcccctgcacacacacacagactgcccctgcccacacacacagagaccgcccctgcacacacacatggagactgcccctgcacacacacatggagactgcccctgcgtgcacacacagagactgcccctgcacacacacagattgctcctgcacacacacacacacagagagactgcccctgcacacacacagagactgcccctgcacacacacacacacacggagactgcccctacacacacacacagaaactgcccctgcacacacacagattgctcctgcacacacacacacacacacacacacacacacagagagactgcccctgcacacacacacacagactgcccctgcacacagacacacagagaccgctcctgcacacacacagagactgcccctgcacacacacacagagactgcccctgcacacacacacacacagaggctgcccctgcacacacacagaccgctcctgcacacagacacacagagaccgctcctgcacacacacggagactgcccctgcacacacacagagactgcccctacacacacacacacagactgcccctgcacacacacacacacagaaactgcccctgcacacacacagattgctcctgcacacacacacacacacacacagactgcccctgcacacacacacagagactgcccctgcacacagacacacagagaccgctcctgcacacacacatggagactgcccctgcacacacacggagactgcctctgcacacacacagagactgcccctacacacacacacagactgcccctgcacacacacacacacagaaactgcccctgcacacacacacattgctcctgcacacacacacacacacacacacacacacacacagagactgctcctgcacacacatacagagactgcccctgctgcctcttcttgcttttggtgaagctgccagtgggttgagaagcaactctgtggtcaccccacctgcctggcggcaagtcctttgcaaggcctccagccccctcagccctttctctatgccctccagacgtgctacacctggttgagttctacctggaggaagggatcactgatgaagaagccatctccctcatcgacctggaggtgctgagacccaagcgggatgacagacagctagagattgcaaacaacagtatccatgcccttggccagagcctgtgtgtgcggctgtgtgaggggtctggggacaggcgggaagtaggagggcccagtcccaggggatcgcgggccatgctgagcctggccctgtgttcccagagagattggagaggcccacatgggacagggacagggatcagagatgggcagacagctggccagggcctaaggacccagaagtggcaagtggcaccttggtcttcccgtgtgggtctcccaccctcccctgacccctaaaaggcactggctgtgcctctgtctgtgcatagctcctgcatagccaacatgggacatgatgtcatgatgtcggtgttggcccccagctcttccactcaagtcactttcgcatgcaagtgacagagtccaaaactgacaagctgaacaagcaaagggtgtgcaaggaagccccaagcaggagaggaagcttcctggcccagcgctcagtctggtcggtcacaggctggctctgcctctcttggccgcactgtcctctgggcaacttcattctttggcagccccgtggtgcccccataacacagagatgtcaggagcagtgccagccccacatcccctcagccttatagcccccagaaacagccagctttcctctcagctgtggcagtgaaagccccggggcacagctcagcctgccccttggccaggaggatgcaccagggcagttgtccagggcaggccacacttgcaggctggacatgggaggggcttctggcagggaacagcacacacgtggcctgaggcctcgctcccttgcactgactgagtctgcaggcctgggggctgtaagcctgccttccttgcagctcccaggtgctgccacccccaggggccacactgggaggagggaagctcagagagctgcttgctgaaggaaagacggacccatctctgccacccaggctccctcaggtgccacagatgatatgtgctatggtgctggcaggtgggtgctgtgcccactccaacttggtaccagcagtccccatgtcctgggcctccctgcaggacccctgctggcctctgttaccagccccaccactgtgggagaggggcggtttccagggacctccaggtgagtctgacccgccctggggtcagcagggactctcgcccctgtctgctccatcacaagtgcccgcagacccccagcagccactgaatgtttctccaggatccctgggcccatcccctccgtgcctacccgcagtggctcacagggcccgcatgtgcttcccactggccctgggagctatggtgtgtgtggcctgcgaggggaatgggtgagggcagcagggccagcagagtcccttccttctgattccttggcctgagccccctctgttcctccacctggaaaactcttccactggtctggctgcccttgagtcttctcacaggggtgtagggtggaggctagggtctgtctccatctctgcttctgattccatccttgaccagatccctccaggctcccagattctgcggctagtggagaccaaggactccatcggagatgaggacccgttcacagctaagctgagctttgaggtgagggtgcctctctgggtgacctgcaggagggcagcctccatcccttctcctgtgcacatggggaccctcagctagcgcagtggtggaggaggattggccagaacttccagatgtggtggcacgaaggaggggcaggaccccttcctgtggggtgtgggagccatggctgcccccgagggaccatggccaagggcgcaggtctgtggacagggaggcagcttcagctctggtgggaggagcttgccactgttagggtcacctgggtttaggaagcaggtcctctctcaccactgccaaagattccaggatcataatccacacagatgtctcactgtggctgagtgaggacactgtgcctccttcccgcccaccctgcagcaaggtggctcagagttcgtgccagtggtggtgagccggctggtgctgcgctccatgagccgccgggatgtcctcatcaagcgatggcccccacccctgaggtggcaatacttccgctcactgctgcctgacgcctccattaccatgtgcccctcctgcttccaggtaggtggccaccctggtagctcacatgtgcttctcttggccacttttcccttgcccaaatgtccctctgggaggcgtggcccctgggaggaggggcacatccatggctccaagttgggacagaggcttgtctgtcctctcccctgcttgcattccatgtgcatctaaagtggacttcactggcccctgcgctgtccacatcctccccaaatcctgggggcccagcaagcgtgatgtgcccttgaccttcactcagaaaacaagaaaccccacagccccctcccatctccccttccagccctcaaacaaaggtgctgcaggtctgtgtccagccctgaccactgccaagccccctccccttgagaggcagtgcgtcctggccccaggcgtagggctgatgagcactagggcttcagcctggtcttacagctgtcttcccttagatgttccattctgaggactatgagttgctggtgcttcagcatggctgctgcccctactgccgcaggtgcaaggatgaccctggcccatgaccagcatcctggggacggcctgcaccctctgcccgccttggggtctgctgggctgtgaaggagaataaagagttaaactgtcagaatgtg
